United States Patent Application Publication US 2008/0050393 A1 - sequence listing, part 48

SEQ ID NO: 153680 - DNA, 2538 bp, Homo sapiens
atggctgaaaggggccaatgtacagctcaggctgtggcttcagagggtggacgctccaaaccttggcagcttctacgtggtatcgagcctgcaggtgcacagaagtcaagaattgaggtttgggaacctctgcctagatttcagaagatggatgcccaggcaatagttttgctgcaggggcagggcactcatggagaacctctggcagccagttaccctagctctgggcagatccagagacgctatcagggcctggcgttgagaaccttaggaatcttcctgtcattctattctacagcagctgagctcacacccaaaccaaaagacaaactccttctcattcttctctcccgtttcctcaagcagaggaatctctccccatggccaccgctgccccaggcctgcagcaagtactgcaaggctgttgctgatattcactcaaggtccaagggctctttggtcagcttgtggtcaatgctgataggcctgggtatctcccttcagggcaacgggctcccctctggcccagagattaaaagagtaaaattaatatctaacaaagggactgaaactgacaatgacccaagttgtgtccatcctatcattaagaggagacaatgtcgaccagagattagaatgtggcaaacaagagagaaagcaaaattttcagatggagaaaagtgccgtagggaggcttttaggcgtttgggtaatggggtgtctgatgacctgtcaagtgaagaagatggtgaagcacggacacagatgatattattgcgtaggagtgtggaaggggcctcaagtgacaatggttgtgaagttaagaatagaaaatcaatactttcaaggcacctaaactctcaggtaaagaaaaccactacaaggtggtgtcatattgtgcgggattcagatagtctggctgaatcagaatttgaatcagcagccttcagccagggctctagatcgggtgtgagtggtggctctcgaagcctcaacatgtcaagaagagactcagaaagcacccgccatgactcggagactgaggacatgttatgggacgacctgctacatggcccagagtgccggtcatctgtcaccagtgacagtgagggggcccatgtgaatacccttcactcagggaccaaacgtgaccccaaagaggatgtttttcagcagaatcatttattctggcttcagaattcaagtccttcctctgatcgagttagtgcaataatctgggaggggaatgagtgcaaaaagatggatatgtctgtgttggaaataagtggcatcatcatgagcaggagatttttatttgcaaaactcttcagccatattacttctgccaggaaagctaggaaatatgaaatacctcatttcagacttaagaaggtggagaatattaaaatatggttatcactgcgttcctatctaaagagtatgtgcaagaatatgctcactgaagctcctggcagcagttactcagtagacagtgtagttctgggtgtcaggcagattatagcagcagctgacagacttgctggacagcaagttggatgtcatctctctgcaaagctggtaggggtaggacatgaagatcaagtccctggaggagatctgcctcttctctgtgcatcaaggaccaggttcaaggcatttgtcaccattgaggactacaacggctatgttggtctgggtgttagtgctccaaggaggggcgttggtactgtcttggcccctgtgcccaggaacctgctgctgatggtggttacccaccactgctgcactttgactggggactgcgctgctaccctggccaattttgccaagggcacctttgatgccatctccaagacctacagctatttcacccccaacctctgctgtggaaaattaaatcataagctgagtaaatgcctggactctcccctggctggtatcaaaacttacctatcaaggaaagtgatgactgcagaaaccagtgagatacccacctgcttgttcacatgcacaggtgctctcagctctgccaaagcgaatgaatggtgtttccggaggagcaagtccttttccaactgggttggtgaccagattgttgaaatcaatggggaacctacacaaggaatcacacatactcgagcaattgagctcattcaggctggtggaaataaagttcttcttcttttgaggccaggaactggcttgatacctgaccatgttatagcaattgtcttatatttgatgatgcctattgtgaacataagtgaagtacttggacccttgtgccttatgctactcatgggaactgtccactgtcaaattgtgtctactcagataacaagaccatcaggaaacaatggaaatcgaagaagaagaaaattacgaaaaactgtaaatggtgatgggagccgagaaaatggaaataactcctctgataaagtcagaggaatagaaactttggaatctgtacccattattggtggtttttgggagactatctttggcaacagcatttgttatcgtctgtcttttgcctaa

SEQ ID NO: 153681 - DNA, 2855 bp, Homo sapiens
gtgaaatcccattctctggctggagacacagatggcctcaaatgagagagatgctatatcgtggtaccaaaagaagattggagcctacgatcagcagatatgggaaaagtcaatcgaacagactcagattaagggtttgaaaaacaaaccgaaaaagatgggccacataaagccagacttgattgacgttgacttaatcagagggtcaacatttgccaaagcaaaacctgaaattccatggacatctctgactcggaaggggcttgttcgagttgtattttttccattgttcagcaattggtggattcaggttacctctttaagaatctttgtttggctgttactactttatttcatgcaagttatagcaattgtcttatatttgatgatgcctattgtgaacataagtgaagtacttggacccttgtgccttatgctactcatgggaactgtccactgtcaaattgtgtctactcagataacaagaccatcaggaaacaatggaaatcgaagaagaagaaaattacgaaaaactgtaaatggtgatgggagccgagaaaatggaaataactcctctgataaagtcagaggaatagaaactttggaatctgtacccattattggtggtttttgggagactatctttggcaacaggattaaaagagtaaaattaatatctaacaaagggactgaaactgacaatgacccaagttgtgtccatcctatcattaagaggagacaatgtcgaccagagattagaatgtgccaaacaagagagaaaccaaaattttcagatggagaaaagtgccgtagggaggcttttaggcgtttgggtaatggggtgtctgatgacctgtcaagtgaagaagatggtgaagcacggacacagatgatattattgcgtaggagtgtggaaggggcctcaagtgacaatggttgtgaagttaagaatagaaaatcaatactttcaaggcacctaaactctcaggtaaagaaaaccactacaaggtggtgtcatattgtgcgggattcagatagtctggctgaatcagaatttgaatcagcagccttcagccagggctctagatcgggtgtgagtggtggctctcgaagcctcaacatgtcaagaagagactcagaaagcacccgccatgactcggagactgaggacatgttatgggacgacctgctacatggcccagagtgccggtcatctgtcaccagtgacagtgagggggcccatgtgaatacccttcactcagggaccaaacgtgaccccaaagaggatgtttttcagcagaatcatttattctggcttcagaattcaagtccttcctctgatcgagttagtgcaataatctgggaggggaatgagtgcaaaaagatggatatgtctgtgttggaaataagtggcatcatcatgagcagggtcaatgcctatcagcaaggagtaggttatcagatgctgggaaatgttgtcactattggattagcattttttccattcttacatcgacttttccgtgagaagagccttgacccaactaaagtccatttcagctgaggagatcttgactctcttttgtggggcaccacctgttacacctattattgttttgtcgataattaatttttttgaaagattgtgtcttacttggatgttttttttcatgatgtgtgtgggcagagagaacatataaaacagagatttttatttgcaaaactcttcagccatatttacttctgccagggaaagctagggaaatatgaaatacctcatttcagacttaagaaggtggagaatattaaaatatggttatcactgcgttcctatctaaagagacgggggccacagcgttcagttgatgtggtttgtatcctcggttttcctactgacactttcgattgctttcatttgttgtgctcaggttctccaagggacataaaactttcctggaatgatgcttattaactggggagtttttgatctgggggaaacagctttactactttttttattgcgtctggcctcactggggtctgaaaccaataagaaatacagcaatgtttcaatattacttacagaacagattaatttatatcttaagatggaaaaaaagccaaataagaaagaacagcttactctagtaaacaatgtattaaagctgtccaccaagttgttgaaagagctggacacaccatttagactcctatggactgacaatgaatcccttaatctacaatatcacaagagtagttatcctttctgctgtctcaggtgttataagtgatcttctaggatttaatataagactgtggaaaattaaatcataagctgagttaaatgcctggactctcccctggctggtatcaaaacttacctatcaaggaaagtgatgactgcagaaaccagtgagataccccccacccgcctggttccaccatggcaccagggtgcctcctccagctcctgcccaaagcgaatgaatgggtgtttccccggaggagcaagtccctttccccaactgggtgtgccatgccaaaaaccctgtattttccatgcctttccaaacaacatgaatagtcagctgacctaaagactgtgtgtgttgtggtaacaccaaagacaattttgtaagtttgcgcttcagtactgtgacagttatgtttactggacatagtctttttggcaactatgatagatgcccaaagcatgaagcaaatatcttttattggaaatatgcaaattcaatacttttccattatagtctatagaactggagatttcatttctctatcaaagagagatcaagcgaactattttaggttaaatccgaataaaagaactttactgg

SEQ ID NO: 153682 - DNA, 457 bp, Homo sapiens; identical to SEQ ID NO: 146751
  misc_feature (1)...(457): n = a,t,c or g

SEQ ID NO: 153683 - DNA, 395 bp, Homo sapiens; identical to SEQ ID NO: 146752

SEQ ID NO: 153684 - DNA, 1503 bp, Homo sapiens; identical to SEQ ID NO: 146753
  misc_feature (1)...(1503): n = a,t,c or g

SEQ ID NO: 153685 - DNA, 3408 bp, Homo sapiens; identical to SEQ ID NO: 146754

SEQ ID NO: 153686 - DNA, 2956 bp, Homo sapiens; identical to SEQ ID NO: 146755

SEQ ID NO: 153687 - DNA, 1272 bp, Homo sapiens; identical to SEQ ID NO: 146756

SEQ ID NO: 153688 - DNA, 586 bp, Homo sapiens; identical to SEQ ID NO: 147388

SEQ ID NO: 153689 - DNA, 4402 bp, Homo sapiens
gccgccgcagtagcagcgaagcagcagagtccgcacgctccggcgaggggcagaagagcgcgagggagcgcggggcagcagaagcgagagccgagcgcggacccagccaggacccacagccctccccatgctgcccaggaagagccccagccatggaacaccagctcctgtgctgcgaagtggaaaccatccgccgcgcgtacccctgatgccaacctcctcaacgaccgggtgctgcgggccatgctgaaggcggaggagacctgcgcgccctcggtgtcctacttcaaatgtgtgcagaaggaaggtcctgccgtccatgcggaagatcgtcgccacctggatgctggaggtctgcgaggaacagaagtgcgaggaggagggctttccgctggccatgaactacctggaccgcttcctgtcgctggagcccgtgaaaaagagccgcctgcaactggtgggggccacttgcatgtttgtggcttctagattgaaggagaccatccccttgacgccgaagaagctgtgcatctacaccgcaaactccatccgggcccgaggagctgctgcaaatggagctgctcctggtgaacaagctcaagtggaacctggccgcattgaccccgcacgatttcattgaccacttcttctccaaaaatgccagaggccgaagaagtacaacaggatcatccgcaaacacgcgcagaccttcgtttgccctctgtgccacagatgtgaagttcatttccaatccgccctccatggtggcagcggggagcgtggtggccgcagtgcaaggcctgaacctgaggagccccaacaacttcctgtcctactaccgcctcacacgcttcctctccagagtgatcaagtgtgacccaagacttgctccgggcctgccaggagcagatcgaagccctgctgggagtcaagcctgcgccaggcccagcagaacatggaccccaaggccgccgaggaggaggaagaggaggaggaggaggtggacctggcttgccacacccaccgacgtgcgggacgtggacatctgagggcgccaggcaggcgggcgccaccgccacccgcagcgaagggcggagccggccccaggtgctccaactgacagtccctcctctccggagcattttgatacccagaagggaaagcttcattctccttgttgttggttgttttttcctttgctctttcccccttccatctctgacttaagcaaaagaaaaagattacccaaaaactgtctttaaaagagagagagagaaaaaaaaaatagtatttgcataaccctgagcggtgggggaggagggttgtgctacagatgatagaggattttatacccgcaataatcaactcgtttttatattaatgtacttgtttctctgttgtaagaataggcattaacacaaaggaggcgtctcgggagaggattaggttccatcctttacgtgtttaaaaaaaagcataaaaacattttaaaaacatagaaaaattcagcaacccatttttaaagtagaagagggttttaggtagaaaaacatattcttgtgcttttcctgataaagcacagctgtaagtggggttctaggcatctctgtactttgcttgctcatatgcatgtagtcactttataaagtccattgtatggtaatatattccgtaggtagaatgtggaacctcttcaccttattcatggctgaaagtcacctcttggttacagtagcgtagcgtggccgtgtgcatgtcctttgcgcctgtgaccaccaccccaacaaaccatccagtgacaaaccatcccagtggagggtttgtcgggcaccagccagcgtacaggggtccgggaaaaggccacctgtcccactccttccgatccgcttcttaaaggagaggacgaagaagtgccataatatattctatttttatactcttcctatttttgtagtgacctgtttatgagatgctggttttctacccaacggccctgcagccagctcacgtccaggttcaacccacagctacttggtttgtgttcttcttcatattctaaaaccattccattttcaagcactttcagtccaataggtgtaggaaatagcgctgtttttgttgtgtgttgcagggagggcagtttttctaatgggattggtttggggaatatccatgtacttgtttgcaagcaggacttttgaggccaagtgtgggccactgtggtggcagtggaggtggggtgtttgggaggctgcgtgccagtcaagaagaaaaaggtttgcattctcacattgcccaggatgataaggtccttttccttttctttaaagaagttgaagtttacgaatcctttggtgccaactggtgtttgaaagtagggacctcagaggtttacctagagaacaggtggtttttaagggttatcttagatgtttcacaccggaaggtgtttaaacactaaaatatataatttatagttaaggctaaaaagtatatttatttgcagaggatgttcataaggccagtatgatttataaatgcaatctcccctttgatttaaacacacagatacacacacacacacacacacacacacacaaaccttctgcctttgatgttacagatttaatacagtttatttttaaaagatagatcctttttataggtgagaaaaaaacaatctggaagaaaaaaaaccacaccaagacattgattcagcctgtttggcgttttcccagaggtcatctgatttggacagggcatggggtgcaaggaaaattaggggactccaccctaagttccgggttccgatgaattcttatcccctgccccttcctttaaaaaacttagtggacaaaataggcaatttgcacatcttgggctatggtaattccttggtaatttttatttaggaagtggttggaagggaggtggcaagagtgtggaggctgacgtgtgagggaggacaggcgggaggaaggtgtgaggaaggaaggctcccgagggggaaggggcggtgcccacaccgggggacagggcccgcagctccattttcttattgcgctgctaccgtttgacttccaggcacggtttggaaatattcacatcgcttctgtgtatctctttcacattgtttgctgctattggaggatcagttttttgttttacaatgtcatatactgccatgtactagttttagttttctcttagaacattgtattacagatgccttttttgtagttttttttttttttttatgtgatcaattttgacttaatgtgattactgctctattcccaaaaaggttgctggtttcacaatacctccatgcttcacttagcccatggtggaccccagcgggcaagggttctgcctgcttttggcgggccagaccacgcgggcgcgatccccacacaggctgggccgggggccggccccgaggccgcgtgcgtgagaaccgcgccggtgtccccagagaccgaggctgtgtccctcttctcttccctgcgcctgtgatgctgggcacttcatctgatcgggggcgtagattcatagtagttttttacagctgtgttattcttttgcgtgtagctatgggaagttggcataattattattattattattataacaagtgtgtcttacgtgccacccgggcgttgtacctgtaggactctcattcgggatgattgaaatagcttctggaatttgttcaagttttggggtatgtttaatctgttatgtactagtgttctgtttgttattgttttgttaaatacacccataatggctaattaaaagagactccaaatctcaaatgagcacagctcacagtgctgtcgtgccccggtcacctaagcaagctgcccgaacccaaaagaatttgcacccccgcgtgcgggcccaccgtggttttgggggcctcccctggccagggtcaatcctggttctcggaggcccattctcgggcacaaggcccaccccgccccaacccctcccagaacaacgggtcacgcttacctcaaccaatccttggcttgcggcgtctgtctgaaaccacgcggggggcctttgaagggaccgcttttgtcctgtcgtgaatggggcaaagggcacaaagtcccttggaatgtttgtgtgtatcgaaaaggccaaaggttgggtgggcaagtgcacggggcacaagcggagtctgtcctgtgacgcgcaagtctgaagggtctgggcggcgggcggctgggtctgtgcatttcttggttgcaacgcggcgcttcccagcaccaacatgtaaccggcatgtttccagcagaagacaaaaagacaaacatgaaagtccagaaataaaactggtaaaaccccaagaaaaaaaaaaaaaaaaagtcgagcgttagcgaatttagta

SEQ ID NO: 153690 - DNA, 2170 bp, Homo sapiens
  misc_feature (1)...(2170): n = a,t,c or g
ccatggttgtgcccacccgacttttaaccccaatacatcccnacnncagagagagccatgaccaaaccagagcgaaaagacacctgccagatatcccgggttgcgggctggaaagaagtattaacagttgatgaaagcagcttggcattgccctctcttttctccctagggaagggataaaccactgtctttttgtgaggcatggttgtgttatgtcaggtgggaaccctgaatttcctgaaggtgccgccgcatgggaagatgggggtgcatcagatagcccaaggaaagtggtgtagtggacttttgtcatctgaacacccttccttttgggaaaatcttttatcgagtgagtttctggcagagtcctgccccctcctcctcgagacaaaggagccagatgctctctcctcgcatgttctggaagctactgaatgaacacatgcctgaggtttgcccaatcatatcctccctcctggtacttaaccttaagctcatggaagacagctgaggaagtactcgcagcagcaggggtgcagctggaggctccctttttgtgggtgtcatgctgtcagtggtggtggctgtggcaagtgctgcatctccagcaaatggtccctgtggtgcagccctgcctgggtttccagccacacaacttcccggatccctgtgaaacttgctgggcttccatccccatctttcctgcccggctgaataacctgtatcacaacagcttccttcactgagtcagggccctggcagggccaggtggggatggcctccctcaccgtctgctgcttctacctacatggctgggctccctgcgcccaggcttcgcctttccaaagcgccttgcatagccctccggagaaactttggattccagcactttcctaaaactgtcccgtgtggagtactccggcctcaccactgctaactgaggggctggaatgcagggtctttctcatctcacctcaaatccccaacagatcccttctaatggaaacagcttttaaaaatttcaggatattcgtaaagcacacgggaaacaaatcatggatgatctgccacacattttgcgactccttgagaaccattttgtaatactgaggtcacggagtgacagccccctgtgtggactgtgcttgttccttggccatgcactgcctcaccccacagaggtcaggcatggccatgtgttgtggccaacagaaagtgagcaggggctgtatttgtgcttgcaaggtagggcttggcctcctgtgcttctgccatgagaaagaacacggcccaaggtaagctgctgcttcaaccagggacccagaatacgggacatgttgtggagcagacgtgatcagacccccagcctggagcataacctagaagccaacttgtagactacccaagaatgggaatctagttgtagaccactgagatttctgatgctgttttgcagcaaaagctgactgatacatcacaggagaaatagttacagaatctgacacatgctgaatgctggataatcagtgtttcatggcagttaggtaaatcccaggcactgaagtgctcgcagcctcacagatcgaacgacttcctacaacctgtcacttctgttcctacctaacggtcctgacagcggatggcctaaatggtgagaaagcttgtttccacactagatgctggctttccaacaccagatagcttgggggaagaggaagttaagatgggctggggggttgtggggacccctcaggtttgggagtttgcaccaggtgccaacaagctcctggcctgaaactgtagccaggaggggccagtggtcccactgcagcctccaaacctgcctcccagttcctccagcactgcctgcccatgcacccctaaatcttactgaaatgaaaatccacgtctttgagatattctttaggggtggaggggaggcactgggctcctgaaaacaaagatgagcttaaagttctaggtcaccctgaggctagcagcatccttccctgcattttgcaaaagctgcactgggctctttccctttgtgggtgcagctcacacttctcaccgtacaggacactttgcatgggcagggctgtttgctctccactgcatccccactgcctggcaccatgcttggctcggggtaggtcttcaagaaatattg

SEQ ID NO: 153691 - DNA, 539 bp, Homo sapiens
caaaaatggctctccagaaattaagctgaaaatcaccaaaacatacatgaatgggaagcctctctttgaatcttccatttgtggtgacagtgctgctgatgtgtctcagtcgaagcaggaagggagatgcagcatcccagtttttggtcttctgtcaaaaacacagggatgaggtggtagctgagcacccagatgcttcaggtgaggagattgaagagctgctcaggtcacagtggagtctgctgagtgagaagcagagagcacgctacaacaccaagtttgccctggtggcccctgtccaggctgaagaagactctggtaatgtaaatgggaaaaaaagaaaccacacaaagaggatacaggaccctacagaagatgctgaagctgaggacacacccaggaaaagactcaggacggacaagcacagtcttcggaagagagacacaatcactgacaaaacggccagaacaagctcttacaaggccatggaggcagcctcctcgctcaagagccaggcagcaacgaaaaatctgtctgat

SEQ ID NO: 153692 - DNA, 8137 bp, Homo sapiens
  misc_feature (1)...(8137): n = a,t,c or g
agagatgggtctcgccatcaccatgttgcccagtctggtctccaactcctgggctcaagcgatcctcctgccttggtctcccaaagtgctgggattacaggtgtgagcccccacacccggcctgagtgagtgggttctgaatggtgactgttgttgtccatagccttccccctgcttctgagagtggagtccctcccctcatgttggagacctcccaaggtccatgtggtcctataggggctgttcagcctccctagccccttaacgtgtcaggtaatactgtatatattccatgaaatgtgaataattagttatataattcctaagcacttattttaaaaaacagcaatgtgatgcttaactcttcccacctctgttcctgtcccccttagaaaaccactgataactctttttttttttgagacggagtcttgccctgtcgcccaggctggagtgtagtggcctgatctcggctcggctcattgtaacctccgcctcgggtttgagcgattctcctgcctcagcctcctgagtagctgggattataggcgtgcaccaccacgcctggctaattttttgtatctttagtagggacgggtttcaccatgttggccagagtggtcttgaactcctgaccttgtgatccgctcgcctcagcctcccaaagtgctgggattacaggcatgagccaccgtgcctgtcctagaaccactggtaactcttaactgnnnagtgttctaagaacggaagcatctgggctggatggaatttagcatcaagcagagtcccctttctgttcagagtgttgtaaagtgcataaagatgaagcaggcaccagaaatcctcggcagtgccaacgggaagactccgagctgcgaggtgaaccgcgagtgttctgtgttcctcagcaaagcccagctctccagtagcctgcaggagggggtcatgcagaagtttaacggccacgacgccctgccctttattccagccgacaagctgaaagatcttacttcccgggtgtttaatggagaacccggcgcacacgatgccaaactgcgttttgagtcccaggaaatgaaagggattgggacaccccctaacactacccctatcaaaaatggctctccagaaattaagctgaaaatcaccaaaacatacatgaatgggaagcctctctttgaatcttccatttgtggtgacagtgctgctgatgtgtctcagtcagaagaaaatggacaaaaaccagaaaacaaggcgagaaggaacaggaagaggagcataaaatatgactccttgctggagcagggccttgtcgaagcagctcttgtgtctaagatctcaagtccttcagataaaaagattccagctaagaaagagtcttgtccaaacactggaagagacaaagaccacctgttgaaatacaacgttggtgatttggtgtggtccaaagtgtcgggttacccttggtggccttgcatggtttctgcagatccactccttcacagctataccaaacttaaaggtcagaaaaagagtgcacgccagtatcacgtacagttctttggtgacgccccagaaagagcttggatatttgagaagagcctcgtagcttttgaaggagaaggacagtttgaaaaattatgccaggaaagtgccaagcaggcacccacgaaagctgagaaaattaagctattgaaaccaatttcagggaaattgagggcccagtgggaaatgggcattgttcaagcagaagaagctgcaagcatgtcagtggaggagcggaaagccaagttcacctttctctatgtgggggaccagcttcatctcaaccctcaagtagccaaggaggctggcattgctgcagagtctttgggagaaatggcagaatcctcaggagtcagtgaagaagctgctgaaaaccccaagtctgtgagagaagagtgcattcccatgaagagaaggcggagggccaaactgtgtagctctgcagagaccctggagagtcaccccgacatagggaagagtactcctcaaaagacggcagaggctgaccccagaagaggagtagggtctcctcctgggaggaagaagaccacagtctccatgccacgaagcaggaagggagatgcagcatcccagtttttggtcttctgtcaaaaacacagggatgaggtggtagctgagcacccagatgcttcaggtgaggagattgaagagctgctcaggtcacagtggagtctgctgagtgagaagcagagagcacgctacaacaccaagtttgccctggtggcccctgtccaggctgaagaagactctggtaatgtaaatgggaaaaaaagaaaccacacaaagaggatacaggaccctacagaagatgctgaagctgaggacacacccaggaaaagactcaggacggacaagcacagtcttcggaagagagacacaatcactgacaaaacggccagaacaagctcttacaaggccatggaggcagcctcctcgctcaagagccaggcagcaacgaaaaatctgtctgatgcatgtaaaccactgaagaagcgaaatcgggcttccacggcagcatcttcagctcttgggtttagcaaaagttcatctccttctgcatccttaactgagaatgaggtctcggacagcccgggagacgagccctcggagtccccatacgaaagtgcagacgaaacacaaactgaagtatctgtctcatccaaaaagtctgagcgaggagtgactgccaaaaaggagtatgtgtgccagctgtgtgagaagccgggcagcctcctgctctgtgaaggaccctgctgcggagctttccacctcgcctgccttgggctttcccggaggccagaagggaggttcacctgcagcgagtgtgcctcagggattcactcatgtttcgtgtgtaaagagagcaagacagatgttaagcgctgtgtggtaactcagtgtggaaaattttaccatgaggcttgtgtgaaaaaataccctctgactgtatttgagagccgaggtttccgctgccccctccacagctgtgtgagctgccatgcttccaacccttcaaacccaaggccgtcaaaaggtaaaatgatgcggtgtgtccgctgccccgttgcctatcacagcggggatgcttgtctggcagcaggatgctcagtgatcgcctccaacagcatcatctgcactgcccacttcactgctcggaaggggaagcgacaccacgcccacgtcaacgtgagctggtgcttcgtgtgctccaaaggggggagccttctgtgctgtgagtcctgcccagcggccttccaccctgactgcctgaacatcgagatgcctgacggcagctggttctgcaatgactgcagggctgggaagaagctgcacttccaggatatcatttgggtgaaacttgggaactacagatggtggccggcagaagtttgccatcccaaaaatgttcccccaaatattcagaaaatgaagcacgagattggagaattccctgtgtttttctttgggtctaaagattattactggacgcatcaggcgcgagtgttcccgtacatggagggggaccggggcagccgctaccagggggtcagagggatcggaagagtcttcaaaaacgcactgcaagaagctgaagctcgttttcgtgaaattaagcttcagagggaagcccgagaaacacaggagagcgagcgcaagcccccaccatacaagcacatcaaggtgaataagccttacgggaaagtccagatctacacagcggatatttcagaaatccctaagtgcaactgcaagcccacagatgagaatccttgtggctttgattcggagtgtctgaacaggatgctgatgtttgagtgccacccgcaggtgtgtcccgcgggcgagttctgccagaaccagtgcttcaccaagcgccagtacccagagaccaagatcatcaagacagatggcaaagggtggggcctggtcgccaagagggacatcagaaagggagaatttgttaacgagtacgttggggagctgatcgacgaggaggagtgcatggcgagaatcaagcacgcacacgagaacgacatcacccacttctacatgctcactatagacaaggaccgtataatagacgctggccccaaaggaaactactctcgatttatgaatcacagctgccagcccaactgtgagaccctcaagtggacagtgaatggggacactcgtgtgggcctgtttgccgtctgtgacattcctgcagggacggagctgacttttaactacaacctcgattgtctgggcaatgaaaaaacggtctgccggtgtggagcctccaattgcagtggattcctcggggatagaccaaagacctcgacgaccctttcatcagaggaaaagggcaaaaagaccaagaagaaaacgaggcggcgcagagcaaaaggggaagggaagaggcagtcagaggacgagtgcttccgctgcggtgatggcgggcagctggtgctgtgtgaccgcaagttctgcaccaaggcctaccacctgtcctgcctgggccttggcaagcggcccttcgggaagtgggaatgtccttggcatcattgtgacgtgtgtggcaaaccttcgacttcattttgccacctctgccccaattcgttctgtaaggagcaccaggacgggacagccttcagctgcaccccggacgggcggtcctactgctgtgagcatgacttaggggcggcatcggtcagaagcaccaagactgagaagccccccccagagccagggaagccgaaggggaagaggcggcggcggaggggctggcggagagtcacagagggcaaatagcgccaggcggccgcttggccggatccaggggcggtgcagggcggccggccctgcctgcgggagagggcgagcatgaactggcccggaggacccagctcgagccgccaggacacagacgtacaggcctcctcgggagggagcgcctccccaccactgagccatcctcagcagcgtccgctgcgtctgcactgatgaccgtctgagcccagctcagcgttcctggacaaacagcctcactcctcagcgttaccgccacacttgaatttctccgaatgtcaaggttccctcccactctatttttttaggttaaagttaattggcatatggaatgttttaatctcctctgaaatgtgtagcgtaggcttttcccaagggtcgctagaaactcgtcttcgcgttgccccctttctggctctcagcgccgtcgccactcgggagaggctgggtgaggcccgtgtgaggactgaccctggattcctcgaaactgccattgtgatcattactctgctctttggtggctgtatcatttttttgtactaatgtgaattgttcctcagaaacgcttcttttccatcctagtgagaagctggccctgcaggtggtggcagcaatggtgttgtaagatttcctcccgtagttttttctcctcatggatttgaatgaaatgccaataacacgtccactttcaacgtgtagtttacgcggagcactttcgaggcctggccgggttgggcctacttctcacctgggcctatcttctgaactcgctaggttcttatcaacatttgggggataactttgtatatttttttcatttggcttttctttaccagtttctgatttttattctcaatatatttttgctaaacctatttcacaaatcaccaccgactgaagtgtgtgtttactgatgcggccctgagctccatggcgaaaggagtgactttgcagggcgtgagaccgcagtctgcttagagcacaggaagtgacaacttagggagccccgtagggcgctgcaggccccggggaccccagcacgtgggtctaaagagagacggagtctagctctcctgccacccagagtggcttccatctcagcactctgtgggtctggtgatggaagatgcagtctctgctgatcacatgtgccctctgccagggcacctactgagaggtgcggtcctgggggtggaggcctgcctggcaggtgtgcgtgcctcgtacgtgtgttatgggcactggtctaggccaggtatgacacccactctcctgtgagatttcactttagtttttaaaaggtccagttctacagagtgagacctatctatctgagtactacatatgttttaagacttggttctttttttgagggatccttgaccctgggaagtctggagcaccctgagaagggggcaccatgtgtgcctttgcccacgtgtcctgaggggctgcttgtctgggagggagggagagaacattcagcagcaggtgcttttttatggccttttcttaaaataacctaagggggacacatccatcttgcagagaagtttacagaactccccttgaaaactgctgctgaggctcctgttaaattttctgtggcatcttttatgccttggtaaaaactgcagtgtctttggacctgagagtggctactccgtggttttgtgacctgtaagcgtggggttcaggggtgtgtggccctgcagggtcccacgcctccctgagcactgactggaagtttcactggctggtggctgtcccttctcccatcagggtccccagcaaagttaactacacagaggacccaggggaaacgagctgtgtagccactgacttgctcgcgcggccgtggcctctgaggggcactcgccggttaagacagggtgggagtagtgctttccagttcagactctaacttctcccaaagtgtcctaagaaaatactggatcggctcatagatttatgctccttatgatgccctaacttggaaggttgttctagggacaggccgggcagtgtccccacacacaccttagagtcgaaggccccagggccccgctgtcacttgcccaaaagatcccttccggcaggtaagggactaccaatgcttacgtcaaaacagcagaatcggctttgcagtgcactttggggagcagatattaacttatttttgtgttggacagtagtgaaatcttgtgatttttaatcgctttgataatacttccaaattttatgatttttctgaaggaaataatgcaaacattttaaatatgtttctccccctttccaaaaactgttaaactaatgagcaagtaacactaactttgaatgtctctacaatacccgttgataactcagtggagccaggctttggggtagcggccctgagcttgcagggtttctcgccactggggctgaccacgcccccagctgtgaccgtgggtgtggctggctctcggccctgcccagctttgttctgaggacgtggtgacttcctgaacatcagcttcaatcctccatcattaatgtgaagcaaaacacaaaaaccgccccaatccctcaggattccttggcatccgaaaccagcatctgcacctaaacccatacccacccgtgtgcgcccacagggggatgtgtccgaatgggcagcttaaaatgtggtcacctgtgggggaaactcttcaggcacctgaagtgagaacccagctgtccgtcctcaggccggcctttcttccggcgacacccgtccatggctggctgggtccccttcgcagtgtttgtctgtcttgacatctaaaccccggcgtgtgcagtgcccatcttccaggactaccttattttccagaattaaacctgttttataattcaagttaatgcaaatgactgtcagttgccaaatatcttgatcctgtgagtgtagttgatgactgtttgttagtcagtagagtaaaatgctgtgtccacggggtgtcacagcctcaccataccctgttgaggtgtgaaatgccccgtcagaaattaaatacaaacttaaatgtgcctattggtgtctaaacttcatacaatgtaaggtcagattccttttaggaatactgggtgctgtcaccaggtttgatagttagacttaaaaacttgaaattcactttttggggggagggatatactgaaatagagagttgagacttgccagttgggggaaaatagcatttaaaatggaaagctgtgtttggaaaattgtgtatgagtatttttgtattaaaaacattttaaa

SEQ ID NO: 153693 - DNA, 1458 bp, Homo sapiens
ggccttcctccggatgctcttccccgagagctggatggagacaagaaggggcgccccagcaccgccggctccaagatcagaaacaagccacgacctggtggccacactgatgaggtgcacaccccactacatccgctgatcaaacccaacgagaccaagaggccccgagactgggaggagaacagcatgaaccagatccccccaggtcccccacctccagcacctcccacccacccccagactggtgactccccaccccgaggggactcagcctaccctccccaccagatcaagcaccaggtggaatacctgggcctgaaggagaacatcagggtgcgagagccggcttcgcctaccgccgccagttcgccaaattcctgcagagtatgccattctgacccccgagacgtggccgcggtggcgtggggacgaacccagggcgtccagcacctgcttcgggcggtcaacatggagcccgaccagaccagatggggagcaccaaggtctttgtcaagaacccagagtcgcttttcctcctggaggaggtgcgaagcgaaagttcgatggctttgcccgaaccatccagaaggcctggcggcgcacgtggctgtccggaagtacgaggagatgcgggaggaagcttccaacatcctgctaacaagaaggagcggaggcgcaacagcatcaatcggaacttcgtcggggctacctggggctggaggagcggcccgagctgcgtcagttcctgggcaaggggagcgggtggacttcgccgattcggtcaccaagtacgaccgccgcttaaggtacacccagactggcctgtttaccgtcacctgtacctgggcgggccagcccatcaagcgggacttgatcctgacgcccaagttgtcacgcgacaggacgacttcttcatcctccaagaggagccgccgacagcttcctggagagcgtcttcaagaccgagtttgtcagcctctgtgcaagcgcttcgaggaggcgacgcggaggcccctgcccctcacctcagcgacacacacagtttcgggtgaagaaggagggctggggcggtggcggcacccgcagctcaccttctcccgcggcttcggcgacttggcagtgctcaaggttggcggcggaccctcacgaggaagcgcagcgtggggcaacggccagtgcctggtgtgggcgacccaagccccagcctcggacacatggtcccaggtgccgggccctatccagtacgtgggccaagatgtggacgagctgagcttcaacgtgaacgagtcattgagatcctcatggaaggttaaatgcccattcctggacttaacccaaggatatattggctgctttggcctgatgctcagcacgccagaaagggagacccagagggttctgatgcaaaagctgtccctggagcctcgatccccagacaaggagtctatctttgcatag

SEQ ID NO: 153694 - DNA, 4098 bp, Homo sapiens
atggaatttagcatcaagcagagtcccctttctgttcagagtgttgtaaagtgcataaagatgaagcaggcaccagaaatcctcggcagtgccaacgggaagactccgagctgcgaggtgaaccgcgagtgttctgtgttcctcagcaaagcccagctctccagtagcctgcaggagggggtcatgcagaagtttaacggccacgacgccctgccctttattccagccgacaagctgaaagatcttacttcccgggtgtttaatggagaacccggcgcacacgatgccaaactgcgttttgagtcccaggaaatgaaagggattgggacaccccctaacactacccctatcaaaaatggctctccagaaattaagctgaaaatcaccaaaacatacatgaatgggaagcctctctttgaatcttccatttgtggtgacagtgctgctgatgtgtctcagtcagaagaaaatggacaaaaaccagaaaacaaggcgagaaggaacaggaagaggagcataaaatatgactccttgctggagcagggccttgtcgaagcagctcttgtgtctaagatctcaagtccttcagataaaaagattccagctaagaaagagtcttgtccaaacactggaagagacaaagaccacctgttgaaatacaacgttggtgatttggtgtggtccaaagtgtcgggttacccttggtggccttgcatggtttctgcagatccactccttcacagctataccaaacttaaaggtcagaaaaagagtgcacgccagtatcacgtacagttctttggtgacgccccagaaagagcttggatatttgagaagagcctcgtagcttttgaaggagaaggacagtttgaaaaattatgccaggaaagtgccaagcaggcacccacgaaagctgagaaaattaagctattgaaaccaatttcagggaaattgagggcccagtgggaaatgggcattgttcaagcagaagaagctgcaagcatgtcagtggaggagcggaaagccaagttcacctttctctatgtgggggaccagcttcatctcaaccctcaagtagccaaggaggctggcattgctgcagagtctttgggagaaatggcagaatcctcaggagtcagtgaagaagctgctgaaaaccccaagtctgtgagagaagagtgcattcccatgaagagaaggcggagggccaaactgtgtagctctgcagagaccctggagagtcaccccgacatagggaagagtactcctcaaaagacggcagaggctgaccccagaagaggagtagggtctcctcctgggaggaagaagaccacagtctccatgccacgaagcaggaagggagatgcagcatcccagtttttggtcttctgtcaaaaacacagggatgaggtggtagctgagcacccagatgcttcaggtgaggagattgaagagctgctcaggtcacagtggagtctgctgagtgagaagcagagagcacgctacaacaccaagtttgccctggtggcccctgtccaggctgaagaagactctggtaatgtaaatgggaaaaaaagaaaccacacaaagaggatacaggaccctacagaagatgctgaagctgaggacacacccaggaaaagactcaggacggacaagcacagtcttcggaagagagacacaatcactgacaaaacggccagaacaagctcttacaaggccatggaggcagcctcctcgctcaagagccaggcagcaacgaaaaatctgtctgatgcatgtaaaccactgaagaagcgaaatcgggcttccacggcagcatcttcagctcttgggtttagcaaaagttcatctccttctgcatccttaactgagaatgaggtctcggacagcccgggagacgagccctcggagtccccatacgaaagtgcagacgaaacacaaactgaagtatctgtctcatccaaaaagtctgagcgaggagtgactgccaaaaaggagtatgtgtgccagctgtgtgagaagccgggcagcctcctgctctgtgaaggaccctgctgcggagctttccacctcgcctgccttgggctttcccggaggccagaagggaggttcacctgcagcgagtgtgcctcagggattcactcatgtttcgtgtgtaaagagagcaagacagatgttaagcgctgtgtggtaactcagtgtggaaaattttaccatgaggcttgtgtgaaaaaataccctctgactgtatttgagagccgaggtttccgctgccccctccacagctgtgtgagctgccatgcttccaacccttcaaacccaaggccgtcaaaaggtaaaatgatgcggtgtgtccgctgccccgttgcctatcacagcggggatgcttgtctggcagcaggatgctcagtgatcgcctccaacagcatcatctgcactgcccacttcactgctcggaaggggaagcgacaccacgcccacgtcaacgtgagctggtgcttcgtgtgctccaaaggggggagccttctgtgctgtgagtcctgcccagcggccttccaccctgactgcctgaacatcgagatgcctgacggcagctggttctgcaatgactgcagggctgggaagaagctgcacttccaggatatcatttgggtgaaacttgggaactacagatggtggccggcagaagtttgccatcccaaaaatgttcccccaaatattcagaaaatgaagcacgagattggagaattccctgtgtttttctttgggtctaaagattattactggacgcatcaggcgcgagtgttcccgtacatggagggggaccggggcagccgctaccagggggtcagagggatcggaagagtcttcaaaaacgcactgcaagaagctgaagctcgttttcgtgaaattaagcttcagagggaagcccgagaaacacaggagagcgagcgcaagcccccaccatacaagcacatcaaggtgaataagccttacgggaaagtccagatctacacagcggatatttcagaaatccctaagtgcaactgcaagcccacagatgagaatccttgtggctttgattcggagtgtctgaacaggatgctgatgtttgagtgccacccgcaggtgtgtcccgcgggcgagttctgccagaaccagtgcttcaccaagcgccagtacccagagaccaagatcatcaagacagatggcaaagggtggggcctggtcgccaagagggacatcagaaagggagaatttgttaacgagtacgttggggagctgatcgacgaggaggagtgcatggcgagaatcaagcacgcacacgagaacgacatcacccacttctacatgctcactatagacaaggaccgtataatagacgctggccccaaaggaaactactctcgatttatgaatcacagctgccagcccaactgtgagaccctcaagtggacagtgaatggggacactcgtgtgggcctgtttgccgtctgtgacattcctgcagggacggagctgacttttaactacaacctcgattgtctgggcaatgaaaaaacggtctgccggtgtggagcctccaattgcagtggattcctcggggatagaccaaagacctcgacgaccctttcatcagaggaaaagggcaaaaagaccaagaagaaaacgaggcggcgcagagcaaaaggggaagggaagaggcagtcagaggacgagtgcttccgctgcggtgatggcgggcagctggtgctgtgtgaccgcaagttctgcaccaaggcctaccacctgtcctgcctgggccttggcaagcggcccttcgggaagtgggaatgtccttggcatcattgtgacgtgtgtggcaaaccttcgacttcattttgccacctctgccccaattcgttctgtaaggagcaccaggacgggacagccttcagctgcaccccggacgggcggtcctactgctgtgagcatgacttaggggcggcatcggtcagaagcaccaagactgagaagccccccccagagccagggaagccgaaggggaagaggcggcggcggaggggctggcggagagtcacagagggcaaatag

SEQ ID NO: 153695 - DNA, 397 bp, Homo sapiens
ttttttttttttttttaaataatagagagacacaatcactgacaaaacggccagaacaagctcttacaaggccatggaggcagcctcctcgctcaagagccaggcaggtaatgtggtcagcgccctttccttcttggcttctgggtgcccaggctgggctgggtgggtgggctgagagtgtgaaaggggaaggctggggctggtgaaggggaacagggcaggggaggaatccacaattaagctaggagtgaaaaagaaggaaaggaggttctcctgtggttgaaaactaaactgttttaatgtgtatgttattttgaagggtttggctaaattttattgaagttactttttacttggctctattatttgcaatttaaaattttactagaaaagtgat

SEQ ID NO: 153696 - DNA, 2350 bp, Homo sapiens
caggagaagctgaccagccgcaagatggacagccgctggggcgggcgcagcgagtccatcaatgtgaccctcaacgtggagcaggcagcctacacccgtgatgccctggccaaggggctctatgcccgcctcttcgacttcctcgtggaggccatcaaccgtgctatgcagaaaccccaggaagagtacagcatcggtgtgctggacatttacggcttcgagatcttccagaaaaatggcttcgagcagttttgcatcaacttcgtcaatgagaagctgcagcaaatctttatcgaacttaccctgaaggccgagcaggaggagtatgtgcaggaaggcatccgctggactccaatccagtacttcaacaacaaggtcgtctgtgacctcatcgaaaacaagctgagccccccaggcatcatgagcgtcttggacgacgtgtgcgccaccatgcacgccacgggcgggggagcagaccagacactgctgcagaagctgcaggcggctgtggggacccacgagcatttcaacagctggagcgccggcttcgtcatccaccactacgctggcaaggtctcctacgacgtcagcggcttctgcgagaggaaccgagacgttctcttctccgacctcatagagctgatgcagtccagtgaccaggccttcctccggatgctcttccccgagaagctggatggagacaagaaggggcgccccagcaccgccggctccaagattatgaaacttgccaactgacctggtggccacactgatgaggtgcacaccccactacatccgctgcattaaacccaacgagaccaagaggccccgagactgggaggagaacagagtcaagcaccaggtggaatacctgggcctgaaggagaacatcagggtgcgcagagccggcttcgcctaccgccgccagttcgccaaattcctgcagaggtatgccattctgacccccgagacgtggccgcggtggcgtggggacgaacgccatggcgtccagcacctgcttcgggcggtcaacatggagcccgaccagtaccagatggggagcaccaaggtctttgtcaagaacccagagtcgcttttcctcctggaggaggtgcgagagcgaaagttcgatggctttgcccgaaccatccagaaggcctggcggcgccacgtggctgtccggaagtacgaggagatgcgggaggaagcttccaacatcctgctgaacaagaaggagcggaggcgcaacagcatcaatcggaacttcgtcggggactacctggggctggaggagcggcccgagctgcgtcagttcctgggcaagaaggagcgggtggacttcgccgattcggtcaccaagtacgaccgccgcttcaagcccatcaagcgggacttgatcctgacgcccaagtgtgtgtatgtgattgggcgagagaagatgaagaagggacctgagaaaggtccagtgtgtgaaatcttgaagaagaaattggacatccaggctctgcggggggtctccctcagcacgcgacaggacgacttcttcatcctccaagaggatgccgccgacagcttcctggagagcgtcttcaagaccgagtttgtcagccttctgtgcaagcgcttcgaggaggcgacgcggaggcccctgcccctcaccttcagcgacacactacagtttcgggtgaagaaggagggctggggcggtggcggcacccgcagcgtcaccttctcccgcggcttcggcgacttggcagtgctcaaggttggcggtcggaccctcacggtcagcgtgggcgatgggctgcccaagaactccaagcctaccggaaagggattggccaagggtaaacctcggaggtcgtcccaagcccctacccgggcggcccctggcgccccccaaggcatggatcgaaatggggcccccctctgcccacaggggggggccccctgccccctggagaaattcatttggcccagggggcacccacaggcctccccggccctccgtccacatccctgggatgccagcagacgaccccgggcacgtccgccctcagagcacaacacagaattcctcaacgtgcctgaccaggggatggccggcatgcagaggaagcgcagcgtggggcaacggccagtgcctgtgggccgacccaagccccagcctcggacacatggtcccaggtgccgggccctataccagtacgtgggccaagatgtggacgagctgagcttcaacgtgaacgaggtcattgagatcctcatggaagatccctcgggctggtggaagggccggcttcacggccaggagggccttttcccaggaaactacgtggagaagatctga

SEQ ID NO: 153697 - DNA, 4498 bp, Homo sapiens
atggaaggtaatgtaaatgcacacagggcgtccggggcccagattcgcacttgccgggcgcccccgggggccactggctgcacggcgctctttaaggccaacagccctgagttcacgggactgaaatcggcacagagaggccgaggacctgtggtcggggctccgcgcaagcggttctccggtctccgaggacaccgagaggcggagaggaggaccctgggttgggggtcccaggccccaccccctgctgcccaggcacacacccccgcggcaggtgactccaccctgctcctgcgctctgctgtgccgggcacctgcctgctctacgcccctcatccccaggatttcccacccgcaggctttctgcgggagcagtggtggccccggcttctcacccttcaggttttcttgcatctgcgcaccggtggaagagtaggcccagtggactgggtgctgctgggaggtgggaggctgctgggagggcaccggatgccggggccttgcaacctggcagaggctgtgctgctcagggaagcaaggtggccctggggtgaggcggggggctcagaggaaggggagccctcaggaggaagtgttgggggcaactgccagagagcccggccactgcccagtgcccatccggaagctcagcagggagtgggcttggaagtgggcaggggcatggtggcgccggcagcatcctattttgcagatgaagggcgccctaatggagatcatccagctcgccagcctcgactcggacccctgggtgctcatggtcgccgacatcttaagtcctttccggacacaggctcgcttaacctggagctggaggagcagaatcccaacgttcaggatattttgggagaacttagagaaaaggtgggtgagtgtgaagcgtctgccatgctgccactggagtgccagtacttgaacaaaaacgccctgacgaccctcgcgggacccctcactcccccggtgaagcattttcagttaaagcggaaacccaagagcgccacgctgcgggcggagctgctgcagaagtggccctgcagaagtggtgtgcatgccaacgtgcacatcagcaccgcggctcagcgcgtcatgacaaagcatctgcagagggcagatgagcacccccacttctgtgttgaagagtggcactctgggttgattagtgcattttattattgtgaaaagcatcttgcagagaaccacattctggaccgtataatagacgctggccccaaaggaaactactctcgatttatgaatcacagctgccagcccaactgtgagaccctcaagtggacagtgaatggggacactcgtgtgggcctgtttgccgtctgtgacattcctgcagggacggagctgacttttaactacaacctcgattgtctgggcaatgaaaaaacggtctgccggtgtggagcctccaattgcagtggattcctcggggatagaccaaagacctcgacgaccctttcatcagaggaaaagggcaaaaagaccaagaagaaaacgaggcggcgcagagcaaaaggggaagggaagaggcagtcagaggacgagtgcttccgctgcggtgatggcgggcagctggtgctgtgtgaccgcaagttctgcaccaaggcctaccacctgtcctgcctgggccttggcaagcggccttcgcctgaccacattccccttaaaaatggtttcgtggccagctgtctgcttttctgtggagactgcgggttgcagacaccagcagccccctattgctgcacgtcaggtgtcctccacctcagtactgtggacatctcgggccgcatagccctgttgcgcgggcatcctgtgcgttgcaggagatgcagcagcatccatgaccgcaacccatcagagagtgttgtaaagtgcataaagatgaagcaggcaccagaaatcctcggcagtgccaacgggaagactccgagctgcgaggtgaaccgcgagtgttctgtgttcctcagcaaagcccagctctccagtagcctgcaggagggggtcatgcagaagtttaacggccacgacgccctgccctttattccagccgacaagctgaaagatcttacttcccgggtgtttaatggagaacccggcgcacacgatgccaaactgcgttttgagtcccaggaaatgaaagggattgggacaccccctaacactacccctatcaaaaatggctctccagaaattaagctgaaaatcaccaaaacatacatgaatgggaagcctctctttgaatcttccatttgtggtgacagtgctgctgatgtgtctcagtcagaagaaaatggacaaaaaccagaaaacaaggcgagaaggaacaggaagaggagcataaaatatgactccttgctggagcagggccttgtcgaagcagctcttgtgtctaagatctcaagtccttcagataaaaagattccagctaagaaagagtcttgtccaaacactggaagagacaaagaccacctgttgaaatacaacgttggtgatttggtgtggtccaaagtgtcgggttacccttggtggccttgcatggtttctgcagatccactccttcacagctataccaaacttaaaggtcagaaaaagagtgcacgccagtatcacgtactgtttctttgtttacgccccagaaagagcttggatatttgagaagagcctcgtagcttttgaaggagaaggacagtttgaaaaattatgccaggaaagtgccaagcaggcacccacgaaagctgagaaaattaagctattgaaaccaatttcagggaaattgagggcccagtgggaaatgggcattgttcaagcagaagaagctgcaagcatgtcagtggaggagcggaaagccaagttcacctttctctatgtgggggaccagcttcatctcaaccctcaagtagccaaggaggctggcattgctgcagagtctttgggagaaatggcagaatcctcatgagtcagtgaagaagctgctgaaaaccccaagtctgtgagagaagagtgcattcccatgaagagaaggcggagggccaaactgtgtagctctgcagagaccctggagagtcaccccgacatagggaagagtactcctcaaaagacggcagaggctgaccccagaagaggagtagggtctcctcctgggaggaagaagaccacagtctccatgccacgaagcaggaagggagatgcagcatcccagtttttggtcttctgtcaaaaacacagggatgagagtggaggcagagacagtgccttcacttgccgaagtccacagaactacccagtagaggagccagcatcagagctggttggtgccgagccagtcagcagactttccaaagggctggtggtagctgagcacccagatgcttcaggtgaggagattgaagagctgctcaggtcacagtggagtctgctgagtgagaagcagagagcacgctacaacaccaagtttgccctggtggcccctgtccaggctgaagaagactctgccccactcaaaggcatcccgaagcaggcgcccttcagaagccccacggcgcccagcgtcttcagccccacagggaaccggacccccatcccgccttccaggacgctgctgcggaaggaacgaggtgtgaaggcagggctgtgcttgtcttggcagctgctggacatctctgagctggatatggttggcgctggccgagaggcgaagcggagaaggaagactctcgatgcggaggtggtggagaagccggccaaggaggaaacggtggtggagaacgccaccccggactacgcagccggcctggtgtccacgcagaaacttgggtccctgaacaatgagcctgcgctgccctccacgagctaccttccctccacgcccagcgtggttcccgcctcctcctacatccccagctccgagacgcccccagccccatcttcccgggaagccagccgcccaccagaggagcccagcgccccgagccccacgttgccagcgcagttcaagcagcgggcgcccatgtacaacagcggcctgagccctgccacacccacgcctgcggcgcccacctcgcctctgacacccaccacacctccggctgtcgcccctaccactcagacacccccggttgccatggtggccccgcagacccaggcccctgctcagcagcagcctaagaagaacctgtccctcacgagagagcagatgttcgctgcccaggagatgttcaagacggccaacaaagtcacgcggcccgagaaggccctcatcctgggcttcatggccggctcccgagagaacccgtgccaggagcagggggacgtgatccagatcaagctgagcgagcacacggaggacctgcccaaggcggacggccagggtagcacaaccatgctggtggacacagtgtttgagatgaactatgccacgggccagtggacgcgcttcaagaagtacaagcccatgaccaatgtgtcctag

SEQ ID NO: 153698 - DNA, 6501 bp, Homo sapiens
tcactggcgatggttctgtaggctgtacaggacgtataatgacttctgctctggggaggtctcagggaacttacaatcatggtggaagatgagggagaacagatgtcgatctgggttcttgacaaagaccttggtgctccccatctggtactggtcggctccatgttgaccgcccgaagcaggtgctggacgccctggcgttcgtcccacgccaccgcggccacgtctgagggcgagggctggggtgtgggagtgctcatagcagacaggcctggctgggcgtctgatgaaggggatggcgagggcgggggtggagggctcctcacctctgcggaatttggcgaactggcggcggtaggcgaagccggctctgcgcaccctatgttctccttcaggcccaggtattccacctggtgcttgactcatattggccagggtggtcttgaactcctgaccttgtgatccgctcgcctcagcctcccaaagtgctgggattacaggcatgagccaccgtgcctgtcctagaaccactggtaactcttaactgagacaagatttcgccatgttgcccaggctggtctcgaacttctgagctcaagcgatctacctgcctcgtcctcccaaagtgttggaattgcaggtgtgagccactgcacccggcccttgcctcatgtttgaatgataatttacctgggcataaaattctggacacttgtggtggcacgagctgtctgcttttctgtggagactgcgggttgcagacaccagcagccccctattgctgcacgtcaggtgtcctccacctcagtactgtggacatctcgggccgcatagccctgttgcgcgggcatcctgtgcgttgcaggagatgcagcagcatccatgaccgcaacccatcagagtgttctaagaacggaagcatctgggctggatggaatttagcatcaagcagagtcccctttctgttcagagtgttgtaaagtgcataaagatgaagcaggcaccagaaatccttcggcagtgccaacgggaagactccgagctgcgaggtgaaccgcgagtgttctgtgttcctcagcaaagcccagctctccagtagcctgcaggagggggtcatgcagaagtttaacggccacgacgccctgccctttattccagccgacaagctgaaagatcttacttcccgggtgtttaatggagaacccggcgcacacgatgccaaactgcgttttgagtcccaggaaatgaaagggattgggacaccccctaacactacccctatcaaaaatggctctccagaaattaagctgaaaatcaccaaaacatacatgaatgggaagcctctctttgaatcttccatttgtggtgacagtgctgctgatgtgtctcagtcagaagaaaatggacaaaaaccagaaaacaaggcgagaaggaacaggaagaggagcataaaatatgactccttgctggagcagggccttgtcgaagcagctcttgtgtctaagatctcaagtccttcagataaaaagattccagctaagaaagagtcttgtccaaacactggaagagacaaagaccacctgttgaaatacaacgttggtgatttggtgtggtccaaagtgtcgggttacccttggtggccttgcatggtttctgcagatccactccttcacagctataccaaacttaaaggtcagaaaaagagtgcacgccagtatcacgtacagttctttggtgacgccccagaaagagcttggatatttgagaagagcctcgtagcttttgaaggagaaggacagtttgaaaaattatgccaggaaagtgccaagcaggcacccacgaaagctgagaaaattaagctattgaaaccaatttcagggaaattgagggcccagtgggaaatgggcattgttcaagcagaagaagctgcaagcatgtcagtggaggagcggaaagccaagttcacctttctctatgtgggggaccagcttcatctcaaccctcaagtagccaaggaggctggcattgctgcagagtctttgggagaaatggcagaatcctcaggagtcagtgaagaagctgctgaaaaccccaagtctgtgagagaagagtgcattcccatgaagagaaggcggagggccaaactgtgtagctctgcagagaccctggagagtcaccccgacatagggaagagtactcctcaaaagacggcagaggctgacccccaagaagaggagtagggtctcctccctgggaggaagaagaccacaagtctccatgccacgaagcaggaagggagatgcagcatcccagtttttggtcttctgtcaaaaacacagggatgaggtggtagctgagcacccagatgcttcaggtgaggagattgaagagctgctcaggtcacagtggagtctgctgagtgagaagcagagagcacgctacaacaccaagtttgccctggtggcccctgtccaggctgaagaagactctggtaatgtaaatgggaaaaaaagaaaccacacaaagaggatacaggacccttccgaaaatgctggaccttgaggacacacccaggaaaggactcaggacggacaagcacagtcttcggaagagagacacaatcactgacaaaacggccagaacaagctcttacaaggccatggaggcagcctcctcgctcaagagccaggcagcaacgaaaaatctgtctgatgcatgtaaaccactgaagaagcgaaatcgggcttccacggcagcatcttcagctcttgggtttagcaaaagttcatctccttctgcatccttaactgagaatgaggtaaaataataataataacgataaccatggcattggtatgaaggccatttagctgcccacgctgcagtgtgagtaatgctcagacttcataagcgcagcattggtgctcactgccagtgcagatgttttagggcctcttggctaactcagattcatgaaatggacaaacagtgcactatgttagtttatttgagcactttttatacacacgcacacagtgtctgtgtacatgtacagatatacttcagtcttgatgcagtttcataattcttaaaatctgtctgaagaatgttgtgttctgtgtagccctcacactgtaagagttcacatggaagtaagtctgcgttggttctgaaagggcacagtgtcagttgagctgacatatactgggtggggtggaaggcgactcacacaccacacctgattcctgttgcttccagacctaggctcatggaggaagccaaagatttctttgttctcatgcatttcatggctttggtcctttaaattctggcacatttttagttacttgagtgttgaggtgagtcagaactaccattgtaatatgactcctgtgttctggacttgcagagtacatgatagcaaaataaagccatttggggctgctgcctgccatcattgtaacatgacacttagactttattatcaaacctaaattttttgccgttgccaaaaacaacaaatagccacagaacgtaggtgtgacacttttttgttcggaggtagttttggtttcctgatttttagggattaccttcatagagctttggagttttaatttcttgttatttggttctccgtgatgctgtttttctcattgtagacatgggtcctgtttttgtcatgtttatgaggagatgataactgggggcccttttggaacagggtaatgaggcaagggttggacaggccccttactcttgctgagtcagaaggcggcacttctggccaggtctctgccatggtccccaggaaggatggggtgtgcctcagttgtttccactcattagaggagtgtaggccttccagtgcaggaaggtcagggacctaggcaacctgggcggggctcatagagctctgcggcttgccactctgaatcctcagcgaccactcctccgagtgggattttctgcagggactcaaaccaactcagtggtggtcgagacctgttcacggatggtgggactggggctgctttacagtttgatacgtgtagataattaagcattttgtgatgtttggacacactggagaaaaggcagtaagaattatttactgaaacatctaggagcttactgaaatatgaaaaggcaaattttatacaaattatttttcctttttcctttctttcttgtccaagttcaggttaaaatcttagaaaattaaatgaaaggtcatttacagttccaaagaagaatattaaacatttttcacttaagttgagatttttgctttaaagagcttttaatgagtttttctgttatcataattttggtccggttattcacttgagttgttgcttatactgttgtcaggtacagtagagagaacatggagcctgctgagatcttctctgttattcctgatcctaagtcatgtatatcgaaggctttgatttagagtaatgcatgaggccagtgtagcggggtcgaggcctgcccatgagtcaggggagctcagtctccctggcctaggcagttgtcctgaccttgagaagacatagatgaagcattttatcatcattagacttaaattttaattcttcagaatgtcagaagttgataggttgttaaatacatttatataatacattaaatatgtgaaattaatacaccttcctacattttgaaggtgatgcatagatcccatagtgtgcatcatgttccttatatgaaaacgtttaaattactgggtcttttccattaaactacttttgtatggcttagataaatcttccattagtgttcatttttatagaattatgctgttaaaactactttaggtgaacaaataaacttgtctattatatattaacgcgactgaactacagtaaatgtttgtgatgtttccaatgctgaatgcctgttagcatatgaggcaaagtgtagtgttataaaaaacagcctgttgactgctgggcccgattctgatatgagttaggtgaccatgagaattgctgtttgaggtccacactgacacacacccattgggtcacaccccctttgcatgtttgtatttcctccctttcatcacatttgtttgaaataaggtacttttatagggttggtatttcagaacactttaggtcatgttgtagtttaaattcttcttgaaaaaggtatatgtgataaataaaaatttttattggaataattattacatggtactacatcaccctgaggaagagaataaattaaaattacacacttgcatgacaaaggcctgtgaaggaattaatgtgatttaagtgttttgtaacttcattttttattcctttagtagagcaaattcttatttttttcgccttcactggtaacagcttttgtgggagcccacaccagtcaagttggatttgaacccagctgctctgtactgcacttagaatgatgtaatattccaggatgctgctgcaggtggcgtatcatcgtacacactcagtgacatttctatcacaatcattttatggaagatgtgtgataatctgtttttactggtattaataaacacatacaatgaagaaaacagataacaaattttaagaccaaggtaagataactaatcaaggccatttaatccgtcacattcatctcataatagaaacacgttcatattccagtggtcaatgtagatttcaagttgaaaggcagtccctttagttgggggctgtccagagctgcagcagggctttgcacggaaggggtggccctgttagagttgcttctcctctagtttgtaacttactggacttttgtggaaaatatcagcgtcgctaccctcagaaacaaactaacagcacacgttagggagggagtcctcatcagctgttctcattgccagtgagatatattcagtattgtagatactaccactaaatttccaacataagaggcaggaaggagtttttggattctatccctctttttactaaacaagttttattaatgacactaagatacagtaaatttttagaaaaaaataccatttacagtattattgtgaaccatttaacccttttgatccaaggccccggaccaaggggatactgtaatcaggttatgtacaccaacctctgcatcagttgcttctatagagcatcagccctcatgtttcattgtcttaatgtcggggagcagcctggtgtcctgccccaggtgtccgcatttttgcatggtaaggaaaaggcttacttgccctttcagctcataaaagcagaaggtgtgctattcacagtaccatgcgagtaggcccacagttaatttcccggcagattcttttggctgtttttatctttaatgaacgtttctgactaatattttgttgtaaaccattaagtaatgtaacgcatgtaagatgcttagggtgcctggccaggactccgtggtttcctgttgtgacagtaataatggttataataataaaaatgataaaattgccaaaaaaaa

SEQ ID NO: 153699 - DNA, 421 bp, Homo sapiens; identical to SEQ ID NO: 146779

SEQ ID NO: 153700 - DNA, 654 bp, Homo sapiens; identical to SEQ ID NO: 146780

SEQ ID NO: 153701 - DNA, 2977 bp, Homo sapiens; identical to SEQ ID NO: 146781

SEQ ID NO: 153702 - DNA, 1985 bp, Homo sapiens
  misc_feature (1)...(1985): n = a,t,c or g
gtctggcttgggcaggctgcccgggccgtggcaggaagccggaagcagccgcggccccagttcgggagacatggcgggcgttaaagctctcgtggcattatccttcagtggggctattggactgacttttctnatatgctgggatgtgccttagaggattatggcgtttattggcccttattcgtcctgatttttccacgccatctcccccatcccccatttcattgccaaaagagtcacctatgactcagatgcaaccaagtagtgcctgtcgggaactggcatatttcttcactactggaattgttgtttcctgcctttggatttccccggtaatccttgcccgtgtggctttgatcaaaatggggagcctgcggcctttgtgttgggcaggcaatgcagtcattttcccttacaattcaaggggtttttccctatatttgggaagaggagatgattttagctggggagcagtggtagcactttattctgattacagtgcattgaatttcttaggaactcatactatctgtatacatgtgcacatgtcggcattttactatgaaattttaataatgctgggggtttttaatacctttatatatcatgttcactttaagaaaagacttcataagtaggagatgagttttattctcagccaaatagacctgtcaaatttaggattatgttactcaaattatgttacttgtttgggctgttccatgtagtccacggtgctctccagaaaatatattaacgcagtcttgtaaggcagctgcccacccttatgccagtgccatcggaaaccttttggcttgggggatggtgcttgggaaaggcagataaaccgctaaagcaggccttctcatgaccccagggaaggcccagggtggatcccgtctttgtgttggtagtcccatgctattaaaagtgtggccccacagaccaagagcctcaacatttccctagagccttattagaaatgcagaatctgaagcccccactctggaccccaggacattttgatgagatccaaaggagttgtatgcacatggaaagtttgagaagcatcatcatagaggaagtaaacatcacacccaacttccttatctttcccagtgggctaaaaccacttaaccctctctgggtgttaccctgctcatttgtttaaaaaaaaaaaaaaaaagtctcacctgctttcatgctgaggacaagttcagatgttcaagcctataatatttatgttgttctctcaaatttatgaaaagtgttctcagaattggggagacagtcaaagggtcctaacccctcagttaggaggaataagtgtgatttttttttaaagatcacttgcacagcatgctaaatataggaataattgaatgtatatttcaatattgctaagagagtaaatttctaatgttctcataaaaaagttaaatatttgagatcatatgttaattagtgtaatcattccaccttatattcaaaaatcataaaaccgtattgtaccctataaaaatatacaataatttgtcaatatataatcaaaataaaaaacaaaacatactctctcccccaaaaaaacatctcagtggggaacagatgtatcttttcatctgaaagacaatgctgggggaagagctccactgagatgcgggcagggaggctgggctccgagccagcccctgcgttagcaggagggggagaacagataggtaactcttttacatttcctttatgatctgggcacttctccccagctccttccctctgccccccacccctactcctcaacaagttctggtttggcctgacttctctacggctctgggcttctttcccggaagagaatataggaagcaatgtaaagcacggcagtggggtggaactgcttaattttcacttacatgttggatggtacttgtcttccgtcctgtaggtcttttctatataacttttatgccacccttaaatgaaatcat

SEQ ID NO: 153703 - DNA, 652 bp, Homo sapiens; identical to SEQ ID NO: 146829

SEQ ID NO: 153704 - DNA, 4871 bp, Homo sapiens; identical to SEQ ID NO: 146830

SEQ ID NO: 153705 - DNA, 479 bp, Homo sapiens; identical to SEQ ID NO: 146841
  misc_feature (1)...(479): n = a,t,c or g

SEQ ID NO: 153706 - DNA, 1102 bp, Homo sapiens; identical to SEQ ID NO: 146842
  misc_feature (1)...(1102): n = a,t,c or g

SEQ ID NO: 153707 - DNA, 792 bp, Homo sapiens; identical to SEQ ID NO: 146843

SEQ ID NO: 153708 - DNA, 1644 bp, Homo sapiens
cttttctttgtttgtaacttatctgtaaaaggtttctccctactgtcaaaaaaatatgcatgtatagtaattaggacttcattcctccatgttttcttcccttatcttactgtcattgtcctaaaaccttattttagaaaattgatcaagtaacatgttgcatgtggcttactctggatatatgtaagcccttctgcacatctaaacttagatggaactataacaaccaagggaatttgggaactgtaaatgagatcctcttgggcagtaatcccactgaagcggagttacaggacatgattaatgaagtgatgtctgatggtaatggcacaattgacttcccctgaatttctgacaatgatggcaagaaaaatgaaaagacacagacagtgaaggaaggaaattaggaggaagcattcccgtgtgtttggattaagggtgggcaatggcttatatttagttgcttgcaggaactttcgccatgtggatggacaaaccttgggaggaggaagtttaccagattgaagaagtttgatggaaatgatccaggggaagccagatattggatgggtgatggtccaagtaaactatggaagagttttggtaccaattgattgaccagccaagttgaagaccctgttacagaatgtgttaaatttccttgtacaaaattgtttatttgccttttctttgtttgtaacttatctgtaaaaggtttctcccctactgtcaaaaaaaaaatatgcatgtatagtaatttaggacttcattcctccatgttttccttccctaatcttactgtcattgtccctaaaacccctattttaagaaaatggatcaagttaaccatgttgccatgtggccttacctctgggatatatccctaagcccctttctgcaacattctaaactttagatgggagttgggtcaaaatgaggggaaacatctggggttatgcctttttttaaagtagttttcctttagggaactgtcagcatgttgttgttgaaagtgtggagttgtaactctgcgtggacctatggacagtcgactatggacactcaacaatatgtactttaaaagttggcactattgccaaaacggtgtgtattatccagtgtactacgtacactatttcttttgtactgctggtccctgtaccaagaaacatttttctttatatgtgttaccttgctttttaaactttgtttagccacttacttaaaagatctgcttatggcacaatttgcctcaaaatccattccaagttggtatatttggttttccaataaaaaaattactttttaggcccggcctgaccaaaaaaaatttatattaataaaagggggggcctttttaaagattccttgggggggccaaattttacgggggatggcaaggtattatttttttccttttggggggcggttttaaaacctacttgggattttttggaaagagacctttattcttggggggagccatattggcccaaccaccctacaagattaaaacgctctagggaaaataaaaatttttaaggggtaaagggggaaaaacaacctcaatttccttgctgttgaaaagttttttttccgggttttaatttaaaaaaattttttccccgggggggggttggtttt

SEQ ID NO: 153709 - DNA, 1449 bp, Homo sapiens
atggagctggagcaacttatgactctcatctctgctgcacgagaatatgagatagagttcatctatgcgatctcacctggattggatatcactttttctaaccccaaggaagtatccacattgaaacgtaaattggaccagactctgacatccagccatctcaatattccagagaagaggatgagtgtgaagggtggtggcgattttaaacaaggtgatcaggaagaccttgtggataacttcgggtctgagcacactccatcaggcccctctcttggcaatagtggaactggctgcagcccctgggcctcagcagagtcagagaaggaagtcagaggaatggccacagggacagccagaaatcagaagtggcttggtgtgagggactgtgcgtctcctttaatgggcggggccggaactggccgagggtccccggctttgtgcgtgtcgggggcggagtttgaagaaggctcttacagcatggccgccggctgtgagctctccggccacacccgctccttcacctttaaggtagaggaagaggatgatgcggagcacgtgctggcactaaccatgctctgcctcaccgagggagccaaagacgagtgtaatgtggtagaagttgtggcccggaaccatgaccatcaggagatcgcagtccctgtggccaacctcaagctgtcctgccaacccatgctcagtctggatgacttccagctccaaccacctgtaaccttccgcctgaagtcgggctctggccctgtgcggatcactgggcggcaccagattggccaccctccagggcccactaaaaaagcgctgaagcagcgattcctcaagctgctgccgtgctgcgggccccaagccctgccctcagtcagtgaaagcaagtgcctctcatgtgcttccgggggcggggctcgatgtgtgcacagcgtggacgatgaatttgaattgtccaccgtgtgtcaccggcctgagggtctggagcagctgcaggagcaaaccaaattcacgcgcaaggagttgcaggtcctgtaccggggcttcaagaacgaatgtcccagcggaattgtcaatgaggagaacttcaagcagatttactcccagttctttctcaaggaggactttgtggctggtttgtccgtgattcttcggggaactgtagatgacaggcttaattgggccttcaacctgtatgaccttaacaaggacggctgcatcaccaaggaggaaatgcttgacatcatgaagtccatctatgacatgatgggcaagtacacgtaccctgcactccgggaggaggccccaagggaacacgtggagagcttcttccagaagatggacagaaacaaggatggtgtggtgaccattgaggaattcattgagtcttgtcaaaaggatgagaacatcatgaggtccatgcagctctttgacaatgtcatctag

SEQ ID NO: 153710 - DNA, 3567 bp, Homo sapiens; identical to SEQ ID NO: 149530

SEQ ID NO: 153711 - DNA, 672 bp, Homo sapiens
aagatggacagaaacaaggatggtgtggtgaccattgaggaattcattgagtcttgtcaaaagggaacgagaggtcacagcctcgctctccgcttaggcttctggcgccccagcttaaagccgaggctgcggctgacaaagggctcgcgccggtgccgccgcccttctcatccgggcattcgggtccctgcggagagggagggggaagggcagagggggaggggaaggagccggaggggcgcacacttggagctgaagccctctccagggctccgggccggtgccccaacggacagaggtcgaggaggacccgcagaggtggcagcggccgggggcaggaggatggtgcagaaggagagtcaagcgacgttggaggagcgggagagcgagctcagctccaaccctgccgcctctgcgggggcatcgctggagccgccggcagctccggcacccggagaagacaaccccgccggggctgggggagcggcggtggccggggctgcaggaggggctcggcggttcctctgcggtgtggtggaagagcaacttatgactctcatctctgctgcacgagaatatgagatagagttcatctatgcgatctcacctggattggatatcactttttctaaccccaaggaagtatccacattgaaacgtaaattggaccag

SEQ ID NO: 153712 - DNA, 2417 bp, Homo sapiens
ccccttctccccggcggttagtgctgagagtgcggagtgtgtgctccgggctcggaacacacatttattattaaaaaatccaaaaaaaatctaaaaaaatcttttaaaaaaccccaaaaaaatttacaaaaaatccgcgtctcccccgccggagacttttattttttttcttcctcttttataaaataacccggtgaagcagccgagaccgacccgcccgcccgcggccccgcagcagctccaagaaggaaccaagagaccgaggccttcccgctgcccggacccgacaccgccaccctcgctccccgccggcagccggcagccagcggcagtggatcgaccccgttctgcggccgttgagtagttttcaattccggttgatttttgtccctctgcgcttgctccccgctcccctccccccggctccggcccccagccccggcactcgctctcctcctctcacggaaaggtcgcggcctgtggccctgcgggcagccgtgccgagatgaaccccagtgcccccagctaccccatggcctcgctctacgtgggggacctccaccccgacgtgaccgaggcgatgctctacgagaagttcagcccggccgggcccatcctctccatccgggtctgcagggacatgatcacccgccgctccttgggctacgcgtatgtgaacttccagcagccggcggacgcggagcgtgctttggacaccatgaattttgatgttataaagggcaagccagtacgcatcatgtggtctcagcgtgatccatcacttcgcaaaagtggagtaggcaacatattcattaaaaatctggacaaatccattgataataaagcactgtatgatacattttctgcttttggtaacatcctttcatgtaaggtggtttgtgatgaaaatggttccaagggctatggatttgtacactttgagacgcaggaagcagctgaaagagctattgaaaaaatgaatggaatgctcctaaatgatcgcaaagtatttgttggacgatttaagtctcgtaaagaacgagaagctgaacttggagctagggcaaaagaattcaccaatgtttacatcaagaattttggagaagacatggatgatgagcgccttaaggatctctttggcaagtttgggcctgccttaagtgtgaaagtaatgactgatgaaagtggaaaatccaaaggatttggatttgtaagctttgaaaggcatgaagatgcacagaaagctgtggatgagatgaacggaaaggagctcaatggaaaacaaatttatgttggtcgagctcagaaaaaggtggaacggcagacggaacttaagcgcaaatttgaacagatgaaacaagataggatcaccagataccagggtgttaatctttatgtgaaaaatcttgatgatggtattgatgatgaacgtctccggaaagagttttctccatttggtacaatcactagtgcaaaggttatgatggagggtggtcgcagcaaagggtttggttttgtatgtttctcctccccagaagaagccactaaagcagttacagaaatgaacggtagaattgtggccacaaagccattgtatgtagctttagctcagcgcaaagaagagcgccaggctcacctcactaaccagtatatgcagagaatggcaagtgtacgagctgttcccaaccctgtaatcaacccctaccagccagcacctccttcaggttacttcatggcagctatcccacagactcagaaccgtgctgcatactatcctcctagccaaattgctcaactaagaccaagtcctcgctggactgctcagggtgccagacctcatccattccaaaatatgcccggtgctatccgcccagctgctcctagaccaccatttagtactatgagaccagcttcttcacaggttccacgagtcatgtcaacacagcgtgttgctaacacatcaacacagacaatgggtccacgtcctgcagctgcagccgctgcagctactcctgctgtccgcaccgttccacagtataaatatgctgcaggagttcgcaatcctcagcaacatcttaatgcacagccacaagttacaatgcaacagcctgctgttcatgtacaaggtcaggaacctttgactgcttccatgttggcatctgcccctcctcaagagcaaaagcaaatgttgggtgaacggctgtttcctcttattcaagccatgcaccctactcttgctggtaaaatcactggcatgttgttggagattgataattcagaacttcttcatatgctcgagtctccagagtcactccgttctaaggttgatgaagctgtagctgtactacaagcccaccaagctaaagaggctgcccagaaagcagttaacagtgccaccggtgttccaactgtttaaa

SEQ ID NO: 153713 - DNA, 5395 bp, Homo sapiens
tccctctgcgcttgccccccgctcccctccccccggctccggccccagccccggcactcgctctcctcctctcacggaaaggtcgcggcctgtcgctgcggcgagccgtgccgagatgaaccccagtgcccccagctaccccatggcctcgctctacgtgggggacctccaccccgacgtgaccgaggcgatgctctacgggaaacagcggaagacctaagattatcaggagggcagcagaggcagagaacgaggacaggacccttggccgtcttcttccagggaacgagaggtcacagcctcgctctccgcttaggcttctggcgccccagcttaaagccgaggctgcggttgacaaagggctcgcgcgggtgccgccgcccttctcatccgggcattcgggtccctgcggagagggagggggaagggcagagggggaggggaaggagccggaggggcgcacacttggagctgaagcccttttcagggcttccgggccggtgcccccaacggacagaaggtcgaggaggacccgcagaggtggcagcggccgggggcaggaggatggtgcagaaggagagtcaagcgacgttggaggagcgggagagcgagctcagctccaaccctgccgcctctgcgggggcatcgctggagccgccggcagctccggcacccggagaagacaaccccgccggggctgggggagcggcggtggccggggctgcaggaggggctcggcggttcctctgcggtgtggtggaaggattttatggaagaccttgggttatggaacagagaaaagaactctttagaaggctccagaaatgggaattaaatacatacttgtatgccccaaaagatgactacaaacataggatgttttggcgagagatgtattcagtggaggaagctgagcaacttatgactctcatctctgctgcacgagaatatgagatagagttcatctatgcgatctcacctggattggatatcactttttctaaccccaaggaagtatccacattgaaacgtaaattggaccaggtttctcagtttgggtgcagatcatttgctttgctttttgatgatatagaccataatatgtgtgcagcagacaaagaggtattcagttcttttgctcatgcccaagtgctccatcacaaatgaaatctatcagtacctaggagagccagaaactttcctcttctgtcccacagaatactgtggcactttctgttatccaaatgtgtctcagtctccatatttaaggactgtgggtgaaaagcttctacctggaattgaagtgctttggacaggtcccaaagttgtttctaaagaaattccagtagagtccatcgaagaggtttctaagattattaagagagctccagtaatctgggataacattcatgctaatgattatgatcagaagagactgtttctgggcccgtacaaaggaagatccacagagggtcatcccacggttaaaaggagtcctcactaatccaaattgtgaatttgaagccaactacgttgctatccacacccttgccacctggtacaaatcaaacatgaatgggagtgagaaaagatgtagtgatgactgacagtgaagatagtactgtgtccatccagataaaattagaaaatgaaggcagtgatgaagatattgaaactgatgtactctatagtccacagatggctctaaagctagcattaacagaatggttgcaagagtttggtgtgcctcatcaatacagcagtaggcaagttgcacacagtggagctaaagcaagtgtagttgatgggactcctttagttgcagcaccctctttaaatgccacaaccgtagtaacaacagtttatcaggagcccattatgagccagggagcagccttgagtggtgagcctactactctgaccaaggaagaagaaaagaaacagcctgatgaagaacccatggacatggtggtggaaaaacaagaagaaacggaccacaagaatgacaatcaaatactgagtgaaattgttgaagcgaaaatggcagaggaattgaaaccaatggacactgataaagagagcatagctgaatcaaaatccccagagatgtccatgcaagaagattgtattagtgacattgcccccatgcaaactgatgaacagacaaacaaggagcagtttgtgccaggtccaaatgaaaagcctttgtacactgcggaaccagtgaccctggaggatttgcagttacttgctgatctattctaccttccttacgagcatggacccaaaggagcacagatgttacgggaatttcaatggcttcgagcaaatagtagtgttgtcagtgtcaattgcaaaggaaaagactctgaaaaaattgaagaatggcggtcacgagcagccaagtttgaagagatgtgtggactagtgatgggaatgttcactcggctctccaattgtgcgcggcaggacaattctttatgacatgtactcctatgtttgggatatcaagagtataatgtctatggtgaagtcttttgtacagtggttagggtgtcgtagtcattcttcagcacaattcttaattggagaccaagaaccctgggcctttagaggtggtctagcaggagagttccagcgtttgctgccaattgatggggcaaatgatctcttttttcagccacctccactgactcctacctccaaagtttatactatcagaccttattttcctaaggatgaggcatccgtgtacaagatttgcagagaaatgtatgacgatggagtgggtttaccctttcaaagtcagcctgatcttattggagacaagttagtaggagggctgctttccctcagcctggattactgctttgtcctagaagatgaagatggcatatgtggttatgccttgggcactgtagatgtgaccccctttattaaaaaatgtaaaatttcctggatccccttcatgcaggagaagtataccaagccaaatggtgacaaggaactctctgaggctgagaaaataatgttgagtttccatgaagaacaggaagtactgccagaaacttttccttgctaatttcccttctctgataaagatggacattcacaaaaaagtaactgacccaagtgtggccaaaagcatgatggcttgcctcctgtcttcactgaaggctaaatggctcccggggagctttctgtgaagtgagaccagaatgataaaagaattctggaattttacagcaagttaggatgttttgaaattggcaaaaatgggaaggatttccaaaggatgtggttatacttggtcggagcctgtgacatttgttgacactgtgaactgtccaaaagtctcttaactgcaccttgtgaatggtagttgaggtcttcatacagttcagcctctagaatggtaacaaatcagccaattggattcgaaacaaagaagactatgtaaatactcacccatcacactttgagactactcactggtgggaaagaatatagtattgcagcaaatcctgtatgaaagagagatgtgggcttcctttttgagtcttgtgttaggtgctgagaccttttacatgggcttatacagggagagagtcttccaataaatgtagtccagcactattttctgcatccagtgtgggttgccgtttctccacctgagagtaatcaagataacatctgtcatcttccttggtttattgagtgaaatgcctctcagtcttaggggacatggcagagatgaaagaaagaaagagtgggtttcagaagtgtcagggtggagtgattccaagtgggatggttgtggcattagtttaagctgaataaataatttcaatttggggcaggttattctgctttttgtaaagccgtggccaattgtctcctgtaatgactgttggttcaggcatgttgtactttgtagggacaaatgtgcatttggtttgtggcaaaagcctacaaattgacaaacttgtaaatttcctttgtatataaactagctgtaaccctgactatcctttgtgtttactgtttttgtaaatttttttcctctataaatgaaagggtgttggttcagaatggcactttgaataatgtaaaccagtgaaaagtggattttctttacttttgtctttgggtttggggttgtttttgttctttttgaagttttattatttttaaagtggcctcccacctaggcgtaggccatggaccatttggggtacgagagcctaattttggtagggacttaatctgttgaaaagtgccagttacttctggaaattaacctcaatattagggcagcatgagaaatgatggatttgacatgtcaggtagggctcagggactgattggtcccaatttgccctcaggtcagttgtttaatctcaagacctgttactactgattttattaaatcagagtctttaattcttgcatgtttgtatctaatttctgaacgaatgagcacactttaaccagttatttacagttacctttttcctttaaccggattgtgaaagcttcatgtattttaatttagattctgtgtttttaagggttctgagcatgaagctggcagatagtcggcaggactcattttttcatcatggctggctgatttctccatagattgataacagtattttgttatcttgcttctctgtagttttgcatcagctggtttaactttggagcctgagtgaggggagaggggtaaagagagagaaagaaacttaagttttctttcacagaactccaccattgtgggcctttgagagacccctaaaccattggacctagtggtacctaagtgacttccaaccaaaagcctttgagtatgccactaaatacggtgagaagaaaggagagaaggtttttacggttagaaacctttaaccgatagaaggatatggtatgttgtaaagctggaacccaagggttgcatttttgagggcttgagatgaagggaaagacttcttaccagatagtaaagacagctgagtttcccctcaagttttctcggtcttaacactagtggacaattctagcatttttgtttggaggatttcagagttaacctcatggaattcagggattttttagcaagtttgcttttgggttttatcttggcttttaagtaatccatgttggctggtctggttcacagggtgctgttgaaacaaatgccctggtcttgctttcatcgactctaggatcgatgaagtgctatgctatttcctggttatgaatattaaggttggaattacatttttattgattgtttggatcagagctcagttcctgtagaaaacgaactgtaaaagaccatgcaagaggcaaaataaaacttgaagtgaatgctaaaaaaaaaaaaaaaaaa

SEQ ID NO: 153714 - DNA, 654 bp, Homo sapiens; identical to SEQ ID NO: 144884
  misc_feature (1)...(654): n = a,t,c or g

SEQ ID NO: 153715 - DNA, 708 bp, Homo sapiens; identical to SEQ ID NO: 146888
  misc_feature (1)...(708): n = a,t,c or g

SEQ ID NO: 153716 - DNA, 486 bp, Homo sapiens
  misc_feature (1)...(486): n = a,t,c or g
ntgatcattttctatctgaaactcttgacaatattatcattttctatctggtttcaatctcacaattttcttctaagtttgtacattttgcccttagctttttgtttcctagcttgtcttttttcttatgctgtcttcctagattcactgaatccacttctgtgtagcacctgggtcagctgtcaattaatgctagtcctcaggatttaaaaaataatcttaactcaaagtccaatgcaaaaacattaagttggtaattactcttgatcttgaattacttccgttacgaaagtccttcacatttttcaaactaagttactatatataaggccttccaaaatcgtccccctcttccaaaagccttctgccttagttaattttaaattacaccagtccttttagtagctttatgcgaacgcgtgggtcggcccntaanttccnaagcngttgcncatcgnctgcaggtnctcaatttnnagngagctn

SEQ ID NO: 153717 - DNA, 420 bp, Homo sapiens
  misc_feature (1)...(420): n = a,t,c or g
taattcggggctctgtagtcctttctctcaattttcttttaaatacattttttactccatgaagaagcttcatctcaacctccgtcatgttttagaaaccttttatcttttccttcctcatgctactcttgtaagtcttcatattttctcttaaaatcttaagctattaaaattacgttaaaaacttaacgctaagcaatatcttagcaacctattgactatattttttaagtagttgtattaatctctatctttcaaagagaaaaaaacttatctgcgacgaaatcgtcgacccgggaaatctnnnnnnnnnnnnnnnnnnnncgagcctaggctagctctagaccacacgtgtgggggcccgagctctcgcccgcnnnnnnnnnnnnnnnnnnnnnnnnnnnngcgcaatgtcacgag

SEQ ID NO: 153718 - DNA, 1880 bp, Homo sapiens
  misc_feature (1)...(1880): n = a,t,c or g
gttattatattagaaaataaataaaaggttaccataagtaagttccagaaaaacaacatattgccgacctcacggatttttaccaaccactcgctttccctgtggccttggcacactggcatgctggtctaggatcctctacgcacaacgcctgctcgcctcctccgtgtggttgccaagccaagccgcctgctaccttcatcaccaaattgcactcgctccttcctggaatccttttttcctkyagcttcaccaccdaaaatcgttagcgctccttccttcttcctagcttccttcaccaaattcggcactggcwtcctggactcttttcctatcttcaccacgaactgctgcttgctcgcttgctcctcagtcctagcttcatcaaacactggttcctggaatcctgtctgctgctgtcttcctagattcactgaatccacttctgtgtagcacctgggtcaagctgtcaattaatgctaagtcctcaggatttaaaaaataatcttaactcaaagtcccaatggcaaaaaacattaagttggtaattactcttggatcttgaattacttccgttacgaaagtccttcacatttttcaaactaagctactatatttaaggccttccaaattcttctaactcttccaaaagccttctgccttaggttttttttaaattacaccagtccttttagtagctttttgatgtgatttttaaccaacttccccttctagcttcaagtattcttcctaaattggttcttggtctacgtaaacaccctcatcttctcaagctttaccttcctaacttctgcaccaccagaaattaaattgcatgggcttttaaaataaattggttaccaataattttcctcattttttcagtgctattttatccaatttttggctttatatttttctatcttctatacttctccaatacttgtcttagcttgtttttccattttctatctgaaactcttgacaatattttcattttctatcttgtttctatcttccaattttcttctaagtttgtacattttgccattagctttatgtttcctagcttgtcttttttcttctgcttcatactttccaggtttaaatttatctttttttcttctaaaaagtatgtttttatctttctaatttccctatccttcactattctttttcttcgccttcccgtaacttctgtcttcccagttttccaacttcaaaacttctatctttctccaaattggtttcatccttaccactccccaattaatctttccatttttcgtctgcgtttagtaaatgcggttaacaaggctttaaatgacggcaattctcccctgcggtcatgggatttccaaggtcctttttaatccaccttccggtttaatctcctttttaaaagatcggccttcaaaatattttaaatccccctacaacttttaaaactaaactttaagctgtttaagtcacccttcattttaatcctaaaagcattgccccttcctatgggtattaattcggggctcttgtagtcctttcgtctcaattttcttttaaatacattttttactccatgaagaagcttcatctcaacctccgtcatgttttagaaaccttttatcttttccttcctcatgctactcttctaagtcttcatatttttctcttaaaatcttaagctattaaaattaccgttaaaaacttaacgctaagcaatatcttagtaacctattgactatattttttaagtagttgtattaatcctctatctttcaaagagaaaaaaaacttattctgcggtttcctcaaacgacagcaaaacacctcagcagaagcccctgcgcctggccggacgcgtgggtcgngccgggtcctac

SEQ ID NO: 153719 - DNA, 450 bp, Homo sapiens; identical to SEQ ID NO: 146895

SEQ ID NO: 153720 - DNA, 577 bp, Homo sapiens; identical to SEQ ID NO: 146896

SEQ ID NO: 153721 - DNA, 662 bp, Homo sapiens; identical to SEQ ID NO: 146897

SEQ ID NO: 153722 - DNA, 624 bp, Homo sapiens; identical to SEQ ID NO: 144924

SEQ ID NO: 153723 - DNA, 680 bp, Homo sapiens; identical to SEQ ID NO: 146901

SEQ ID NO: 153724 - DNA, 779 bp, Homo sapiens
ccactgaagcgctcagatggctgtaacgacggccgacccacgcgtccgcccacgcgtccggacacaactgtgttcactagcatcgctcatacagacactattggtgcacctgactcactgaggagaagtctgccgttactgccctgtggggcaaggtgaacgtggatgaaagttggtggtaaggccctgggcaggctgctggtggtctacccttggacccagaggttcctttgagtcctttggggatctgtccactcctgatgctgttatgggcaaccctaaggtgaaggctcattcgcaagaaagtgctcggtggcctttagtggtgggcctggctgcacctgggacaacctcaagggcacctttgctcacactgaggtgagcttgcactgtgacaaagctgcaccgtggatccctgaagaacttcaggctccttgggcaacgtgcttggtctgttgttgctgggcccattcacttttggcaaaagaatttcaaccccaccagttgcaggcttgcctaatcaagaaaattggttggcttggtgttggctaaatgcccttggccccacaagtaatcacttaagcctcgctttccttgctggtccaatttccaattaaaaggttcctttggttccctaagtccaactactaaactggggggatattattgaaagggccttgagcatcttggattttgcctaataaaaaacatttattttcatcgcatacaagaataaaacaagcgcggccgattaagaggatacttcaggggcgcaagat

SEQ ID NO: 153725 - DNA, 463 bp, Homo sapiens; identical to SEQ ID NO: 146936

SEQ ID NO: 153726 - DNA, 1309 bp, Homo sapiens; identical to SEQ ID NO: 146937

SEQ ID NO: 153727 - DNA, 429 bp, Homo sapiens
catagaagaattcagctagtaactgatggagttgaggcttgaacccaagcaacaaaatagttccagggctacgtttttaaccgtccttccactatgctgtactgcctcttcataactgtttgggttttttcccctctttaaggcatcgttggcttcacagtatgactgatgatcctccaacaacaaaaccacttactgctcgtaaattcatttggacgaaccataaattcaacgtgactggcaccccagaacaatatgtaccttattctaccactagaaagaagattcaggagtggatcccaccttcaacaccttacaagtaaagacaatgaagaacagttgaaacatgcaaaatatggagcttttcatgtaattactcttttactgtttaccattcactataattcacaattaaaattgtgtgactaa

SEQ ID NO: 153728 - DNA, 484 bp, Homo sapiens
cggacgcgtgggcggggccagcgaggcaagatggagttagtgcaggtcctgaaacgcgggctgcagcagatcaccggccacggcggtctccgaggctatctacgggtttttttcaggacaaatgatgcgaaggttggtacattagtgggggaagacaaatatggaaacaaatactatgaagacaacaagcaattttttggcatcgttggcttcacagtatgactgatgatcctccaacaacaaaaccacttactgctcgtaaattcatttggacgaaccataaattcaacgtgactggcaccccagaacaatatgtaccttattctaccactagaaagaagattcaggagtggatcccaccttcaacaccttacaagtaaagacaatgaagaacagttgaaacatgcaaaatatggagcttttcatgtaattactcttttactgtttaccattcactataattcacaattaaaattgtgtgact

SEQ ID NO: 153729 - DNA, 962 bp, Homo sapiens
  misc_feature (1)...(962): n = a,t,c or g
gtgcagccatattattttgatgacatgagctgtcctatgtacctaaccatcatttctaatgtttgcttattgtatataattcacaaatttccaaaaggatctagggtggttttaaaaaaatacttatgtggagacatagaattcaagtatgattgctacaaatgtgttttttccccagtctcaagaggaacaccttcttttctgaataccctgtacatctgggaacacactttcctatcctgtctgctactccctctgtggggagctggcagggaagcaaggattctctccctgtgggaaaggcctgagccccacccacagcagtgaatcatctcactccttgctgcgggttgctgcttaaagtttgccacacacctcctggagcttaccttcacgaattcacccagggtgttattcctccaatagctctcttatataagatcccaaaaagtcttttcttaataaaaaggttgtcttctttggatattatgcatctatgctttaaaaaaaaaagtttttcctttttnaaagggttcatcttcccaccccaggccggtcaccgatggggttgtatatactacctgaaatgaatggcaaaaacacatttttgggatgtggatggaagcatggtgcctcctgaatggcatcgttggcttcacatgtatgactgatgatcctccaacaacaaaaccacttactgctccgtaaatttcatttgggacggaaccattaaatttcaacgtggactggggcaccccaggaacaatatgttaccttattctaccactagaaaagaagattcaggagtggatcccaccttcaacaccttacaagtaaagacaatgaagaacagttgaaacatgcaaaatatggagcttttcatgtaattactcttttactgtttaccattcactataattcacaattaaaattgtgtgactaaacaaaaaaaaaaaaaaaaa

SEQ ID NO: 153730 - DNA, 787 bp, Homo sapiens
  misc_feature (1)...(787): n = a,t,c or g
aattttgccctcgaggccaagaattcggcgagggcaataagctcctacgtccagacgcccatgggtcatttcaccagaggaggaccaaggcttactatcacaagcctgtggggcaaaggtgaatgtggaaagatgctggaggagaaacccctgggaaaggctccctggttgtctaccccatggaccccagaggttctttgacagctttggcaacctgtcctctgccttttgcccatcatggccaacccccaaagtcaaggcacatggcaaagaaggtgctgactttccttgggagatgcccataaaagcacctgggatgatctcaaggggcaccttttgcccaagcctgaagtgaactgcactgttgacaagcctgcaatgtgggatcctgagaacttcaaagctcctggggaaatgttgctggtgacccgttttgggcaatccctttttcggcaaaagaatttcacccctgaaggttgcagggcttccctgggcaagaaagatgggtgactggaagtggccaatggccctgttccttccagattaccactgaagcctcttggcccatgaattcagaagctttcaaggataaggcttttattcttgcaagcaattacaaataataaatctatttctgctaagagatcaccaaannnnnatnntnnnnnnncccccggattttttatttagcgggccgcacctttttccccttttagggggggtaaatttatattgggccttgggccggggttttcaaaagcggggggannnnnnnnnnaaagagccc

SEQ ID NO: 153731 - DNA, 654 bp, Homo sapiens; identical to SEQ ID NO: 144884
  misc_feature (1)...(654): n = a,t,c or g

SEQ ID NO: 153732 - DNA, 656 bp, Homo sapiens; identical to SEQ ID NO: 146974

SEQ ID NO: 153733 - DNA, 1484 bp, Homo sapiens; identical to SEQ ID NO: 146977

SEQ ID NO: 153734 - DNA, 2401 bp, Homo sapiens; identical to SEQ ID NO: 146982
  misc_feature (1)...(2401): n = a,t,c or g

SEQ ID NO: 153735 - DNA, 419 bp, Homo sapiens
  misc_feature (1)...(419): n = a,t,c or g
aaggttttcttttatttaaaagatcattcacaaaataccatatccatagatttactttctgtcatatagctgaatgtgttaagtgtttggaattccattcttacatttaaaagtcaactggattgcccagcagtttagatgcatgtgttttgttctttatcttatccacattgaagatgtaagtaggtcatctgaaagcatcgggtttgattacaccacataatgcatgtctttctgaagttaagtgttggtgttacacaaatggttcttatctcagaagcagagaagctgacaggtnnnnnnnnnnnnnnnnnnnnnnnnnnnnnnnnnnnnnnnnnnnnnnnnnnnnnnnnnnnnnnnnnnnnnnnnnnnnnnnnnnnnnnnnnncaggcaggcaggcacgcaggcaagcagggagg

SEQ ID NO: 153736 - DNA, 2649 bp, Homo sapiens
  misc_feature (1)...(2649): n = a,t,c or g
ggcacgaggcctcgtgccgctcggagcggagacggcaaatggcggacttcgacacctacgacgatcgggcctacagcagcttcggcggcggcagagggtcccgcggcagtcgctggtggccatggttcccgtagccagaaggagttgcccacagagcccccctacacagcatacgtaggaaatctaccgtttcaatacggttcagggcgacatagatgctatctttaaggatctcagcataaggagtgtacggctagtcagagacaaagacacagataaatttaaaggattctgctatgtagaattcgatgaagtggattcccttaaaggaagccttgacatacgataggtgcactgttgggcgatcggtcacttccgtgtggacattgcagaaggcagaaaacaagataaaggtggcttttggattccagaaaaggtggaccagatgacagaaggcttcagggatgacttcttagggggcaggggagtttgtcccgcccaggcgaccggcgaacaggtccccccatgggcagccgccttcagagatggccctcccctccgtggattccaacatggatttcagagaacccacagaagaggaaagagcacagaggaccacgactccagctttaaaacctcgaacagtcgcgacgcccctcaatcaagtagccaatcccaactcttcttatcttccgggggtgccaggcctagagaggaagtcgttcaaaaggagcaagaatgagcctgcggttgggagggaatggggcgtggggggttagagcaggaccacagcctggtgagtccccgggcagccgtcctgcagccgccactcctgcgcctgccattggcctcctcacagcggaaacacagcttgtgagtgcatgtcagctgttaacaagtggtttttagtacattctgggctttgctgtatctatctagtgcctgtttgtgcgtttttttctttcttccgctgcttccccattttccttctgtcctttttctcctgctccttgttttcccagcaagcacatggggttcctcggaggaagcaagaggtggcccgcccgtgggggggcgtttggggctgcggtgctgcgtcatttttcctttgctttctctttactttagacactggcccaactccaggcgttttcctttcaattccctcagtgcttctcttctgacctgcatgttgaagttctgtaattgctggggcttccaacaaaaaccagagtcactgacagaagggaacagcagagaccttgttggtattcagctgtgatggatatagagaatcagaggcaccttgttttcacaactaggataaaaactatctgccgggtcctttccattcctatttagagggagtcctgggctccatgaccccctccccgagtgggactgtccaagcagataggctcacaccgagaaacaagtgaggctgaaaaggggggggctaatggaagaaccggtagggaagtccaccggagaagatgcagttgaattgctttgcatgcattcacacgtgtgtgtgtcccaagctagttcactccttttcgccgtgcgtgggtggaggctggcctctctggctgggtgcagtgaatggccagcgggtttcttttctgctgggccaaggcgctttgggggtggagggggtggtgctggtgctgcacttgggctgactgcggcgctgacgcagccgtttccccccatacctgttgcctgtgtgttgtgtggatctgttcctagtataggcaacataatgagatactgtgcttcccacctccccttcagttcagagccaaaatgggtctagaatctggcactttactcatttcctttgataaattgtactaatgcaagaactggtcaaggaaccttcagatagcagtaagaggactgcagctgtctaaggtctgcggccacatcttgggggacacactggactgttcccatgtgcagggttcagcagttatgttgggaagttgctaggggttaaggcttttggagcttgaacgcctgcgttgtgaacagattgaaaaatccttcagtaccccaagtccccagtctgtcctatggggagcagtttgggggcggcccggccagccaggaagcctgggaaagaggcccctcngccaggtgatggccagggcccaggcgtngccctgggggcaccccagccgggaatgtgccttagtatttgggtcacccagccgtcatcccctgggcttttccctacttgtgtcttggttacaaggcctcaagcaatcccacagaactctctctcccttccttccaacctgtcagcttctctgcttctgagataagaaccatttgtgtaacaccaacacttaacttcaagaaagacatgcattatgtggtgtaatacaaaccccctgctttcagatggcctacttacatctttcaatgtggataagataaagaacaaaacacgatgcatctaaactgctgggcaatccagttgacttttaaaatgtaagaatggaattccaaacacttaacacattcagctatatgacagaaagtaaatctatggatatggtattttgtgaatgatcttttaaataaaaagaaaaccttacgtaataaaaaaaaaaaaaaaaaaaaaattggcggccgcaagcttat

SEQ ID NO: 153737 - DNA, 861 bp, Homo sapiens
atggtgcccagcgaggggctgtggagaggcctgcgggaaatgctggatcagagcaaccagtggggaggcaccgcgctggtggtgcctgccttcgaaatccgaagagcccgccgcatgcccatgaacaaaaacgagctggtgcagctctaccaggttggcgaggtgcggcccttctattatgggttgtgcaccccctgccaggcacccaccaactattcccgctgggtcaacctgccggaagagagcttgctgcggcccgcctacgtgtacttccaggcgcgactggccggggccggcaacagcacagccaggatcctgagcaccaaccacacgggtcccgaggatgccttcaacttcaacaattgggtgacgctgctgtcccagctgcccctgctgctcttcaccctcctcaactccttcctgtaccagtgcgtcccggagacgatggcgaaactgaggcctagagaggagcgcatcctttctgaagcccctcaatggttgctagggcatggggaggggtcactgcctaaagcaaggactgtacctgaagcttcttcctctcaccatgtccccacaggggagggcgcgggtgccgacgagttcctgcctctgctgagcctcgtcttggcccactgtgaccttcctgagctgctgctggaggccgagtacatgtcggagctgctggagcccagcctgcttactggagagggtggctactacctgaccagcctctctgccagcctggccctgctgagtggcctgggtcaggcccacaccctcccactgagccccgtgcaggagctacggcgctccctcagcctctgggagcagcgccgcctgcctgccacccactgcttccag

SEQ ID NO: 153738 - DNA, 2079 bp, Homo sapiens
atggtcaaggcgcagctccgcaccgcgctggcctctggaggcgtcctggacgctagcggcgattaccgcgtctacaggggcctgctgaagaccaccatggaccccaacgatgtgatcctggccacgcacgccagcgtggacaacctgctgcacctgtcgggtctgctggagcgctgggagggcccgctgtccgtgtcggtgttcgcggccaccaaggaggaggcgcagctggccacggtgctggcctacgcgctgagcagccactgccccgacatgcgcgccagggtcgccatgcacctcgtgtgcccctcgcgttacgaggcagccgtgcccgacccccgggagccgggggagtttgccctgctgcggtcctgccaggaggtctttgacaagctagccagggtggcccagcccgggattaattatgcgctgggcaccaatgtctcctaccccaataacctgctgaggaatctggctcgtgagggggccaactatgccctggtgatcgatgtggacatggtgcccagcgaggggctgtggagaggcctgcgggaaatgctggatcagagcaaccagtggggaggcaccgcgctggtggtgcctgccttcgaaatccgaagagcccgccgcatgcccatgaacaaaaacgagctggtgcagctctaccaggttggcgaggtgcggcccttctattatgggttgtgcaccccctgccaggcacccaccaactattcccgctgggtcaacctgccggaagagagcttgctgcggcccgcctacgtggtaccttggcaggacccctgggagccattctatgtggcaggaggcaaggtgcccaccttcgacgagcgctttcggcagtacggcttcaaccgaatcagccaggcctgcgagctgcatgtggcggggtttgattttgaggtcctgaacgaaggtttcttggttcataagggcttcaaagaagcgttgaagttccatccccaaaaggaggctgaaaatcagcacaataagatcctatatcgccagttcaaacaggagttgaaggccaactggctccgttactctcctgagctgggggtggggggatcggggccggcttctccccttgcacgccgtggggagatggccgcggacgaagggcaccgtctgcaaagcactgaaccatcagggccttccctgcaggccgaaggcctgcgcgaatgtcggccagttactatggagaccggcccgcggtatcccagcatgcctcgggaccaaactgtccaactagtccagatgcctgtccagcctccaagcaaagacacagaagagatggaagcagagggtgattctgctgctgagatgaatggggaggaggaagagagtgaggaggagcggagcggcagccagacagagtcagaagaggagagctccgagatggatgatgaggactatgagcgacgccgcagcgagtgtgtcagtgagatgctggacctagagaagcagttctcggagctaaaggagaagttgttcagggaacgactgagtcagctgcggttgcggctggaggaagtgggggctgagagagcccctgaatacacggagccccttggggggctgcagcggagcctcaagattcgcattcaggtggcagggatctacaagggcttctgtctggatgtgatcaggaataagtacgaatgtgagctgcagggagccaaacagcacctggagagtgagaagctgctgctctatgacacgctgcagggggagctgcaggagcggatccagaggctggaggaggaccgccagagcctggacctcagctctggcccatacatcgtgtacatgcttcaagagatcgacatcctggaggactggacagccatcaaaaagccagggggaccctcagagcagctggcactgcacccaggattctcgtcttcctcctgcagacaggcggacccacaggcccctcagggtctgcccagccaggctcctgtggtgctgctgggccctcccactccatctggcactggcctggactcctcctctgccctcctcgaggcctgcacagctgtggccgtggagctgacctga

SEQ ID NO: 153739 - DNA, 2097 bp, Homo sapiens
  misc_feature (1)...(2097): n = a,t,c or g
gcggtaaatccgggcttgcggccgctggcgtagtctgatggccggtgtggtcgttgctgcgcgccccgagccccgagagccatgcatatgtccttcgccatctctggtgcgccttctaccagctgctgctggccgcgctcatgctggtggcgatgctgcagctgctctacctgtcgctgctgtccggactgcacgggcaggaggagcaagaccaatattttgagttctttcccccgtccccacggtccgtggaccagtgtcaaggcgcacgtccgcaccgcgctggcctctggaggcgtcctggacgttagcggcgatttaccgcgttctacaggggcctgctgaagaccaccatgggaccccaacgatgtgatcctgggccacgcacgccagcgtggaacaaacctgcttgcacctgttcgggtctgctgggagcgctggggaggggcccgctgttccgtgttcggtgttcgcggccaaccaaggaggagggcgcagctggccacggtgctggcctacgcgctgagcagccactgccccgacatgcccgccaggggtcgccatgcacctcgtgtgcccctcgcgttacgaggcagccgtgcccgacccccgggagccgggggagtttgccctgctgcggtcctgccaggaggtctttgacaagctagccagggtggcccagcccgggattaattatgcgctgggcaccaatgtctcctaccccaataacctgctgaggaatctggctcgtgagggggccaactatgccctggtgatcgatgtggacatggtgcccaactgaggggctgtggagaggcctgcgggaaatgctggatcagagcaaccagtggggaggcaccgcgctggtggtgcctgccttcgaaatccgaagagcccgccgcatgcccatgaacaaaaacgaggctggtgcagctctaccaggttggcgaggtgcggcccttctattatgggttgtgcaccccctgccaggcacccaccaactattcccgctggtttaacctgccggaagagagcttgctgcggcccgcctacgtggtaccttggcaggacccctgggagccattctacgtggcaggaggcaaggtgcccaactttcgacggagcggttttcggcagtacggcttcaaccgaatcagccaggcctgcgagctgcatgtgggcgggtttgattttgaggtccttaaacgaaggtttcttggttcataagggcttcaaagaagcgttgaagttccatccccaaaaggaggctgaaaatcagcacaataagatcctatatcgccagttcaaacaggagtttgaaggccaagtaccccaactcttccccgacggttgttgagcccttccctcccctaatctggagaagtcagcctcttggctcctcaggccaccatttaggcctggcctgactggggtaagaaatgtcgctccactttaccagaggtagctgtggtgttgaaacactgggacttgggatatggggtgctgggatcgattcctaagctttaccactaactaggctgttgtgggccttgagtaaatcccgttacctcttctgaggccttcggttacccctgtctgtaaaaaaagggagggtgaggaataccttaccttcacgggaactgttggggaggcttcagatggagatggctatatgtggaaaacattcctgtcaaaccttccgtacaaatgtgaagtattaaatattatcgcaagtattcattgttgttattaattattgttattattaaccaatccttgggtgggtagtaggagagcaaaaagtatgaaatgggatggagctaagaagtctgaatactttangtacttaatgaaatggactttttggaaagaaatcagatgaaggcataaaaatttagttcttagcncttcttgaacagaagcctaaaattcctggttctctcagggcttcgccttcaagggttctggaggagggaagggtctgcaggttccattgggtgacagcctgagatctgtcccttcaacgggcttgggctgggtatgtgcctaccgatgacaactgtgtaaataaatgcgtgttcacacccacaaaaaaaa

SEQ ID NO: 153740 - DNA, 441 bp, Homo sapiens; identical to SEQ ID NO: 147014
  misc_feature (1)...(441): n = a,t,c or g

SEQ ID NO: 153741 - DNA, 1229 bp, Homo sapiens; identical to SEQ ID NO: 147015
  misc_feature (1)...(1229): n = a,t,c or g

SEQ ID NO: 153742 - DNA, 579 bp, Homo sapiens; identical to SEQ ID NO: 146889

SEQ ID NO: 153743 - DNA, 2646 bp, Homo sapiens
aggatccttaattaaattaatccccccccccccctcccccgttctttctcgactccatctttcgcggtaagctgggaccgccggtttagttcgccaataatgcagcctctttgttccgcgtcccaggagcttacacactcttcgagggtgaccggccaggaaacgggtcgccccagatcaaaggctcatgtagcctcaacatggagggcatttcccccggaagatcaagtcgtgctcctggcaggcgcgccccctggaggatgaggccactctgggccagtgcggggtggaggcccttactaccctggaagtaaccaggcccgcatgcttggaggtaaagtccatggttccctggcccgtgctggaaaaagtgagaggtcagactcctaaggtggccaaacacggagagaagaagaagaagaagacaggtcgggctaagcggcggatgcagtacaaccggcgctttgtcaacgttgtgcccacctttggcaagaagaagggcaccacgttcaccaagatcttcgtgggcggcctgccgtaccacactaccgacgcctcgctcaggaagtacttcgagggcttcggcgacatcgaggaggccgtggtcatcaccgaccgccagacgggcaagtcccgcggctacggcttcgtgaccatggccgaccgggcggcagctgagagggcttgcaaagaccctaaccccatcatcgacggccgcaaggccaacgtgaacctggcatatctgggcgccaagccttggtgtctccagacgggctttgccattggcgtgcagcagctgcaccccaccttgatccagcggacttacgggctgaccccgaactacatgtacccaccagccatcgtgcaggccaccgtggtgatcccagccgcccctgtcccgtcgctgtcctcgccctacattgagtacacgccggccagcccggcctacgcccagtacccaccggccacctatgaccagtacccatacagccgcctcgcctgccacggatgcgcagcttcgtgggctacagctaccctgccgccgtgccccaagccctctcagccgcagcacccgcgggcaccactttcctgcagtaccaggcgccgcatgtgcagcctgacaggatgcattgaggggcgtatctgccccgaggactgtggcattgtcacctttacagctgacagagctgccaggtcattgagggctcgtgcaacagccccggttagactttcatggaggtgccaccagcacccgtgacctccgaagaccgctcgggcattccgcctgcgccctgggacagcggagagacggcttctctttaatctaggtcccattgtgtcttgagggaggacttttaagaatgactgagaactatttaaagacggcaatcccaggttccttgcacaccatgggcagcctctccttgcaccttctcctgcctctccacactccaggttccctcaggcttgtgtccccactgctgcatcggggcggggtgtcacagaccctctgcagcccctggctgccctggactgtgcagagatgcctgactccagggaaacctgaaagcaagaagttaatggactgtttattgtaacttgatcctcccgagctgtgagcgcagtctgaggtgtgaggacacggcctcctgttggagtcccattttctccatcagggcacgtgggcggcttcctcaagcccggaggagcttcccaggcgcacaggggccgccggttaacagggggccgcccgcaaaaggccccttttccagttcatagcactgaagttgcaactttttttttgtaattgttttgctactaagataatttcagaagttcagtctattttttcaagcggatactgccgccaccaagaatccaaaacctatttttgacttgggagagacttgcttttgttggttccgcccgtggagacgacgatagtgtttctgtataataaagtgtctgccggctcgcgggccaggatcctctcggtgggatgggcaccacagacaggaggcccctcaggcccgtgcgggccactgtctgctgccgcctgccggggtggcagagtgagttgtctcaggaccccgtcactgcgacgttgacactcctctcccttcccttcctccccaactccccaaacactgtggaaggggagaaggaagtgatccacagcattcaggccacttggggtctagaccatggtggtgccagcctggggggggcagtggccctcagctctgcccgctggagcggttgagtgcagaagggtgcgcctcttcccctctacccccgcaccacctgctgtgtgccagcctgagacggttcctgcctgtcttgggggttggtggagggtggaggcagtttttcccacccgtggcagggctgctaatggggcatccagggcctgtgggggtctggaggaggggacatgaggtgagaggtatcctggccgagggcggggggctgcgggggatcctcctccggacctacctcagggagctgagcgtgcaggcgctccagggcaggcctgggacagagtcaaggctcagagaataaaggtagctaatctcatcataatatttttattagaatgttctgatgataaaaataaaacttgttttctttaaagaaaaaaaaaaa

SEQ ID NO: 153744 - DNA, 461 bp, Homo sapiens; identical to SEQ ID NO: 139517

SEQ ID NO: 153745 - DNA, 465 bp, Homo sapiens
gtggccccagaaaagtcagtgtgtaggcctcagccacttcaggtccggcgtacattctccctggacaccatcctcagctcctaccttctgggccagtggccacgagatgctgatggggccttcacctgctgcaccaatgacaaggccacccagacgcccctgtcctggcaagagctagaaggtgagcgtgccagttcctgtgcacacaagcgctcagcatcctggggcagcacagaccaccgaaaagagatttccaagttgaagcaacaactgcagaggacgaagctgagccgcagtgggaaagagaaggagcgaggttcaccactcctaggggaccacgcagtgcggggagcacttgagggcgtcccctcccagcttcccctcagggtcccctgtcttgcgactcagcccctgcttgcacaggagcctggaagggctcaaccaagagctggaggaggtatttgt

SEQ ID NO: 153746 - DNA, 2322 bp, Homo sapiens
ggacacccagcctttcttgaagatggcagcccatctccagtccttgcctttgctgcctcccctcgacctaatcatagctacatcttcaaacgggagcccccagaaggctgtgagaaagtgcgtgtgtttgaagaagccacaacaagaggaaagtatggggaaggagccaagcaggagacgttcacctttgccttaactttggtcttcattcaatgtgtgatcaatgctgtgtttgccaagatcttgatccagttttttgacactgccagggtggatcgtacccggagctggctctatgctgcctgttctatctcctatctgggtgccatggtctccagcaattcagcactacagtttgtcaactacccaactcaggtccttggtaaatcctgcaagccaatcccagtcatgctccttggggtgaccctcttgaagaagaagtacccgttggccaagtacctgtgtgtgctgttaattgtggctggagtggcccttttcatgtacaaacccaagaaagttgttgggatagaagaacacacagtcggctatggagagctactcttgctattatcgctgaccctggatggactgactggtgtttcccaggaccacatgcgggctcattaccaaacaggctccaaccacatgatgctgaacatcaacctttggtcgacattgctgctgggaatggctgttagttgcccagaccaagggcctgaattagttccaagatgcccttttgttcaagcccttgagaaaccttcctggaaaaacctgcaccagcaggatttgtttgctacttgttactggcacaatgaaggagagtcgtgtgtcagttgtcatgggaagacactcagtagtaaaacacagggaggaatcctgttcactggggagctctgggagttcttgagctttgctgaaaggtaccctgccatcatctataacatcctgctctttgggctgaccagtgccctgggtcagagcttcatctttatgacggttgtgtattttggtcccctgacctgctccatcatcactacaactcgaaagttcttcacaattttggcctctgtgatcctcttcgccaatcccatcagccccatgcagtgggtgggcactgtgcttgtgttcctggggtccacccagataatcttggataatctcaagatccttaatacatctgcaaaaacgttactatacaagacgcccctgtcctggcaagagctagaaggtgagcgtgccagttcctgtgcacacaagcgctcagcatcctggggcagcacagaccaccgaaaagagatttccaagttgaagcaacaactgcagaggacgaagctgagccgcagtgggaaagagaaggagcgaggttcaccactcctaggggaccacgcagtgcggggagcactgagggcgtcccctcccagcttcccctcagggtcccctgtcttgcgactcagcccctgcctgcacaggagcctggaagggctcaaccaagagctggaggaggtatttgtgaaggagcagggagaagaggagctgctgaggatccttgatatccctgatgggcaccgggccccagctcctccccagagtggcagctgtgatcatcccctcctcctcctggagcctggcaaccttgccagctctccttccatgtccttggcatctccccagccttgtggcctggccagtcatgaggaacatcggggtgccgccgaggagctggcatccacccccaacgacaaagcctcctctccaggacacccagcctttcttgaagatggcagcccatctccagtccttgcctttgctgcctcccctcgacctaatcatagctacatcttcaaacgggagcccccagaaggctgtgagaaagtgcgtgtgtttgaagaagccacgcaccaacggagagacagcttcgatataagggaaaaagtggctgaactcaggaagaaaagaaattctggactgagcaaagaacagaaagagaaatatatggaacacagacagacctatgggaacacacgggaacctcttttagaaaacctgacaagcgagtatgacttggatcttttccgaagagcacaagcccgggcttcagaggatttggagaagttaaggctgcaaggccaaatcacagagggaagcaacatgattaaaacaattgcttttggccgctatgagcttgatacctggtatcattctccatatcctgaagaatatgcacggctgggacgtctctatatgtgtgaattctgtttaaaatatatgaagagccaaacgatactccgccggcacatggatggatctggcagtctttga

SEQ ID NO: 153747 - DNA, 1617 bp, Homo sapiens
atggctctcccggctgcctgcctcagccccactgcgagactcacacagccccccaacccccgaggccgctgcttatctgctgtacggggcggggaccggccccctcatcctagagctgtcattggactgcggaaacccagaccttccaccccagccaatccacagcttagccttccctttcctgaggatgattggtcgatgagcctagcgatccaagccaagaccccaccctcacaccgcccccttcggttttccaacatcccaggggctgctgattggcctgtacagaagagggctggttctccagcgccaccaatgagaagacgcagaataggggagcgtcacacccagtcccagaacgctccagacgctgagaggcaggaggcactagggatcgtccgcaggattgggactgatacagaggccgccacggagcccgccggagccaccgttcctgctgctgccgccgctgcccgaatcggaaccgtcgggccgcagccgccggcaatgccgcgaaggaaggctgcttcaaattcttttaggacagtggtggatatgagtgaagacggggcaggcaggccacatctcttagaagaggaaggtgattgccacgtctccttcctccatgctgatggcaaggcgtgcgggctgtgttctcttgcagccagcgtcccatgctcggtggccccagaaaagtcagtgtgtaggcctcagccacttcaggtccggcgtacattctccctggacaccatcctcagctcctaccttctgggccagtggccacgagatgctgatggggccttcacctgctgcaccaatgacaaggccacccaggcctatgtgactgtctctaggagacagtgctcagtgtctcctgccacacgcgtcctggtgccaggtggctggacacccagcctttcttgaagatggcagcccatctccagtccttgcctttgctgcctcccctcgacctaatcatagctacatcttcaaacgggagcccccagaaggctgtgagaaagtgcgtgtgtttgaagaagccacgtctccagggtcctgaccgggcctttcctgacttcctgtcctgacaaggaacaaagtccattttcaacccgactggctcagccttctgccccgtcaacctgatgaagcccctcttccccggcatgggcttcatcttccgtaactgcccctcaaacccggggatctcctcttcccccggccagccccaggccaccacctcggaaggatccggaagcctccaaggcctccccactgccattcgagccatggcagtggcaccccaccttcagatgagcctgtgcttttccagagctccctgatggtctgagggtcccaccccatgccccactttaccatagagaccagtgccttggtggcaggtccctccccaggtcccctgagatggggtatggaggggcccttccctctcggccttcgagcactttctttcacttactgtgtcaaagccctggggtcctcttttttgatgggcaccggcccctctgaacgtgatgggaactggccttctccaatagtagctgggcagctcacaattcacacctgtgtaactggcaaaatcctcaattgggtgga

SEQ ID NO: 153748 - DNA, 498 bp, Homo sapiens
  misc_feature (1)...(498): n = a,t,c or g
tgggtggcccaggggnnnattgaaattgatccactatccgngaggcggaattctagaggagttggagagaaggcgcaaagaagaagaggagaggagacgggcagaagaagaaaagaggagagttgaaagagaacaggagtgccgatggcgggagatggaggagcaccggcaggcagagaggctccagaggcagttgcaacaagaacaagcatatctcctgtctctacagcatgaccataggaggccgcacccgcagcactcgcagcagccgccaccaccgcagcaggaaaggagcaagccaagcttccatgctcccgagcccaaagcccactacgagcctgctgaccgagcgcgagaggttcctgtgagaacaacatctcgctcccctgttctgtcccgtcgagattccccactgcagggcagtgggcagcagaatagccaggcaggacagagaaactccaccagtattgagcccaggcttctgtgggagagagtgga

SEQ ID NO: 153749 - DNA, 392 bp, Homo sapiens
tccggggaacgcttcagagtgagatcatcatccaagtctgaaggctctccatctcagcgcctggaaaatgcagtgaaaaaacctgaagataaaaaggaagttttcagacccctcaagcctgctgtaaggattgtgcaggatcagttttacttatttcagacttgaatgagatctttctattaaaaatatgtggttgagaggcctgcagtcttttctgcgagggcccctcacagatttgaggaattataaggaatgacctaaaccccagacatacttgttcccttccattggtatcgtctgctttccctgtataaagtctcaagtgagtaaaaccttttttctgttgttccagccatacacttggtgtacagtcagccttacaaaattatgca

SEQ ID NO: 153750 - DNA, 438 bp, Homo sapiens
ggcacgagcggcacgagtttttctccataggtcatctctgaatttgagcaatggtgaaacggaatctgtgaaaaccatgattgtccatgatgatgtagaaagtgagccggccatgaccccatccaaggagggcactctaatcgtccgccagactcagtccgctagtagcacactccagaaacacaaatcttcctcctcctttacaccttttatagaccccagattactacagatttctccatctagcggaacaacagtgacatctgtggtgggattttcctgtgatgggatgagaccagaagccataaggcaagatcctacccggaaaggctcagtggtcaatgtgaatcctaccaacattaggccacagagtgaccccccggaaattcgtaaatccggaaagggttaactttaaattttgggggctggcttatgggg

SEQ ID NO: 153751 - DNA, 1558 bp, Homo sapiens
ttcgagcagtggaagatgtacggccttctcacaaagtaacggactactcctcatccagtgaggagtcggggacgacggatgaggaggacgacgatgtggagcaggaaggggctgacgagtccacctcaggaccagaggacaccagagcagcgtcagtccccggtctcttttagagcggatgagagtattctctcagagcctgctttccactgggacctagttgttcctagactattccgtgaccccatgagcacttactatgtagttctcgtggattcagcagcaggtcgccttgtgtttccccttctcttcgttggtgtgtgcatatgtcagtgcttcccccagcaccccaggcgtgtactttattttttccttttgatttgaggatatatgaaaccaggtttttatttttgtttggtataactactttaattagtcataattattcattctaagtttttgctcacaaacaaatggcactggaaagaaattctttgttaaagggagaaagctaagcagttgcttttttggaggaggctttatatcggcagcctcatctcatgttttgattttgagaaggcgaaaagcctaaacaggatctccttgactccagagattaaggcctttcacgtctggattttttctccataggtcatctctgaatttgagcaatggtgaaacggaatctgtgaaaaccatgattgtccatgatgatgtagaaagtgagccgggcatgaccccatccaaggagggcactctaatcgtccgccaggtacccgtgtcttctctgttgtcagaggctgagcttctcctgtggtcattaacccacttgctcattcactcactcatgctgtttctccatcatcatctgttttcatgttaacaagtcccagagggtcaagtgtcgagtgtcgggggctagggaggcaggtgtgtactgcatgcccagaaggtagcgagtagtctccaccccacatcgctgctcctctgcatgtctgcggcagccctcattcaagcaccgcgctgagtctcacagtctatgtctgagcgggagagaagcccacagggagtccttaaacaggctcacagagtgaggaagccaggtctggagtctggcagagccagccaccatggctctgcagagccacgctgggctctgagtgtctgcagtgccacagtgggagcgggtgaggcaggcaggacgagcctcatcacaggcccagagactcggagagcagaagggttcgggaggtttctcttctatgttccaaaatgttagttttctcacttgttgaataattaaatgtgtgccacccagatatgctcagtttggatcactaagctttataactgtctgttcatttcttagcttagacttaattaaagtgatacgcttctcatttaaatagaacagggcacctatttagtattttggactttgccctaagtgtgtttcatgctatggcaatgcattcggatggaaagtaggaagaatgtggaaaagaccaggattcagagaatccacaggtactttctggagctttgcaaagaaagattt

SEQ ID NO: 153752 - DNA, 4979 bp, Homo sapiens
acggaggacatcagcagtgtctcgaggccttcttttcatgtctttcgttcagccactcctgcagcctccagtccacctcctcacagcacgcgtgcgtgtccctgggtacttgcagatagatggagtaaagattaaggaacacaatggcaagttaatgaactgttttaagaccaaaatgacttactacagctttatgaaatgtgtaggcctccctgcacaactgaccattggtttcagtggcccaagcagggaaactggcagtgaccctcgagcagcaaggaggggagaggaccctcagtccaaggacagaggagatggactgtctgaacaaaccgaggctcagagaagtggagtgcattgcccgaggtcacagttagtgggagagctggccgggcagtcccctcgcactatccctgcggctctccgtgtctgcctttacctcctatgcatcacgtcctataatcacacttcaaaggatgagtcctctaaggatgaagaggaagaaatcaaactggagataaatatgctaaagaaatactctcatcacagaaacattgcaacatattatggtgctttcatcaaaaagagccctccaggacatgatgaccaactctggcttgttatggagttctgtggggctgggtccattacagaccttgtgaagaacaccaaagggaacacactcaaagaagactggatcgcttacatctccagagaaatcctgaggggactggcacatcttcacattcatcatgtgattcaccgggatatcaagggccagaatgtgttgctgactgagaatgcagaggtgaaacttgaccaccaccaccatccaattgggtgggatgcagaagtcactgaaaaatcagcagaagttccaagtgctttaggttctctgaaagcactgaaggttgtggttcattcaaaaggccctctgctggtcactgttggagaagctggggaggcagccagatccaggcctcacagaagcttccagactgttgactttggtgtgagtgctcagctggacaggactgtggggcggagaaatacgttcataggcactccctactggatggctcctgaggtcatcgcctgtgatgagaacccagatgccacctatgattacagaagtgatctttggtcttgtggcattacagccattgagatggcagaaggtgctccccctctctgtgacatgcatccaatgagagcactgtttctcattcccagaaaccctcctccccggctgaagtcaaaaaaatggtcgaagaagttttttagttttatagaagggtgcctggtgaagaattacatgcagcggccctctacagagcagcttttgaaacatccttttataagggatcagccaaatgaaaggcaagttagaatccagcttaaggatcatatagatcgtaccaggaagaagagaggcgagaaagatgaaactgagtatgagtacagtgggagtgaggaagaagaggaggaagtgcctgaacaggaaggagagccaagttccattgtgaacgtgcctggtgagtctactcttcgccgagatttcctgagactgcagcaggagaacaaggaacgttccgaggctcttcggagacaacagttactacaggagcaacagctccgggagcaggaagaatataaaaggcaactgctggcagagagacagaagcggattgagcagcagaaagaacagaggcgacggctagaagagaagctgctggaggatgtgttccagcaaagtaagaaagaagatgacaaggattcccgggaagtttgtggacagaaatataggatgactggaaaacagtcagtctccaaaaataaagaaagaatacctgatttcttcaactgtgttgaaaggagtgttatgcaacaaaggagagagcgggaagctagaaggcagcaggaacgtgaacagcgaaggagagaacaagaagaaaagaggcgtctagaggagttggagagaaggcgcaaagaagaagaggagaggagacgggcagaagaagaaaagaggagagttgaaagagaacaggagtatatcaggcgacagctagaagaggagcagcggcacttggaagtccttcagcagcagctgctccaggagcaggccatgttactggagtgccgatggcgggagatggaggagcaccggcaggcagagaggctccagaggcagttgcaacaagaacaagcatatctcctgtctctacagcatgaccataggaggccgcacccgcagcactcgcagcagccgccaccaccgcagcaggaaaggagcaagccaagcttccatgctcccgagcccaaagcccactacgagcctgctgaccgagcgcgagaggtggaagatagatttaggaaaactaaccacagctcccctgaagcccagtctaagcagacaggcagagtattggagccaccagtgccttcccgatcagagtctttttccaatggcaactccgagtctgtgcatcccgccctgcagagaccagcggagccacaggacccatgtccaccttcccgcagtgaggtgctcagtcagagctctgactctaagtcagaggcgcctgaccctacccaaaaggcttggtctagatcagacagtgacgaggtgcctccaagggttcctgtgagaacaacatctcgctcccctgttctgtcccgtcgagattccccactgcagggcagtgggcagcagaatagccaggcaggacagagaaactccaccagcagtattgagcccaggcttctgtgggagagagtggagaagctggtgcccagacctggcagtggcagctcctcagggtccagcaactcaggatcccagcccgggtctcaccctgggtctcagagtggctccggggaacgcttcagagtgagatcatcatccaagtctgaaggctctccatctcagcgcctggaaaatgcagtgaaaaaacctgaagataaaaaggaagttttcagacccctcaagcctgctggcgaagtggatctgaccgcactggccaaagagcttcgagcagtggaagatgtacggccacctcacaaagtaacggactactcctcatccagtgaggagtcggggacgacggtatgaggaggacgacgatgtggagcaggaaggggctgacgagtccacctcaggaccagaggacaccagagcagcgtcatctctgaatttgagcaatggtgaaacggaatctgtgaaaaccatgattgtccatgatgatgtagaaagtgagccggccatgaccccatccaaggagggcactctaatcgtccgccagagtacagttgaccaaaagcgtgccagccatcatgagagcaatggctttgccggtcgcattcacctcttgccagatctcttacagcaaagccattcctcctccacttcctccacctcctcctccccatcctccagccagccgacacccaccatgtccccacagacaccccaggacaagctcactgctaatgagactcagtccgctagtagcacactccagaaacacaaatcttcctcctcctttacaccttttatagaccccagattactacagatttctccatctagcggaacaacagtgacatctgtggtgggattttcctgtgatgggatgagaccagaagccataaggcaagatcctacccggaaaggctcagtggtcaatgtgaatcctaccaacactaggccacagagtgacaccccggagattcgtaaatacaagaagaggtttaactctgagattctgtgtgctgccttatggggagtgaatttgctagtgggtacagagagtggcctgatgctgctggacagaagtggccaagggaaggtctatcctcttatcaaccgaagacgatttcaacaaatggacgtacttgagggcttgaatgtcttggtgacaatatctggcaaaaaggataagttacgtgtctactatttgtcctggttaagaaataaaatacttcacaatgatccagaagttgagaagaagcagggatggacaaccgtaggggatttggaaggatgtgtacattataaagttgtaaaatatgaaagaatcaaatttctggtgattgctttgaagagttctgtggaagtctatgcgtgggcaccaaagccatatcacaaatttatggcctttaagtcatttggagaattggtacataagccattactggtggatctcactgttgaggaaggccagaggttgaaagtgatctatggatcctgtgctggattccatgctgttgatgtggattcaggatcagtctatgacatttatctaccaacacatatccagtgtagcatcaaaccccatgcaatcatcatcctccccaatacagatggaatggagcttctggtgtgctatgaagatgagggggtttatgtaaacacatatggaaggatcaccaaggatgtagttctacagtggggagagatgcctacatcagtagcatatattcgatccaatcagacaatgggctggggagagaaggccatagagatccgatctgtggaaactggtcacttggatggtgtgttcatgcacaaaagggctcaaagactaaaattcttgtgtgaacgcaatgacaaggtgttctttgcctctgttcggtctggtggcagcagtcagctccagaattccttgtctctgaatgactctgtcttgtgggtgtctgacagtggcgacgatgaacatgccgttggttttattggcagtgggcacaaggaggcttttcataagatgaaacatgccacagtgaacacactcgtgtacatatcaagagaagaaggaaaggcacaggtggagaacagtaaaaggcctggtaggcatgatcgccgtcgggcaaatctggggccatgctctcagtgttggcacctcgccttagtctccagggctgcccgtgctgcatcatcatcaattaggcatattaataaaccacttcgtgtttcatcctag

SEQ ID NO: 153753 - DNA, 505 bp, Homo sapiens; identical to SEQ ID NO: 147039

SEQ ID NO: 153754 - DNA, 1791 bp, Homo sapiens; identical to SEQ ID NO: 147040

SEQ ID NO: 153755 - DNA, 460 bp, Homo sapiens; identical to SEQ ID NO: 147041
  misc_feature (1)...(460): n = a,t,c or g

SEQ ID NO: 153756 - DNA, 423 bp, Homo sapiens; identical to SEQ ID NO: 147042

SEQ ID NO: 153757 - DNA, 499 bp, Homo sapiens; identical to SEQ ID NO: 147043
  misc_feature (1)...(499): n = a,t,c or g

SEQ ID NO: 153758 - DNA, 1179 bp, Homo sapiens; identical to SEQ ID NO: 147044

SEQ ID NO: 153759 - DNA, 495 bp, Homo sapiens; identical to SEQ ID NO: 147045

SEQ ID NO: 153760 - DNA, 1420 bp, Homo sapiens; identical to SEQ ID NO: 147046
  misc_feature (1)...(1420): n = a,t,c or g

SEQ ID NO: 153761 - DNA, 861 bp, Homo sapiens; identical to SEQ ID NO: 147047

SEQ ID NO: 153762 - DNA, 800 bp, Homo sapiens; identical to SEQ ID NO: 147048
  misc_feature (1)...(800): n = a,t,c or g

SEQ ID NO: 153763 - DNA, 592 bp, Homo sapiens; identical to SEQ ID NO: 137744

SEQ ID NO: 153764 - DNA, 405 bp, Homo sapiens
tgcacacacatgctgcatcctgggtaacacatcactaatattgatccatctgctatcaacaaaagtggccaggaaacctggccccatggagtggggcttgggacagccctactgggaaggggtccatcagccatgctgtggggggccctgggccctgaccttagcaggttatgggcagctgtctcggagctcagggcgcagccagcacacacaggagcccacaggacagccacgtcttcacagaaactacagaagtcaggacccaggcgaggacctcaggaacaagtgccccctgcagacagagagacgcagtagcaacagcttctgaacaactacataataatgcggggagaatcctgaagaccactgcatcccacaagcactgacacccacttcaggatttta

SEQ ID NO: 153765 - DNA, 488 bp, Homo sapiens
  misc_feature (1)...(488): n = a,t,c or g
gcggccgcagcggcgcagctgatagcaggaacaggatcaagtcttccataccagggaccaggccaaaaccagactgccactgcccctacttgggccccactgtccccagaaagcagctgctgtgatcatgggcaatatctttggaaaccttctcaagagcctgattgggaagaaggagatgcgcatcctgatggtgggcctggatgccgcaggaaagaccaccatcctatacaagctgaaactcggggagatcgtcaccaccatccctaccattgggttcaatgtggagacagtggttgctgtcctcttggcatctgagtcctttccctgtccccacaagcccttctactccctgtttgcctttcctttgccaccctctccctgttttacatggaaattgcacgggcctctctgtgtntgcgtgcatgtgtgcgcctgtatatacatgtatagagagatatatntgtgggggcccgggggaagcgcgg

SEQ ID NO: 153766 - DNA, 3567 bp, Homo sapiens
  misc_feature (1)...(3567): n = a,t,c or g
atgtccaaccccnccgaacccagcagccaatcgaagcccggcaaggagcagggtgaaggggccacggtctttccttccccttgtcaaaagcggctgtcgagcagtcgccttttacaccagcccgacgggggccgcgggggcgaagctgagggcgggaggccgggggactccacactggaggagcgcactttccgcatcttggggctcccggcccccgaagtaaacctgcgggacgcccccacgcagccaggtagcccagagcaccaagccttaggcccagcagcttcgggagcccagggcagagccgaggggtcggaagtggcggtggtccagcggcgcgccggccggggctgggcgcggaccccagggccatacgccggggccctgcgagaagccgtgtccggtatccgccgccacacagcccctgactcggacacggacgaagctgaggagctcagcgtccatagcggctcctctgatggaagcgacacagaagccccgggcgcctcctggcggaatgagaggaccctgcccgaggttggaaacagttcgccagaggaagatgggaagacagcggaactgagcgacagtgtcggggagatcctagatgtcataagccaaaccgaggaggtcctcttcggggacaagagcagccttgtggggttgcccccaagcaagctgagtggccccatcctggggccagggtccttccctagcgatgaccgactctcccggccacctccaccagccacgccttcctctatggatgtgaacagccggcaactggtaggaggctcccaagctttctatcagcgagcaccctatcctgggtccctgcccttacagcagcaacagcaacaactgtggcagcaacaacaggcaacagcagcaacctccatgcgatttgccatgtcagctcgctttccatcaactcctggacctgaacttggccgccaagccctaggttccccgttggcgggaatttccacccgtctgccaggccctggctgcaactgtgctgaaagctgctgcttcttctgcagctccttcttctcatgctccaacaggtcctcaatgagcaggggtaactcgctggctaccagtgagctctccatcttgtctagctcatccccagatgctgcaggtccaccaggcaaggtcaaagccccactctcgagctcaaacttttccagcagggaggatcctcctgggccactcagtgggctgggggtcagcagtttctgtgaagacgtggctgtcctgtgggctcctgtgtgtgctggctgcgccctgagctccgagacagctgcccataacctgctaaggaaacctgggaatgactctaagatgttggtttgtgagacgtgtgacaaaggataccatactttctgcctaaaaccacccatggaggaactgcctgctcactcttggaagtgcaaggcgtgccgggtgtgccgggcctgtggggcgggctcagcagaactgaatcccaactcggagtggtttgagaactactctctctgtcaccgctgtcacaaagcccagggaggtcagactatccgctccgttgctgagcagcataccccgcctcgcatgctgaggctattcctccagtctcgttctccaggtgaatgcatgcaggctgtggagcctcttcacagaggacgattggagcaggcagccgatgaaggctttgactgtgtctcctgccagccctacgtggtaaagcctgtggcgcctgttgcacctccagagctggtgcccatgaaggtgaaagagccagcattttctgagagcctgctccacgccaaacttgtcgggtatacagagctaaatcagctaaatcacctccagcagctcatggtccagcaggggattccacaagcggatgcagtggtgcagtatgacgtggagctgattgcactaatccgagccaactactggctaaagctggtgaagggcattttgcctctgaaagaaaaaatggccaagacgcccctgtccgatgagaagcagctgcttctgtttcagcagaagttgctggcagaggaggagatggccaaaaagaaggagaggctcctcagccagttcttgaagaataacctgagtaacccgccgacaccaccctcgtcgctgccccccaccccacccccatcggtgcagcagaagatggtgaatggcgtcaccccatctgaagagctgggggagcaccccaaggatgctgcctctgcccgggatagtgaaagggcactgagggagactagacgcttttcgactgcaggaactggatttcgtctcctcttccacaatgcccatgcaaacagtagagcctggttactgccggcacctttggatcctcggccaattctctgcttcgcctacacttggcgtgcggtgtaccagcctccccgcgtcaccatggaaacaggagcctctgcatccatcccagagctgatctgtgaagctatgagaagaatctggagctcgtcgcccgcgctggacggctgcgagctgctctgctgcggcaggggccaccgcacgcgcacgcagcgcgtcaccgagcgctgcaactgcaccttccactggtgctgccacgtcagctgccgcaactgcacgcacacgcgcgtactgcacgagtgtctgggtattgtgaacgtagcctcctccacgaacctgcttacagactccaagagtctgcaactggtactcgagcccagtctgcagctgttgagccgcaaacagcggcgtctgatacgccaaaatccggggatcctgcacagcgtgagtggggggctgcagagtgccgtgcgcgagtgcaagtggcagttccggaatcgccgctggaactgtcccactgctccagggccccactcttcggcaagatcgtcaaccgagccccagcactgtggaacttattatctcccaccctctcacagcttgtttgatgctgtctcttcattaattcggaacaagatccacaggctgccagttattgacccagaatcaggcaatactttgtacatcctcacccacaagcgcattctgaagttcctcaaattgtttaaagcagctgctgtgatcatgggcaatatctttggaaaccttctcaagagcctgattgggaagaaggagatgcgcatcctgatggtgggcctggatgccgcaggaaagaccaccatcctatacaagctgaaactcggggagatcgtcaccaccatccctaccattgatgaagaaaataaagagagaagacaagcaattttacaagaaacatgcaactggccccataccctgaacagcaccagcatgtctaaggcatatcagagcaccttcacaggcgagaccaacaccccctacagcaagcagtttgtgcactccaagtcatctcagtaccggcggctgcgcaccgaatggaagaacaacgtgtacctggctcgctcccgtatccagggcctggggctctatgcagccaaggacctagaaaagcacacaatggttatcgagtacattggcaccatcattcggaacgaggtggccaaccggcgggagaaaatctacgaagagcag

SEQ ID NO: 153767 - DNA, 15722 bp, Homo sapiens
ttagttcatccatttccgacaattccaggctccacagtggcaggggatcttgtgctgatcgtcctcaaaatcaaactgatagtcataggttagctcctctcctttggggattcgccggctggagatgatgatgattttgtcctctttgtcaaatgtcacgacttcggccacacagttaggggcacaggaatggttaatgtacctggcagggccgccggtcaacgtagcatcaatcacatgttcattgtttattcggaacatgtagatgcctcgattctgctcttcgtagattttctcccgccggttggccacctcgttccgaatgatggtgccaatgtactcgataaccattgtgtgcttttctaggtccttggctgcatagagccccaggccctggatacgggagcgagccaggtacacgttgttcttccattcggtgcgcagccgccggtactgagatgacttggagtgcacaaactgcttgctgtagggggtgttggtctcgcctgtgaaggtgctctgatatgccttagacatgctggtgctgttcagggtatggggccgtttgtagtgtgtgaggattttaggctctgatcgggcacagccagtggggttgatcatgagtggcagctccataagggggtggcgcccatagcggaataaatagttttgacagctctccaccccgggcagtgattcagctatgcgaagcacggcatgcaccgtcagcccaaagagctcctcgcccttcagatactcagggaagagtcgcagcatgtcagcctcttttctcatggcagccacaggctcaatgatgcgattccacacggcctggggagaggcgtcagtgaagaccaggtcctccaggccctgctcgatgactttgattacaaactccggccgcccgttgttctcaccaatagaacagcgatagcagcagcgacgattgttggtgcggaggctccaatagatgcgcgtggcctcgtagcccacgggatagagggcagtggcactatgaaagtcagccatctggtgaggcagcagctgtccgatggcgtggaacacaaggccccccacacggaacatgtgcagccgttctccccgctgaatgatgctagcgatttgcttcacctcgtcccgctcaatgtagacccgccggaagacagcaaaagagctcagctcttgctcacagggccccttgatcttatgcattggacacagcatggtcttgtccttgaagaacatgcacttggcacggatggcacaagcaaaatggtagacattggggcaacgcatgcgattgcagctgctggtggcaccagttcgctggcacagggagcacttggttagcagtcctcggtgcagggcaacctccacattcatcagtgccccgccctgggtctcatacacctccgtggaccaaagggcacagttgaggtgcacccacaggtccaggtccaggttcagcagacgggcaggcccatcagtggccccgtcaccctcctcatgacagaaacagcagcgacgcatgtctcgcggtaccttgtcaggtcgcaaggctgtgccaagctgctccataaactctgccacttcccgctcatcctcctgccgcccactgcccttctggatggtcagcagcagccgaagccgcttccagcgcactcctttccatttcttgaggcgaggaggacgggaatcttcaccttcttcagggggccgggcacggggcttgggtcgggctgattcaggggatgaggccagtggcagaggtgaggggacgggtggctcagccaagggttcggtgggaagttcaaccaagggctcagtagggggactggcaggagaaggtgccaagggggaagggggcggggagggttcttcaggaggtggggccgagagctgtcgcacatccagattggagacattgtaggtatagctgtgctgagtgggtggctctggggcggggctctcctgtttcaggaggctcaagatgtctagttggctcttcagggtatagccaggcaacactgcatcaaactgcttcagccaatcagggccagtgtctgggctcttgccttccagacccttttccttcccaccaggaccctcagcttcccccttctttggctcagtgcctgcccgggcggggctctctgggaacagcacctcataggagttggggatcttcatgctcagcagctccgccactgccaccatcacgccattcaggttcttggctgcagcagcagagactgtgagcatgactgacacctcacttcctttgcccttttcccaagttgtgacaggcagctttccagggacctccaggccaagggccccataaggtttggtatctgggaagactgggatgctggcccgaggaatgagggggatgacaggggagagggcccggtcctcttgctcccaccggcctgagcccagatgagggaaacgaggggcctcctcccccaagatgctctcaggggatgaagctggcacaatgctgtcaggagaatcgctatcctcatcactctccatcctgacatcctcagtctgattgtgagggggtgtaggcaaggcagccagcaggtctagactcttcacctctgaagtatccctcagtgccctttcactatcccgggcagaggcagcatccttggggtgctcccccagctcttcagatggggtgacgccattcaccatcttctgctgcaccgatgggggtggggtggggggcagcgacgagggtggtgtcggcgggttactcaggttattcttggtaagcagctgggaatagtagtcagggccagtgggcagcgccccacttccaaaggcccccctcagctggctctgcccattgactgggcagccactgccaaagggggcaaagaggctaaaattggcggtgatagcaggctccgttaggggcagcagggacagctcctgtttcagctgtttcagcaaggcctcgctggccctgaccccgtcctccttccgcagcttctttcgggagctcaccaacctgtcgcttgccttctgtacccgcttgggcttcggtgtcaaaggcttccttgctgctgcatcctccttgttgctgggggtaccctgtagtttctgctccagcccagccagcttgctgtcaatgtgcccgttgatctcagctcgcagcccctcggacccccgcccagtgctgagttgcacattctttgcccggagtagcttctgcaagagcagatgcccagcttctgagcgagggcctgccagcaggaggtggttgctggttcctggtgcccctattggctccccattggcctccctcttcactgactgggctcccagggcacatggctcttcccgaggttcctgcttgatgctgagttgggatgcctcaggcaccacctgtccattcacctggtccagatgcccaggtaccaggctgctctgctctggcttctgggtttctgctaggttgtctgggggatcccaaggtcccagacccttgctaaacaaggtatctgcaagctgggcagcagcaggtgagaccctcccaggaggcggctccaaggttggcccctgaggtttgggggtccctggatgggtgggagggagctgggcctcagtgggaagctgggagctgggggaaggtaattgtgaaggtctctttggctcttgagggctggatggtggaggtgtgggatggacagggccaaggactggtcctgtagataaggctcctggtggggcagggagccggggtgggccctgaggtcgaggccctgcccctagctcctggagggggcctgtctgtggtccagggaagcccccaagttgaggttggcagcccaggaggccctggaggggagaggtctgggtcccaggctcctggtagggtggggtctggcgtactgcctgactctgctgcagctgccgctgcatgaggagtgcctgtagctgctgctgctgctgaggacttaagtgccgcagctgtgggtttttggccaggactccttggagctgtgctcgaagctgacccaccgtaggcatgattccaaccccaggcagaccctgcccagactggaggacaggtcctggtttgggaggttgtggccctgtattattttgcatgggccgctctagcatgggctgttgggggcccagaaggttctgggtcatggacccaggctgatcccctaaggaaacagagggctgagccagcaggtggggcacagatgaggcctcagaagatgatccactgcctagctgcccatggcttcctccacctgctgtgtggagcaggctaacttgctgctgctgttgtcctggaagcctcagaggtggctgcagctgcagagagctgggctgaggctggggctggggttggacaagcaggagttgtgagtccccagagagtgagggctttacctctcctggttcagtggccattgactcaggggtagttcctattgctaacggccctccctgatgtgtagagggcccctcagtggcctctgaagaaacggctgggtctacggtgttttgttccttgcccgtcaggaggagggttggacccagggctccagggctagaaaagtgttgaagaggctttgctggcatgccagggccaagtgccacttgctgctgctgttgttgctgaggagacagtaaagttcgactctggtttaaaaggcccatctgctgctgttgctgctgctgttgaaactgctgctgttgttgttgctgttgctgttgtagctgctgttgctgctgttgaagctgttgctgctgctgttgttgaagctgctgctgctgttgctgctgttgaagctgttgctgctgaagttgctgttgctgttgtagctgctgctgctgctgctgctgaagttgctgttgctgttgcagctgctgctgctgctgaagctgctgtaaagagcccatgggctgagcgctcagtttgggctgcccactgtgtgacatcagactctgctgaagatgggacagccctgccatggacccttgctgttggtgctgttgttgctgctgctgctgctgggctgtgaccagcctgtgtcccataaggccctgaccctgctgtgccagctggggggaactgagcacccgggactgggtcataagcacctgtctgtgagggccctgggggcccaaagctccagggtgctgctgctgcaacacagccacctgggcagggcccagcatgccctggggcccctggggtggttgaggggacagctgctggaccaggaggccttggtggctgctgggaggcataaggccctggggcttgggacccagagcttggtttgtctgtactccaggaccctgctgctgttgctgctggattgccacctgtcctagaaggtgctgctgctgctgttgctgctgctgctgctgctgcagtttctgggccagctgcatacgttgctgctgcagctgcagctgcctttcctgtaaaagccttgaatcaggtccgaggcttcgaagagcaaggttgccagggaagaagccccctgaagggccagccagggatccagccccaccagaatgttgctgttgctgctgttgggccagagctgtattaaggaaggggccaccaggctgtccaggtagtgccatacccccaggggtcaggcgaagacctccggcttgcccacccggaggcccctgtggtggctgcagcccatggccagggagcagctgaccagggagcttggtgagcagccggggactctgggaagggctgagagccagcacagctgagtgctgttgctgttgttgctgctgctgctgctgttgttgctgctgcttgttccgatattctgccatgagattagtgtgctccttctgctgtttccggacctgatccagttgtttctggatcttgctctgctgctctgtaaccagcttgagcttctcagcatcagcttctgggaactcacggccagcttttttggcagtgcgctgcttggcacacagagccttccgggacttgcggtgtacaccaatctgctcctctagcaccttcagctgcatctgtaggagctgctgggtatggaacagccactcctcatactgccgctggtcagcttcatcaggtgccaccccaatgctgccctgagccatcactttcttgatgcctttcaaagccaccatcttggcctttgcaatgggatcaatgatatcttctgcagcaaatttgtccaggtctgtatctgggaagaagctgtttgccagctgctgctgcattgccaattgctgcggcttcatgcacatggaaggtggcatggtgcccatgggcttctgtgatagcactggctgtgagctctgctggggtaccaagcctgcctgccctccatgctgcccacttagcatatgcccttgattggacaccatagccatggatggagccaggcgttgctggagggcatgagctggtggctgggtgggcatcagtggctggggcaaacctggctgtcgggcacctgcaagacccagggaaagctgctgttgggacccagccaaactgggagaagagccctcatgtggcaaagacatggcctgggcagggcctggtgcagacagtagggaatgctgctgctgctgttgctgctgctgctgggcaggctgcaactgtgctgaaagctgctgcttcttctgcagctccttcttctcatgctccaacaggtcctcaatgagcaggggtaactcgctggctaccagtgagctctccatcttgtctagctcatccccagatgctgcaggtccaccaggcaaggtcaaagccccactctcgagctcaaacttttccagcagggaggatcctcctgggccactcagtgggctgggggtcagcaggtgagctggtggtcctcccgtggccccaaaggaggccttctcagctgtgtgcccactgctagaaaatggccctgtgcccatccgggtatcccggctgcccatcatgctctgtcctggctttagccccaggccaagggaattggcagcaggtgcgggctctaccttgggggtagcaatggtgaattggcaaggagaagggtggcgtccaccctcctccaccttgggcttcacctcagggagcacagatgccaggcggggttcagaggcatcagcagcagggggagggcgctcctcagggcccaagggtcctggctccaccccccgcagcagggcctcccgttcagccttctcattagccgattctaccagcctcaggtgctcattgaagatatccttcttgtccccagtgtccagctcaggatcagtatatgccagcaggtcaaactcgtctccattgagcaggtcatccaagtgggggtcattggtctccaggttttctaaggtgccaagttcatcatcacccttggccacatccacacccagacccaggtgagcaagctcttcatcatcctctagggccttgtgggcatcaaaatcgtcatccagctcgggatcctcacagggcaacttcccagcttccagggccagaggattggggcggccaagctcagtgctcgacgggggccggttgaccagctccaaaccagttggcagggtaggacccttggtgtggggtgttggatgaagactgttgttcaattcaggggccggtggggctgagggtttctgtgggggaagacctgataccgccaggccccgaagcccttcaggagccagtcggtgggggtcctcacttacagggtaaaaacggggtctctgaggtgggccctgaccaggaaacggagtgcccccaggtcccagtcctttctgtacattgtgccgcagctcaatgaactgggcaggaccagctggaccaggcactggctcaccagggcctggcagacgggtggaaattcccgccaacggggaacctagggcttggcggccaagttcaggtccaggagttgatggaaagcgagctgacatggcaaatcgcatggaggttgctgctgttgcctgttgttgctgccacagttgttgctgttgctgctgtaagggcagggacccaggatagggtgctcgctgatagaaagcttgggagcctcctaccagttgccggctgttcacatccatagaggaaggcgtggctggtggaggtggccgggagagtcggtcatcgctagggaaggaccctggccccaggatggggccactcagcttgcttgggggcaaccccacaaggctgctcttgtcctgtgtcccagcaaagggggtctggcctcgactcagctgctcaaaggcagggctgctgggctcagcaccccagctgcctggaggccccactgctcctgcagctgctgcagctgtttccttctcctgccgcagggtgttgcgctggatctgctgccgaatcagcagctctcgtagtcgctggcgctgccgttgcttctccagctctgtttggctaaggccggacatgcctgggtcctgggtacctgggagttcagctgtcgccaaagagctacccattccagtccctgggtcttctcgcttttcgacaggagaggtgatgcctgatcgctgtgaggctccatgggacaggtaggggagggatccgtcgggtgcaggtggtggcagaaccgacggagggcgtagtggggacagcccatagctctcccctgtggacccgctgctgggccccagggggctgcccgatgggtggaagttccctgtggctactgtgtagtttgtgctttgaggcttgcccaaggtggggccgggcccaaaatggctgttgatcccatggggtggcgggagaccaggctgagggacagggggctttagggaaggctcccctactgcctgagggaaagtgaaacgcatgggagagggggtgcccacaaatgcacccgtcccaggggaccggacaaaattggggggctgcccacttgggaccttggcatggagctcacctgctggccccgcgggcagggctgctgggaaccccccagcccccagcgaagtgtgggctagagacccagccttaaaggcaacttcagggggctggggtcggggtggcttatgcaatggggcaaatgggtcacgggactgagggcgtgagggtgggcgagaataagggtcaggggactggaagcgaggggtaacgggtgatgggcaaaaagcttcagcagacagaggccggggtgtcagtggagactgggagctggactgggactgaggactggcaggcactcgggagaaagggtcggagggcagtgagcgagggggcagagcacagcagctctcagggggcggaggttggggccgaggagtcaatgggggctgagcatatgggtcagtgtaggagccagggcgaaagatgtctgggtgacttggaggagaaggtgccaaagcctgggcagggggtggctcctggggccttaggcccaagcccgggctctggggctctacctgagatgcccgaggggtcaggggggctttgaagacatcaggtgtctttaactccaggccacccaggtgggtgcctgaggagggtgagtcaacaaagcccaggtttgggggcccatagctaggagaggatgccccaagctcttccttcttcacctctagggccttccgggactccccaaaaggtgggggcgagagcaggggctcggaagctttgcctccccctaccccagggctctcaggcacagccaagttatccagcgaggggcagcggggtttgaggaatgggtcaggtgtggagggctggtgtctgggggtgccaggtggggtagtgtggaattcccctggctggccagccccaggacgagatgaggcgcccagcatcgggggctgcgcaggggcccccgtaggactaggataggggggataggtgggcggtgccgtggggaagcggggctccaggggataggcaggggccagtccaaaggggtcctgcgaaggcacttgggcgggcacctggggtgggagcttgaggaagagctcaccaggcgagtcagggccaggcaccgagcccgccggcggcttcaggaacccgtccgcagaggtagacaagccggcgggggtagtggggctgccaatgaaaatggtgggggcagcagcggggggcgggctgcccagtgcccctggctgcgggggaatgcggagatgtagggccggtcggtcagtcttacgggctatgtcgcccaccttggtctgcttgttgatctggctctcagcctgcttctgcaccttgttgatgcggtgagctgcccggttatctttggccttttgcaggtagggggctttgtcagctgctggaacctttctccagagcttcatgatttgtttgcaacggcttgaccagtctgggtagtcttgcttgagattaggaaaattaatgttggcatagagcacaggtgagatggtggacagctggcccaactcctcatccttctcccagcgctgaagactccgctggttataggagagtccgtcgccctcaccctccgtggtgggggttgtgggggtggagggcgtggtgccacctgagcccgtccaggggctgtcgggctcaccgggttccgggctaaagaagcccccgcgctccctagaatccaggaacggggactggcagaggcctgggtaggagtccattgggctgctggagggcagattgcccaaagggagtccaccttgaagaaagggcctctgcagtggcgtacggctgccttctaggccaggggttccacaacccagatgctgttctcgttcagagcccagaacatccttgaagagctgctgcaggtccttggattccatcttgggcagttcttctgtggaaatcctgtctaagtcagagctaagcatcccttcacctggggtgcctggcttctcagggtcactgggcactggggatgccttcacgcccccatcctcaggtcctggtgtatcggctttgccctcgaggccacgggattcttcatctgcaatatctggaccatcatctcctttctgcgatgtggggagttccttcctttctgagcctccatctcccttggcttttggggtccctagtccaaagcttggccggcccaccccaactgcaaaaagggccttacggctcaggtccagcagctccttcccaaagaaggcttcctgcaagtaagcagggaacatgtcctccagtttgctcttcttgcgccctcgccgctgttgcttcttcttctcatccccttcagctaagctctgctccacggcgccctctgcaggcaggtcagcaggtatcaccgtctcaccctcgtcgggctgcccatccccactcaacacctccgcctgtgcagcaggcccctttttcgtgcgtgtgtgggatttccgctgtcgcaccatgaaaccaccaatgccaggccgatatggtttacgcttgcgttttttgctttcctcggtctcctctttgccaggctccacatcagggctgacggggccctccagtttaatttcgcactccatgtgctccacaccaccttcacccttgagcagctcatcggtgtccaggtccccatccttcttgtcatcagggccaagggcatctgagggctcagaaccctccaatcctgcctcgcctgggaggccaagccgtcctcgccgttggcgccgcttgtgcagtggtgacatggtcaggttacgcagcaaggccatgccagtttctgtcagccacacaccttcgaagcgaaagtactggggctctggctctttcaccttcatgggcaccagctctggaggtgcaacaggcgccacaggctttaccacgtagggctggcaggagacacagtcaaagccttcatcggctgcctgctccacatcgtcctctgtgaagaggctctcacagcctgcatgcatccaccgttcacagtggcggcactggattagtaggtcctcttctacgtaaggagcatgacagatagggcaggtcaccaggctggcacagggcccacagtgtgtgtaactattctgccattcacagtggaagccaggggaagcagccccacactgcatacaggacacacaccacttgcacttccagccgcccttggggacggtgagcagtggggggtccaggcagtatgtgtggtagctaatatcacagtcatcacagagcagcaggcgtgaggggtcggaggcctggccacacacctcacacacaatacactccacacaacgccagcccttgagcagcatcaccttggtgatcttgctgttgacacagtaagggtgatagcactgagagcactgcattaggacaaatttgtctgtgttggagaagagaaccacggtattctgcatggtgtcatcatcttcttcctcctcctccttactgggagagctatcaatgtcagcaactaccagagtctcaatggaagaagcagttgactttagccgggcccgtcctctaccacgtcctccatgggctcctccacgaggccggcgtcttcctgggaaactgctgctgcgaccctgtttgatgcgggaacgggctggggagctgcgccgccgccccttctccccctcagctttgcctccgctgatagctgtcccagcatcgcacaatagtgagtcatcagtctctggcagtgagtcagtacagagccgtagggagccctcatctcgggctggactaacatccgtagagacccccaactccatggacagggagccacccccctccgggtctggagagcccaggaggggctctgagccaggaaaactggcactggcatcaccctggctcagattagagatctcgttaacgatgtcggatttgatgagagtgggtggtgtgggggccaccggtgcacgtggctcttcctgttcttcacatggtgagccctgccctgctgtctgcttgcattcggggtagacctccataggggtcacaggggccagctcctcggggtccaggagcacaggggagcctttaagttcactagccaaactgccaggggtctgtccaggctctggctgtgaacccggagcatcaatcccatccagaggggctgtgtcttcccctaggccagagaagtcatccagggctggggcagggctgggggcggggcaggaaaggtcccccattggggaagggagaggactggtggcactgggttccaaggctgggcattcaggttctgaaactttctcagtctccatctcgtgcagctcagcctcatctgagacccccactaccttccctatgggactcaacggggagggaacggacagtggtagggcaggaggagagcactgggaaggaggggagttttggggaaccagggaatgctgaaggagtggcgaacactgaggaggaaggggctccatcaggatgggagaagccggccccactggggagcctggagatgggggaaggatcataggggggacaggctcagggtcagtgcagttagcttctggtggagggctgatgggtgtctccaggatgggggcagccaacggtgactcagggtcactgtcccctttggcaccaaaggggtactctaactcccccaaaggagacagggccggtggggccgcagctgtgatgatgggtgagagtggaggaggaaggggatctggtggcatcagctgaggcgacaaggatggctccccagatggggacaacggcagctcctcgggcagaggggacagaggtggttccccaggctcagacagggctggctctccaagcaagggagataaggatggttccccagggggagggaacaagggcagctcctcaggtgcagggcattggcctggctcctcagggggcttttcaggccgaggggacaggggtggcttctcaagctcaggggacagatgcgattcctcaggccggggggacaggcatggctcctcagactggggggacaggtgtgattcctcaggttggggggacaagcatggctcctcaggcacaggagacaggtgcggctcctcagtctggggggacaggtgcaattcctcaggctgaggggacagatgtggtccctcagcctggggggacaagtgtggctcctcaggcacagcgcataggcatggctcctcaggctggggggacaggtgtggctcctcagcctgcggagataggtgtggctcctcaggccggggggacaggtgcggctcctcaggccggggtgacaggtgcggcccctcggaccgggggcagagttgcggctcctcaggtagtggcaacaggggtgactcctccagcggcagggacatgagcgagtcctccggtggtggggaagcaggtgagtcctcaggtggtggggatgtgggggagtcctcaggtggtggggagaggcgtgaagcctcaggtggaggggacgtgggagactcctcaggcggtggggacaagggagattcctcaggcggtggagacaggcgtgacaccacaggcaggggggataggcgcgatacctcaggtgggggggacataggtgattcttcaggtggtggggacataggcgagtcctcaggtggtggggacaggcgtgatgcctcaggtggtggggaaaggggagactcctcaggtggaggggacagaggagactcttcaaatggtgggaacagacgagatgcctccggtggtggagacatgggtgactcttcaggtggaggggacatgggtgactcctcaggtggtggagacaggcgagatgcttcaggtggcggggaagtgggcaattcctcaggtggcggggacaaaggagattcttcaaatggtggggacaggggcgatgcttcaggtggtggggatagaggcgtctcaagtgcaggagatgggggtgactcttccggtggagacaagggcgactcctccagtggagaaaaaggtgatgattcaggtgggggagacagaggagactcttcaggcggcggagagaggggcgattcctccagcggccgggacaggtgcaatgcctcaggaagtggggatgcgggcaattcctcaggtggtggtgacaggcgtgatgcctcaggtggtggggacgtgggtgattcctcaggtggtggggacaggggtgactcctcaggtgggggcagcagtggcatctcctcgtttaggggggcctccaactggggctcaagttggacccctgctttccctagtggtttggcttcacattgcaggggccctggttccttgggttgcatagaggtcacgtgcccaccctttggctgcccttggcatgcaacgtacagagcatcgggctcgtcagtgggggtatcgccaggctctgggggtgaaaatctgctacacaccggggtatgctgctcagcaacggagcggatagtctgacctccctgggctttgtgacagcggtgacagagagagtagttctcaaaccactccgagttgggattcagttctgctgagcccgccccacaggcccggcacacccggcacgccttgcacttccaagagtgagcaggcagttcctccatgggtggttttaggcagaaagtatggtatcctttgtcacacgtctcacaaaccaacatcttagagtcattcccaggtttcctgcaggcttggcacactttgcattcagggcactgccagccagcacgtttgcgggcagtcagagcagtgtccaggcaggccccgtgatagtgatgcccacagctggtacagaagaacaggtcacacaactcccctggcccctcacacactgcacagcgagcctcct

SEQ ID NO: 153768 - DNA, 760 bp, Homo sapiens
ggagcgcgggggcttctttagcccggaacccggtgagcccgacagcccctggacgggctcaggtggcaccacgccctccacccccacaacccccaccacggagggtgagggcgacggactctcctataaccagcggagtcttcagcgctgggagaaggatgaggagttgggccagctgtccaccatctcacctgtgctctatgccaacattaattttcctaatctcaagcaagactacccagactggtcaagccgttgcaaacaaatcatgaagctctggagaaaggttccagcagctgacaaagccccctacctgccaggtagcccagagcaccaagccttaggcccagcagcttcgggagcccagggcagagccgagggttcggaagtggcggtggtccagcggcgcgccggccggggctgggcgcggaccccagggccctacgccggggccctgcgagaagccgtgtcccgtatccgccgccacacagcccctgactcggacacggacgaagctgaggagctcagcgtccatagcggctcctctgatggaagcgacacagaagccccgggcgcctcctggcggaatgagaggaccctgcccgaggttggaaacagttcgccagaggaagatgggaagacagcggaactgagcgacagtgtcggggagatcctagatgtcataagccaaaccgaggaggtcctcttcgggcccccccccatcagagggacccaacagggaaatagaaagaggcagtga

SEQ ID NO: 153769 - DNA, 2225 bp, Homo sapiens
atgctggatggcccactgttctccgaggggcctgacagcccccgggagctccaggatgaggagtctggcagctgcctctgggtgcagaagtccaagctattggtgatagaagtgaagactatttcctgtcattatagtcgccgcgccccttctcgacagcccatggacttccaggccagccactgggctcgcgggttccagaaccgcacgtgtgggccgcgcccgggatccccacagccgccgccccgccggccctgggcctccagggtgctgcaggaggcgaccaactggcgggcggggcccctggccgaggtccgagctcgggagcaagagaaaaggaaagcggcgtcgcaggagcgggaggccaaggagaccgagcgaaaaaggcgcaaggctggtggggcccgacggagccccccgggtcgaccccgcccggagccccgcaacgcccctcgggtggcccagctggcagggctccctgctcccttgcggccggagcgcctggcgcctgtggggcgagcgccccgtccatccgcgcagccgcagagcgacccagggtcggcgtgggcggggccctggggaggtcggcggcccgggcccccaagctacgaggctcacctgctgctgagaggttctgccgggaccgccccacgacgccgctgggaccggccgccaccctacgtggctccaccttcttacgaaggcccccataggaccttggggactaagagaggccccgggaactctcaggtgcccacttcatcagccccagctgcgactccagccaggacagacggagggcgcacaaagaagaggctggatcctcggatctaccgggacgtcctcggggcttggggtctccgacaggggcaaggtctcttggggggatccccaggctgtggagcggccagagcaaggccagagcccggcaagggggtcgtggagaaaagcctggggctggctgctgctgacctgaacagtggtagcgacagccatccccaagccaaagctacagggagcgcaggcaccgagatagctcctgcggggtctgcaactgcggctccctgtgccccgcatcccgctcccagatccaggcaccacctcaagggctcgagggaagggaaagaaggagaacagatctggtttcccaaatgctggattccctcccctaaaaagcagccgccccgccatagccagacactccccagaccctgggctcccggaggcaccggatggagagaatctctgggtcttggagagggggcaggaccggagaccctggagggttggaaggcgacccgccgtgcccacaccttgccccgcagttcccagggcctgtcccgtggggaaggcgtctttgtcattgacgccacgtgcgtagtgatacgatcccaatatgttccaaccccccgaacccagcaggtgcagcttttgccctctggggtgacacgcgtggtgggggattcccccagccaatcgaagcccggcaaggaggagggtgaaggggccacggtctttccttccccttgtcaaaagcggctgtcgagcagtcgccttttacaccagcccggcgggggccgcgggggcgaagctgagggcgggaggccgggggactccacactggaggagcgcactttccgcatcttggggctcccggcccccgaagtaaacctgcgggacgcccccacgcagccaggtagcccagagcaccaagccttaggcccagcagcttcgggagcccagggcagagccgaggggtcggaagtggcggtggtccagcggcgcgccggccggggctgggcgcggaccccagggccctacgccggggccctgcgagaagccgtgtcccgtatccgccgccacacagcccctgactcggacacggacgaagctgaggagctcagcgtccatagcggctcctctgatggaagcgacacagaagccccgggcgcctcctggcggaatgagaggaccctgcccgaggttggaaacagttcgccagaggaagatgggaagacagcggaactgagcgacagtgtcggggagatcctagatgtcataagccaaaccgaggaggtcctcttcggggacaagagcagccttgtggggttgcccccaagcaagctgagtggccccatcctggggccagggtccttccctagcgatgaccgactctcccggccacctccaccagccacgccttcctctatggatgtgaacagccg

SEQ ID NO: 153770 - DNA, 15973 bp, Homo sapiens
ttagttcatccatttccgacaattccaggctccacagtggcaggggatctcgtgctgatcgtcctcaaaatcaaactgatagtcataggttagctcctctcctttggggattcgccggctggagatgatgatgattttgtcctctttgtcaaatgtcacgacttcggccacacagttaggggcacaggaatggttaatgtacctggcagggccgccggtcaacgtagcatcaatcacatgttcattgtttattcggaacatgtagatgcctcgattctgctcttcgtagattttctcccgccggttggccacctcgttccgaatgatggtgccaatgtactcgataaccattgtgtgcttttctaggtccttggctgcatagagccccaggccctggatacgggagcgagccaggtacacgttgttcttccattcggtgcgcagccgccggtactgagatgacttggagtgcacaaactgcttgctgtagggggtgttggtctcgcctgtgaaggtgctctgatatgccttagacatgctggtgctgttcagggtatggggccgtttgtagtgtgtgaggattttaggctctgatcgggcacagccagtggggttgatcatgagtggcagctccataagggggtggcgcccatagcggaataaatagttttgacagctctccaccccgggcagtgattcagctatgcgaagcacggcatgcaccgtcagcccaaagagctcctcgcccttcagatactcagggaagagtcgcagcatgtcagcctcttttctcatggcagccacaggctcaatgatgcgattccacacggcctggggagaggcgtcagtgaagaccaggtcctccaggccctgctcgatgactttgattacaaactccggccgcccgttgttctcaccaatagaacagcgatagcagcagcgacgattgttggtgcggaggctccaatagatgcgcgtggcctcgtagcccacgggatagagggcagtggcactatgaaagtcagccatctggtgaggcagcagctgtccgatggcgtggaacacaagcccccccacacggaacatgtgcagccgttctccccgctgaatgatgctagcgatttgcttcacctcgtcccgctcaatgtagacccgccggaagacagcaaaagagctcagctcttgctcacagggccccttgatcttatgcattggacacagcatggtcttgtccttgaagaacatgcacttggcgcggatggcacaaccaaaatggtagacattggggcaacgcatgcgattgcagctgctggtggcaccagttcgctggcacagggagcacttggttagcagtcctcggtgcagggcaacctccacattcatcagtgctccgccctgggtctcatacacctccgtggaccaaagggcacagttgaggtgcacccacaggtccaggtccaggttcagcagacgggcaggcccatcagtggccccgtcaccctcctcatgacagaaacagcagcgacgcatgtctcgcggtaccttgtcaggtcgcaaggctgtgccaagctgctccataaactctgccacttcccgctcatcctcctgccgtccactgcccttctggatggtcagcagcagccgaagccgcttccagcgcactcctttccatttcttgaggcgaggaggacgggtatcttcaccttcttcagggggccgggcacggggcttgggtcgggctgattcaggggatgaggccagtggcagaggtgaggggacgggtggctcagccaagggttcggtgggaagttcaaccaagggctcagtagggggactggcaggagaaggtgccaagggggaagggggcggggagggttcttcaggaggtggggccgagagctgtcgcacatccagattggagacattgtaggtatacctgtgctgagtgggtggctctggggcggggctctcctgtttcaggaggctcaagatgtctagttgcctcttcagggtatagccagccaacactgcatcaaactgcttcagccaatcagggccagtgtctgggctcttgccttccagacccttttccttcccaccaggaccctcagcttcccccttctttggctcagtgcctccccgggcggggctctctgggaacagcacctcataggagttggggatcttcatgctcagcagctccgccactgccaccatcacgccattcaggttcttgtctgcagcagcagagactgtgagcatgactgacacctcacttcctttgcccttttcccaagttgtgacaggcagctttccagggacctccaggccaagggccccataaggtttggtatctgggaagactgggatgctgtcccgaggaatgagggggatgacaggggagagggcccggtcctcttgctcccaccggcctgagcccagatgagggaaacgaggggcctcctcccccaagatgctctcaggggatgaagctggcacaatgctgtcaggagaatcgctatcctcatcactctccatcctgacatcctcagtctgattgtgagggggtgtaggcaaggcagccagcaggtctagactcttcacctctgaagtatccctcagtgccctttcactatcccgggcagaggcagcatccttggggtgctcccccagctcttcagatggggtgacgccattcaccatcttctgctgcaccgatgggggtggggtggggggcagcgacgagggtggtgtcggcgggttactcaggttattcttggtaagcagctgggaatagtagtcagggccagtgggcagcgccccacttccaaaggcccccctcagctggctctgcccattgactgggcagccactgccaaagggggcaaagaggctaaaattggcggtgatagcaggctccgttaggggcagcagggacagctcctgtttcagctgtttcagcaaggcctcgctggccctgacgccgtcctccttccgcagcttctttcgggagctcaccaacctgtcgcttgccttctgtacccgcttgggcttcggtgtcaaaggcttccttgctgctgcatcctccttgttgctgggggtaccctgtagtttctgctccagcccagccagcttgctgtcaatgtgcccgttgatctcagctcgcagcccctcggacccctgcccagtgctgagttgcacattctttgcccggagtagcttctgcaagagcagatgcccagcttctgagcgagggcctgccagcaggaggtggttgctggttcctggtgcccctattggctccccattggcctccctcttcactgactgggctcccagggcacatggctcttcccgaggttcctgcttgatgctgagttgggatgcctcaggcaccacctgtccattcacctggtccagatgcccaggtaccaggctgctctgctctggcttctgggtttctgctaggttgtctgggggatcccaaggtcccagacccttgctaaacaaggtatctgcaagctgggcagcagcaggtgagaccctcccaggaggcggctccaaggttggcccctgaggtttgggggtccctggatgggtgggagggagctgggcctcagtgggaagctgggagctgggggaaggtaattgtgaaggtctctttggctcttgagggctggatggtggaggtgtgggatggacagggccaaggactggtcctgtagataaggctcctggtggggcagggagccggggtgggccctgaggtcgaggccctgcccctagctcctggagggggcctgtctgtggtccagggaagcccccaagttgaggttggcagcccaggaggccctggaggggagaggtctgggtcccaggctcctggtagggtggggtctggcgtactgcctgactctgctgcagctgccgctgcatgaggagtgcctgtagctgctgctgctgctgaggacttaagtgccgcagctgtgggtttttggccaggactccttggagctgtgctcgaagctgacccaccgtaggcatgattccaaccccaggcagaccctgcccagactggaggacaggtcctggtttgggaggttgtggccctgtattattttgcatgggccgctctagcatgggctgttgggggcccagaaggttctgggtcatggacccaggctgatcccctaaggaaacagagggctgagccagcaggtggggcacagatgaggcctcagaagatgatccactgcctagctgcccatggcttcctccacctgctgtgtggagcaggctaacttgctgctgctgttgtcctggaagcctcagaggtggctgcagctgcagagagctgggctgaggctggggctggggttggacaagcaggagttgtgagtccccagagagtgagggctttacctctcctggttcagtggccattgactcaggggtagttcctattgctaacggccctccctgatgtgtagagggcccctcagtggcctctgaagaaacggctgggtctacggtgttttgttccttgcccgtcaggaggagggttggacccagggctccagggctagaaaagtgttgaagaggctttgctggcatgccagggccaagtgccacttgctgctgctgttgttgctgaggggacagtaaagttcgactctggtttaaaaggcccatctgctgctgttgctgctgctgttgaaactgctgctgttgttgttgctgttgctgttgtagctgctgttgctgctgttgaagctgttgctgctgctgttgttgaagctgctgctgctgttgctgctgttgaagctgttgctgctgaagttgctgttgctgttgtagctgctgctgctgctgctgctgaagttgctgttgctgttgcagctgctgctgctgctgaagctgctgtaaagagcccatgggctgagcgctcagtttgggctgcccactgtgtgacatcagactttgctgaagatgggacagccctgccatggacccttgctgttggtgctgttgttgctgctgctgctgctgggctgtgaccagcctgtgtcccataaggccctgaccctgctgtgccagctggggggaactgagcacccgggactgggtcataagcacctgtctgtgagggccctgggggcccaaagctccagggtgctgctgctgcaacacagccacctgggcagggcccagcatgccctggggcccctggggtggttgaggggacagctgctggaccaggaggccttggtggctgctgggaggcataaggccctggggcttgggacccagagcttggtttgtctgtactccaggaccctgctgctgttgctgctggattgccacctgtcctagaaggtgctgctgctgctgttgctgctgctgctgctgctgcagtttctgggccagctgcatacgttgctgctgcagctgcagctgcctttcctgtaaaagccttgaatcaggtccgaggcttcgaagagcaaggttgccagggaagaagccccctgaagggccagccagggatccagccccaccagaatgttgctgttgctgctgttgggccagagctgtattaaggaaggggccaccaggctgtccaggtagtgccatacccccaggggtcaggcgaagacctccggcttgcccacccggaggcccctgtggtggctgcagcccatggccagggagcagctgaccagggagcttggtgagcagccggggactctgggaagggctgagagccagcacagctgagtgctgttgctgttgttgctgctgctgctgctgttgttgctgctgcttgttccgatattctgccatgagattagtgtgctccttctgctgtttccggacctgatccagttgtttctggatcttgctctgctgctctgtaaccagcttgagcttctcagcatcagcttctgggaactcacggccagcttttttggcagtgcgctgcttggcacacagagccttccgggacttgcggtgtacaccaatctgctcctctagcaccttcagctgcatctgtaggagctgctgggtatggaacagccactcctcatactgccgctggtcagcttcattgatcactccctgagcaaaagtgggcgggttgggacgaggctgggagggatcaccagcactccgctcctggccactcccagctgccacatggttctgcagatcactgctaggtccccccgagagcctctgggctagcagagacacttgctgtctgttcataccaggtgccaccccaatgctgccctgagccatcactttcttgatgcctttcaaagccaccatcttggcctttgcaatgggaccaatgatatcttctgcagcaaatttgtccaggtctgtatctgggaagaagctgtttgccagctgctgctgcattgccaattgctgcggcttcatgcacatggaaggtggcatggtgcccatgggcttctgtgatagcactggctgtgagctctgctggggtaccaagcctgcctgccctccatgctgcccacttagcatatgcccttgattggacaccatagccatggatggagccaggcgttgctggagggcatgagctggtggctgggtgggcatcagtggctggggcaaacctggctgtcgggcaactgcaagacccagggaaagctgctgttgggacccagccaaactgggagaagagccctcatgtggcaaagacatggcctgggcagggcctggtgcaggcagtagggaatgctgctgctgctgttgctgctgctgctgggcaggctgcaactgtgctgaaagctgctgcttcttctgcagctccttcttctcatgctccaacaggtcctcaatgagcaggggtaactcgctggctaccagtgagctctccatcttgtctagctcatccccagatgctgcaggtccaccaggcaaggtcaaagccccactctcgagctcaaacttttccagcagggaggatcctcctgggccactcagtgggctgggggtcagcaggtgagctggtggccctcccgtggccccaaaggaggccttctcagctgtgtgcccactgctagaaaatggccctgtgcccatccgggtatcccggctgcccatcatgctctgtcctggctttagccccaggccaagggaattggcagcaggtgcgggctctaccttgggggtagcaatggtgaattggcaaggagaagggtggcgtccaccctcctccaccttgggcttcacctcagggagcacagatgccaggcggggttcagaggcatcagcagcagggggagggcgctcctcagggcccaagggtcctggctccaccccccgcagcagggcctcccgttcagcctcctcattagccgattctaccagcctcaggtgctcattgaagatatccttcttgtccccagtgtccagctcaggatcagtatatgccagcaggtcaaactcgtctccattgagcaggtcatccaagtgggggtcattggtctccaggttttctaaggtgccaagttcatcatcacccttggccacatccacacccagacccaggtgagcaagctcttcatcatcctctagggccttgtgggcatcaaaatcgtcatccagctcgggatcctcacagggcaacttcccagcttccagggccagaggattggggcggccaagctcagtgctcgacgggggccggttgaccagctccaaaccagttggcagggtaggacccttggtgtggggtgttggatgaagactgttgttcaattcaggggccggtggggctgagggtttctgtgggggaagacctgataccgccaggccccgaagcccttcaggagccagtcggtgggggtcctcacttacagggtaaaaacggggtctctgaggtgggccctgaccaggaaacggagtgcccccaggtcccagtcctttctgtacattgtgccgcagctcaatgaactgggcaggaccagctggaccaggcactggctcaccagggcctggcagacgggtggaaattcccgccaacggggaacctagggcttggcggccaagttcaggtccaggagttgatggaaagcgagctgacatggcaaatcgcatggaggttgctgctgttgcctgttgttgctgccacagttgttgctgttgctgctgtaagggcagggacccaggatagggtgctcgctgatagaaagcttgggagcctcctaccagttgccggctgttcacatccatagaggaaggcgtggctggtggaggtggccgggagagtcggtcatcgctagggaaggaccctggccccaggatggggccactcagcttgcttgggggcaaccccacaaggctgctcttgtcctgtgtcccagcaaagggggtctggcctcgactcagctgctcaaaggcagggctgctgggctcagcaccccagctgcctggaggccccactgctcccgcagctgctgcagctgtttccttctcctgccgcagggtgttgcgctggatctgctgccgaatcagcagctctcgtagccgctggcgctgccgttgcttctccagctctgtttggctaaggccggacatgcctgggtcctgggtacctgggagttcagctgtcgccaaagagctacccattccagtccctgggtcttctcgcttttcgacaggagaggtgatgcctgatcgctgtgaggctccatgggacaggtaggggagggatccgtcgggtgcaggtggtggcagaaccgacggagggcgtagtggggacagcccatagctctcccctgtggacccgctgctgggccccagggggctgcccgatgggtggaagttccctgtggctactgtgtagtttgtgctttgaggcttgcccaaggtggggccgggcccaaaatggctgttgatcccatggggtggcgggagaccaggctgagggacagggggctttagggaaggctcccctactgcctgagggaaagtgaaacgcatgggagagggggtgcccacaaatgcacccgtcccaggggaccggacaaaattggggggctgcccacttgggaccttggcatggagctcacctgctggccccgcgggcagggctgctgggaaccccccagcccccagcgaagtgtgggctagagacccagccttaaaggcaacttcagggggctggggtcggggtggcttatgcaatggggcaaatgggtcacgggactgagggcgtgagggtgggcgagaataagggtcaggggactggaagcgaggggtaacgggtgatgggcaaaaagcttcagcagacagaggccggggtgtcagtggagactgggagctggactgggactgaggactgacaggcactcgggagaaagggtcggagggcagtgagcgagggggcagagcacagcagctctcagggggcggaggttggggccgaggagtcaatgggggctgagcatatgggtcagtgtaggagccagggcgaaagatgtctgggtgacttggaggagaaggtgccaaagcctgggcagggggtggctcctggggccttaggcccaagcccgggctctggggctctacctgagatgcccgaggggtcaggggggctttgaagacatcaggtgtctttaactccaggccacccaggtgggtgcctgaggagggtgagtcaacaaagcccaggtttgggggcccatagctaggagaggatgccccaagctcttccttcttcacctctagggccttccgggactccccaaaaggtgggggcgagagcaggggctcggaagctttgcctccccctaccccagggctctcaggcacagccaagttatccagcgaggggcagcggggtttgaggaacgggtcaggtgtggagggctggtgtctgggggtgccaggtggggtagtgtggaattcccctggctggccagccccaggacgagatgaggcgcccagcatcgggggctgcgcaggggcccccgtaggactaggataggggggataggtgggcggtgccgtggggaagcggggctccaggggataggcaggggccagtccaaaggggtcctgcgaaggcgcttgggcgggcacctggggtgggagcttgaggaagagctcaccaggcgagtcagggccaggcaccgagcccgccggcggcttcaggaacccgtccgcagaggtagacaagccggcgggggtagtggggctgccaatgaaaatggtgggggcagcagcggggggcgggctgcccagtgcccctggctgcgggggaatgcggagatgtagggccggtcggtcagtcttacgggctatgtcgcccaccttggtctgcttgttgatctggctctcagcctgcttctgcaccttgttgatgcggtgagctgcccggttatctttggccttttgcaggtagggggctttgtcagctgctggaacctttctccagagcttcatgatttgtttgcaacggcttgaccagtctgggtagtcttgcttgagattaggaaaattaatgttggcatagagcacaggcgagatggtggacagctggcccaactcctcatccttctcccagcgctgaagactccgctggttataggagagtccgtcgccctcaccctccgtggtgggggttgtgggggtggagggcgtggtgccacctgagcccgtccaggggctgtcgggctcaccgggttccgggctaaagaagcccccgcgctccctagaatccaggaacggggactggcagaggcctgggtaggagtccattgggctgctggagggcagattgcccaaagggagtccaccttgaagaaagggcctctgcagtggcgtacggctgccttctaggccaggggttccacaacccagatgctgttctcgttcagagcccagaacatccttgaagagctgctgcaggtccttggattccatcttgggcagttcttctgtggaaatcctgtctaagtcagagctaagcatcccttcacctggggtgcctggcttctcagggtcactgggcactggggatgccttcacgcccccatcctcaggtcctggtgtatcggctttgccctcgaggccacgggattcttcatctgcaatatctggaccatcatctcctttctgcgatgtggggagttccttcctttctgagcctccatctcccttggcttttggggtccctagtccaaagcttggccggcccaccccaactgcaaaaagggccttacggctcaggtccagcagctccttcccaaagaaggcttcctgcaagtaagcagggaacatgccctccagtttgctcctcttgcgccctcgccgctgttgcttcttcttctcatccccttcagctaagctctgctccacggcgccctctgcaggcaggtcagcaggtatcacctcgtcgggctgcccatccccactcaacacctccgcctgtgcagcaggcccctttttcgtgcgtgtgtgggatttccgctgtcgcaccatgaaaccaccaatgccaggccgatatggtttacgcttgcgttttttgctttcctcggtctcctctttgccaggctccacatcagggctgacggggccctccagtttaatttcgcactccatgtgctccacaccaccttcacccttgagcagctcatcggtgtccaggtccccatccttcttgtcatcagggccaagggcatctgagggctcagaaccctccaatcctgcctcgcctgggaggccaagccgtcctcgccgttggcgccgcttgtgcagtggtgacatggtcaggttacgcagcaaggccatgccagtttctgtcagccacacgccttcgaagcgaaagtactggggctctggctctttcaccttcatgggcaccagctctggaggtgcaacaggcgccacaggctttaccacgtagggctggcaggagacacagtcaaagccttcatcgggtgcgtggtccacatcgtcctctgtgaagaggctctcacagcctgcatgcatccaccgttcacagtggcggcactggattagtaggtcctcttctacgtaaggagcatgacagatagggcaggtcaccaggctggcacagggcccacagtgtgtgtaactattctgccattcacagtggaagccaggggaagcagccccacactgcatacaggacacacaccacttgcacttccagccgcccttggggacggtgagcagtggggggtccaggcagtatgtgtggtagctaatatcacagtcatcacagagcagcaggcgtgaggggtcggaggcctggccacacacctcacacacaatacactccacacaacgccagcccttgagcagcatcaccttggtgatcttgctgttgacacagtaagggtgatagcactgagagcactgcgaacaggcaaggaggtggccctctgccccccggccaaagctgccacataccacacacatgtcctgcattaggacaaatttgtctgtgttggagaagagaaccacggtattctgcatggtgtcatcatcttcttcctcctcctccttactgggagagctatcaatgtcagcaactaccagagtctcaatggaagaagcagttgactttagccgggcccgtcctctaccacgccctccatgggctcctccacgaggccggcgtcttcctgggaaactgctgctgcgaccctgtttgatgcgggaacgggctggggagctgcgccgccgccccttctccccctcagctttgcctccgctgatagctgtcccagcatcgcacaatagtgagtcatcagtctctggcagtgagtcagtacagagccgtagggagccctcatctcgggctggactaacatccgtagagacccccaactccatggacagggagccacccccctccgggtctggagagcccaggaggggctctgagccaggaaaactggcactggcatcaccctggctcagattagagatctcgttaacgatgtcggatttgatgagagtgggtggtgtgggggccaccggtgcacgtggctcttcctgttcttcacatggtgagccccgccctgctgtctgcttgcattcggggtagacctccataggggtcacaggggccagctcctcggggtccaggagcacaggggagcctttaagttcactagccaaactgccaggggtctgtccaggctctggctgtgaacccggagcatcaatcccatccagaggggctgtgtcttcccctaggccagagaagtcatccagggctggggcagggctgggggcggggcaggaaaggtcccccattggggaagggagaggactggtggcactgggttccaaggctgggcattcaggttctgaaactttctcagtctccatctcgtgcagctcagcctcatctgagacccccactaccttccctatgggactcaacggggagggaacggacagtggtagggcaggaggagagcactgggaaggaggggagttttggggaaccagggaatgctgaaggagtggcgaacactgaggaggaaggggctccatcaggatgggagaagccggccccactggggagcctggagatgggggaaggatcataggggggacaggctcagggtcagtgcagttagcttctggtggagggctgatgggtgtctccaggatgggggcagccaacggtgactcagggtcactgtcccctttggcaccaaaggggtactctaactcccccaaaggagacagggccggtggggccgcagctgtgataatgggtgagagtggaggaggaaggggatctggtggcatcagctgaggcgacaaggatggctccccagatggggacaacggcagctcccccagtgcgaaccatagcaatattggcataggtgccaatctgtagctcttccagagacttggacatgaactctggcttggggaactcagtgatcagacgcatgagattatccaaaacctgccggttctgaatctttatcctcaccagccagcttctggctgtccatccctctctccgactgggcagggccctctcggagagacccctcagtgccctttcactatcccgggcagaggcagcatccttggggtgctcccccagctcttcagatggggtgacgccattcaccatcttctgctgcaccgatgggggtggggtgggggagcacgaccagggtggtgtcggcgggttactcaagttatttattgcagaaaatatggccattttcagaccttggcagcaaccatgagtttctgtgctggtcgtaggcttatgagcagcgaaatcttttttcagcttcagcatcagcatcgcagagacagctcctgctgccctgcttcgtttttctctgtgtgagttttgaccgtggttgactttataggcttgaagttgaaaatcagtagcacacctcccccctgtatctgggaagaagctgtttgccagctgctgctgcattgccaattgctgcggcttcatgcacatggaaggtggcatggtgcccatgggcttctgtgatagcactggctgtgagctctgctggagtaccaagcctgcctgccctccatgctgcccacttagcatatgccctgggatgctggcccgaggaatgagggggatgacaggggagagggcccggtcctcttgctcccaccggcctgagcccagatgagggaaacgaggggcctcctcccccaagatgctctcaggggatgaagctggcacaatgctgtcaggagaatcgctatcctcatcactctccatcctgacatcctcagtctgattgtgagggggtgtaggcaaggcagccagcaggtctagactcttcacctctgaagtatcttgggcaagcctcaaagcacaaactacacagtagccacagggaacttccacccatcgggcagcccccttcaagaactggctgaggagcctctccttctttttggccatctcctcctctgccagcaacttctgctgaaacagaagcagctgcttctcatcggacaggggcgtcttggccattttttctttcttgatgacattgtccttacagtccaccactcgttcaaatgtttggctgaagatctcaatgtccttatgaagttctctggtcttgacttccccgaagacaatcctccactgtgtggtaatcttattaaggttcagagcacggttgagttcctccttggccaccttgtccccaactgcaaaaagggccttacggctcaggtccagcagctccttcccaaagaaggcttcctgcaagtaagcagggaacatgtcctccagtttgctcttcttgcgccctcgccgctgttgcttcttcttctcatccccttcagctaagctctgctccacggcgccctctgcaggcaggtcagcaggtatcactgggtagtcttgcttgagattaggaaaattaatgttggcatagagcacaggtgagatggtggacagctggcccaactcctcatccttctcccagcgctgaagactccgctggttataggagagtccgtcgccctcaccctccgtggtgggggttgtgggggtggagggcgtggtgccacctgagcccgtccaggggctgtcgggctcaccgggttccgggctaaagaagcccccgcgctccctggggcgcaggggcagagagtcacagggcgcagggatgccaagtcccaccccagacaaactgcctagagccccaggccactgccctgaatcatcacctttttctccactggaggagtcgcccttgtctccaccggaagagtcacccccatctcctgcacttgagacgcctctatccccaccacctggagcatcgcccctgtccccaccatttgaagaatctcctttgtccccgccacctgaggaattgcccacttccccgccacctgaagcatctcgcctgtctccaccacctgaagagtcacccat

SEQ ID NO: 153771 - DNA, 619 bp, Homo sapiens
ttcccgtgtcgacccacgcgtccgcctaaagcgaggaaaccaagccgggcgcctcttgcaatggagacggtcatttcttctgatagctccccagctgtggaaaatgagcatcctcaagagaccccagaatccaacaatagcgtgtatacttccttcatgaagtctcatcgctgctatgacctgattcccacaagctccaaattggttgtatttgatacgtccctgcaggtgaagaaagctttttttgctttggtgactaacggtgtacgagctgcccctttatgggatagtaagaagcaaagttttgtgggcatgctgaccatcactgatttcatcaatatcctgcaccgctactataaatcagccttggtacagatctatgagctagaagaacacaagatagaaacttggagagaggtgtatctccaggactcctttaaaccgcttgtctgcatttctcctaatgccagcttgtttgatgctgtctcttcattaaattcgggaacaagatccacaagcctggcagttattgaccccagaatccaggcaatactttgtaccatcctcaacccacaagcgcattctggaagttcctcaaaattgtttaacactggaggtt

SEQ ID NO: 153772 - DNA, 15789 bp, Homo sapiens
ttagttcatccatttccgacaattccaggctccacagtggcaggggatctcgtgctgatcgtcctcaaaatcaaactgatagtcataggttagctcctctcctttggggattcgccggctggagatgatgatgattttgtcctctttgtcaaatgtcacgacttcggccacacagttaggggcacaggaatggttaatgtacctggcagggccgccggtcaacgtagcatcaatcacatgttcattgtttattcggaacatgtagatgcctcgattctgctcttcgtagattttctcccgccggttggccacctcgttccgaatgatggtgccaatgtactcgataaccattgtgtgcttttctaggtccttggctgcatagagccccaggccctggatacgggagcgagccaggtacacgttgttcttccattcggtgcgcagccgccggtactgagatgacttggagtgcacaaactgcttgctgtagggggtgttggtctcgcctgtgaaggtgctctgatatgccttagacatgctggtgctgttcagggtatggggccgtttgtagtgtgtgaggattttaggctctgatcgggcacagccagtggggttgatcatgagtggcagctccataagggggtggcgcccatagcggaataaatagttttgacagctctccaccccgggcagtgattcagctatgcgaagcacggcatgcaccgtcagcccaaagagctcctcgcccttcagatactcagggaagagtcgcagcatgtcagcctcttttctcatggcagccacaggctcaatgatgcgattccacacggcctggggagaggcgtcagtgaagaccaggtcctccaggccctgctcgatgactttgattacaaactccggccgcccgttgttctcaccaatagaacagcgatagcagcagcgacgattgttggtgcggaggctccaatagatgcgcgtggcctcgtagcccacgggatagagggcagtggcactatgaaagtcagccatctggtgaggcagcagctgtccgatggcgtggaacacaagcccccccacacggaacatgtgcagccgttctccccgctgaatgatgctagcgatttgcttcacctcgtcccgctcaatgtagacccgccggaagacagcaaaagagctcagctcttgctcacagggccccttgatcttatgcattggacacagcatggtcttgtccttgaagaacatgcacttggcgcggatggcacaaccaaaatggtagacattggggcaacgcatgcgattgcagctgctggtggcaccagttcgctggcacagggagcacttggttagcagtcctcggtgcagggcaacctccacattcatcagtgctccgccctgggtctcatacacctccgtggaccaaagggcacagttgaggtgcacccacaggtccaggtccaggttcagcagacgggcaggcccatcagtggccccgtcaccctcctcatgacagaaacagcagcgacgcatgtctcgcggtaccttgtcaggtcgcaaggctgtgccaagctgctccataaactctgccacttcccgctcatcctcctgccgtccactgcccttctggatggtcagcagcagccgaagccgcttccagcgcactcctttccatttcttgaggcgaggaggacgggtatcttcaccttcttcagggggccgggcacggggcttgggtcgggctgattcaggggatgaggccagtggcagaggtgaggggacgggtggctcagccaagggttcggtgggaagttcaaccaagggctcagtagggggactggcaggagaaggtgccaagggggaagggggcggggagggttcttcaggaggtggggccgagagctgtcgcacatccagattggagacattgtaggtatacctgtgctgagtgggtggctctggggcggggctctcctgtttcaggaggctcaagatgtctagttgcctcttcagggtatagccagccaacactgcatcaaactgcttcagccaatcagggccagtgtctgggctcttgccttccagacccttttccttcccaccaggaccctcagcttcccccttctttggctcagtgcctccccgggcggggctctctgggaacagcacctcataggagttggggatcttcatgctcagcagctccgccactgccaccatcacgccattcaggttcttgtctgcagcagcagagactgtgagcatgactgacacctcacttcctttgcccttttcccaagttgtgacaggcagctttccagggacctccaggccaagggccccataaggtttggtatctgggaagactgggatgctgtcccgaggaatgagggggatgacaggggagagggcccggtcctcttgctcccaccggcctgagcccagatgagggaaacgaggggcctcctcccccaagatgctctcaggggatgaagctggcacaatgctgtcaggagaatcgctatcctcatcactctccatcctgacatcctcagtctgattgtgagggggtgtaggcaaggcagccagcaggtctagactcttcacctctgaagtatccctcagtgccctttcactatcccgggcagaggcagcatccttggggtgctcccccagctcttcagatggggtgacgccattcaccatcttctgctgcaccgatgggggtggggtggggggcagcgacgagggtggtgtcggcgggttactcaggttattcttggtaagcagctgggaatagtagtcagggccagtgggcagcgccccacttccaaaggcccccctcagctggctctgcccattgactgggcagccactgccaaagggggcaaagaggctaaaattggcggtgatagcaggctccgttaggggcagcagggacagctcctgtttcagctgtttcagcaaggcctcgctggccctgacgccgtcctccttccgcagcttctttcgggagctcaccaacctgtcgcttgccttctgtacccgcttgggcttcggtgtcaaaggcttccttgctgctgcatcctccttgttgctgggggtaccctgtagtttctgctccagcccagccagcttgctgtcaatgtgcccgttgatctcagctcgcagcccctcggacccctgcccagtgctgagttgcacattctttgcccggagtagcttctgcaagagcagatgcccagcttctgagcgagggcctgccagcaggaggtggttgctggttcctggtgcccctattggctccccattggcctccctcttcactgactgggctcccagggcacatggctcttcccgaggttcctgcttgatgctgagttgggatgcctcaggcaccacctgtccattcacctggtccagatgcccaggtaccaggctgctctgctctggcttctgggtttctgctaggttgtctgggggatcccaaggtcccagacccttgctaaacaaggtatctgcaagctgggcagcagcaggtgagaccctcccaggaggcggctccaaggttggcccctgaggtttgggggtccctggatgggtgggagggagctgggcctcagtgggaagctgggagctgggggaaggtaattgtgaaggtctctttggctcttgagggctggatggtggaggtgtgggatggacagggccaaggactggtcctgtagataaggctcctggtggggcagggagccggggtgggccctgaggtcgaggccctgcccctagctcctggagggggcctgtctgtggtccagggaagcccccaagttgaggttggcagcccaggaggccctggaggggagaggtctgggtcccaggctcctggtagggtggggtctggcgtactgcctgactctgctgcagctgccgctgcatgaggagtgcctgtagctgctgctgctgctgaggacttaagtgccgcagctgtgggtttttggccaggactccttggagctgtgctcgaagctgacccaccgtaggcatgattccaaccccaggcagaccctgcccagactggaggacaggtcctggtttgggaggttgtggccctgtattattttgcatgggccgctctagcatgggctgttgggggcccagaaggttctgggtcatggacccaggctgatcccctaaggaaacagagggctgagccagcaggtggggcacagatgaggcctcagaagatgatccactgcctagctgcccatggcttcctccacctgctgtgtggagcaggctaacttgctgctgctgttgtcctggaagcctcagaggtggctgcagctgcagagagctgggctgaggctggggctggggttggacaagcaggagttgtgagtccccagagagtgagggctttacctctcctggttcagtggccattgactcaggggtagttcctattgctaacggccctccctgatgtgtagagggcccctcagtggcctctgaagaaacggctgggtctacggtgttttgttccttgcccgtcaggaggagggttggacccagggctccagggctagaaaagtgttgaagaggctttgctggcatgccagggccaagtgccacttgctgctgctgttgttgctgaggggacagtaaagttcgactctggtttaaaaggcccatctgctgctgttgctgctgctgttgaaactgctgctgttgttgttgctgttgctgttgtagctgctgttgctgctgttgaagctgttgctgctgctgttgttgaagctgctgctgctgttgctgctgttgaagctgttgctgctgaagttgctgttgctgttgtagctgctgctgctgctgctgctgaagttgctgttgctgttgcagctgctgctgctgctgaagctgctgtaaagagcccatgggctgagcgctcagtttgggctgcccactgtgtgacatcagactttgctgaagatgggacagccctgccatggacccttgctgttggtgctgttgttgctgctgctgctgctgggctgtgaccagcctgtgtcccataaggccctgaccctgctgtgccagctggggggaactgagcacccgggactgggtcataagcacctgtctgtgagggccctgggggcccaaagctccagggtgctgctgctgcaacacagccacctgggcagggcccagcatgccctggggcccctggggtggttgaggggacagctgctggaccaggaggccttggtggctgctgggaggcataaggccctggggcttgggacccagagcttggtttgtctgtactccaggaccctgctgctgttgctgctggattgccacctgtcctagaaggtgctgctgctgctgttgctgctgctgctgctgctgcagtttctgggccagctgcatacgttgctgctgcagctgcagctgcctttcctgtaaaagccttgaatcaggtccgaggcttcgaagagcaaggttgccagggaagaagccccctgaagggccagccagggatccagccccaccagaatgttgctgttgctgctgttgggccagagctgtattaaggaaggggccaccaggctgtccaggtagtgccatacccccaggggtcaggcgaagacctccggcttgcccacccggaggcccctgtggtggctgcagcccatggccagggagcagctgaccagggagcttggtgagcagccggggactctgggaagggctgagagccagcacagctgagtgctgttgctgttgttgctgctgctgctgctgttgttgctgctgcttgttccgatattctgccatgagattagtgtgctccttctgctgtttccggacctgatccagttgtttctggatcttgctctgctgctctgtaaccagcttgagcttctcagcatcagcttctgggaactcacggccagcttttttggcagtgcgctgcttggcacacagagccttccgggacttgcggtgtacaccaatctgctcctctagcaccttcagctgcatctgtaggagctgctgggtatggaacagccactcctcatactgccgctggtcagcttcattgatcactccctgagcaaaagtgggcgggttgggacgaggctgggagggatcaccagcactccgctcctggccactcccagctgccacatggttctgcagatcactgctaggtccccccgagagcctctgggctagcagagacacttgctgtctgttcataccaggtgccaccccaatgctgccctgagccatcactttcttgatgcctttcaaagccaccatcttggcctttgcaatgggaccaatgatatcttctgcagcaaatttgtccaggtctgtatctgggaagaagctgtttgccagctgctgctgcattgccaattgctgcggcttcatgcacatggaaggtggcatggtgcccatgggcttctgtgatagcactggctgtgagctctgctggggtaccaagcctgcctgccctccatgctgcccacttagcatatgcccttgattggacaccatagccatggatggagccaggcgttgctggagggcatgagctggtggctgggtgggcatcagtggctggggcaaacctggctgtcgggcaactgcaagacccagggaaagctgctgttgggacccagccaaactgggagaagagccctcatgtggcaaagacatggcctgggcagggcctggtgcaggcagtagggaatgctgctgctgctgttgctgctgctgctgggcaggctgcaactgtgctgaaagctgctgcttcttctgcagctccttcttctcatgctccaacaggtcctcaatgagcaggggtaactcgctggctaccagtgagctctccatcttgtctagctcatccccagatgctgcaggtccaccaggcaaggtcaaagccccactctcgagctcaaacttttccagcagggaggatcctcctgggccactcagtgggctgggggtcagcaggtgagctggtggccctcccgtggccccaaaggaggccttctcagctgtgtgcccactgctagaaaatggccctgtgcccatccgggtatcccggctgcccatcatgctctgtcctggctttagccccaggccaagggaattggcagcaggtgcgggctctaccttgggggtagcaatggtgaattggcaaggagaagggtggcgtccaccctcctccaccttgggcttcacctcagggagcacagatgccaggcggggttcagaggcatcagcagcagggggagggcgctcctcagggcccaagggtcctggctccaccccccgcagcagggcctcccgttcagcctcctcattagccgattctaccagcctcaggtgctcattgaagatatccttcttgtccccagtgtccagctcaggatcagtatatgccagcaggtcaaactcgtctccattgagcaggtcatccaagtgggggtcattggtctccaggttttctaaggtgccaagttcatcatcacccttggccacatccacacccagacccaggtgagcaagctcttcatcatcctctagggccttgtgggcatcaaaatcgtcatccagctcgggatcctcacagggcaacttcccagcttccagggccagaggattggggcggccaagctcagtgctcgacgggggccggttgaccagctccaaaccagttggcagggtaggacccttggtgtggggtgttggatgaagactgttgttcaattcaggggccggtggggctgagggtttctgtgggggaagacctgataccgccaggccccgaagcccttcaggagccagtcggtgggggtcctcacttacagggtaaaaacggggtctctgaggtgggccctgaccaggaaacggagtgcccccaggtcccagtcctttctgtacattgtgccgcagctcaatgaactgggcaggaccagctggaccaggcactggctcaccagggcctggcagacgggtggaaattcccgccaacggggaacctagggcttggcggccaagttcaggtccaggagttgatggaaagcgagctgacatggcaaatcgcatggaggttgctgctgttgcctgttgttgctgccacagttgttgctgttgctgctgtaagggcagggacccaggatagggtgctcgctgatagaaagcttgggagcctcctaccagttgccggctgttcacatccatagaggaaggcgtggctggtggaggtggccgggagagtcggtcatcgctagggaaggaccctggccccaggatggggccactcagcttgcttgggggcaaccccacaaggctgctcttgtcctgtgtcccagcaaagggggtctggcctcgactcagctgctcaaaggcagggctgctgggctcagcaccccagctgcctggaggccccactgctcccgcagctgctgcagctgtttccttctcctgccgcagggtgttgcgctggatctgctgccgaatcagcagctctcgtagccgctggcgctgccgttgcttctccagctctgtttggctaaggccggacatgcctgggtcctgggtacctgggagttcagctgtcgccaaagagctacccattccagtccctgggtcttctcgcttttcgacaggagaggtgatgcctgatcgctgtgaggctccatgggacaggtaggggagggatccgtcgggtgcaggtggtggcagaaccgacggagggcgtagtggggacagcccatagctctcccctgtggacccgctgctgggccccagggggctgcccgatgggtggaagttccctgtggctactgtgtagtttgtgctttgaggcttgcccaaggtggggccgggcccaaaatggctgttgatcccatggggtggcgggagaccaggctgagggacagggggctttagggaaggctcccctactgcctgagggaaagtgaaacgcatgggagagggggtgcccacaaatgcacccgtcccaggggaccggacaaaattggggggctgcccacttgggaccttggcatggagctcacctgctggccccgcgggcagggctgctgggaaccccccagcccccagcgaagtgtgggctagagacccagccttaaaggcaacttcagggggctggggtcggggtggcttatgcaatggggcaaatgggtcacgggactgagggcgtgagggtgggcgagaataagggtcaggggactggaagcgaggggtaacgggtgatgggcaaaaagcttcagcagacagaggccggggtgtcagtggagactgggagctggactgggactgaggactgacaggcactcgggagaaagggtcggagggcagtgagcgagggggcagagcacagcagctctcagggggcggaggttggggccgaggagtcaatgggggctgagcatatgggtcagtgtaggagccagggcgaaagatgtctgggtgacttggaggagaaggtgccaaagcctgggcagggggtggctcctggggccttaggcccaagcccgggctctggggctctacctgagatgcccgaggggtcaggggggctttgaagacatcaggtgtctttaactccaggccacccaggtgggtgcctgaggagggtgagtcaacaaagcccaggtttgggggcccatagctaggagaggatgccccaagctcttccttcttcacctctagggccttccgggactccccaaaaggtgggggcgagagcaggggctcggaagctttgcctccccctaccccagggctctcaggcacagccaagttatccagcgaggggcagcggggtttgaggaacgggtcaggtgtggagggctggtgtctgggggtgccaggtggggtagtgtggaattcccctggctggccagccccaggacgagatgaggcgcccagcatcgggggctgcgcaggggcccccgtaggactaggataggggggataggtgggcggtgccgtggggaagcggggctccaggggataggcaggggccagtccaaaggggtcctgcgaaggcgcttgggcgggcacctggggtgggagcttgaggaagagctcaccaggcgagtcagggccaggcaccgagcccgccggcggcttcaggaacccgtccgcagaggtagacaagccggcgggggtagtggggctgccaatgaaaatggtgggggcagcagcggggggcgggctgcccagtgcccctggctgcgggggaatgcggagatgtagggccggtcggtcagtcttacgggctatgtcgcccaccttggtctgcttgttgatctggctctcagcctgcttctgcaccttgttgatgcggtgagctgcccggttatctttggccttttgcaggtagggggctttgtcagctgctggaacctttctccagagcttcatgatttgtttgcaacggcttgaccagtctgggtagtcttgcttgagattaggaaaattaatgttggcatagagcacaggcgagatggtggacagctggcccaactcctcatccttctcccagcgctgaagactccgctggttataggagagtccgtcgccctcaccctccgtggtgggggttgtgggggtggagggcgtggtgccacctgagcccgtccaggggctgtcgggctcaccgggttccgggctaaagaagcccccgcgctccctagaatccaggaacggggactggcagaggcctgggtaggagtccattgggctgctggagggcagattgcccaaagggagtccaccttgaagaaagggcctctgcagtggcgtacggctgccttctaggccaggggttccacaacccagatgctgttctcgttcagagcccagaacatccttgaagagctgctgcaggtccttggattccatcttgggcagttcttctgtggaaatcctgtctaagtcagagctaagcatcccttcacctggggtgcctggcttctcagggtcactgggcactggggatgccttcacgcccccatcctcaggtcctggtgtatcggctttgccctcgaggccacgggattcttcatctgcaatatctggaccatcatctcctttctgcgatgtggggagttccttcctttctgagcctccatctcccttggcttttggggtccctagtccaaagcttggccggcccaccccaactgcaaaaagggccttacggctcaggtccagcagctccttcccaaagaaggcttcctgcaagtaagcagggaacatgccctccagtttgctcctcttgcgccctcgccgctgttgcttcttcttctcatccccttcagctaagctctgctccacggcgccctctgcaggcaggtcagcaggtatcacctcgtcgggctgcccatccccactcaacacctccgcctgtgcagcaggcccctttttcgtgcgtgtgtgggatttccgctgtcgcaccatgaaaccaccaatgccaggccgatatggtttacgcttgcgttttttgctttcctcggtctcctctttgccaggctccacatcagggctgacggggccctccagtttaatttcgcactccatgtgctccacaccaccttcacccttgagcagctcatcggtgtccaggtccccatccttcttgtcatcagggccaagggcatctgagggctcagaaccctccaatcctgcctcgcctgggaggccaagccgtcctcgccgttggcgccgcttgtgcagtggtgacatggtcaggttacgcagcaaggccatgccagtttctgtcagccacacgccttcgaagcgaaagtactggggctctggctctttcaccttcatgggcaccagctctggaggtgcaacaggcgccacaggctttaccacgtagggctggcaggagacacagtcaaagccttcatcgggtgcgtggtccacatcgtcctctgtgaagaggctctcacagcctgcatgcatccaccgttcacagtggcggcactggattagtaggtcctcttctacgtaaggagcatgacagatagggcaggtcaccaggctggcacagggcccacagtgtgtgtaactattctgccattcacagtggaagccaggggaagcagccccacactgcatacaggacacacaccacttgcacttccagccgcccttggggacggtgagcagtggggggtccaggcagtatgtgtggtagctaatatcacagtcatcacagagcagcaggcgtgaggggtcggaggcctggccacacacctcacacacaatacactccacacaacgccagcccttgagcagcatcaccttggtgatcttgctgttgacacagtaagggtgatagcactgagagcactgcgaacaggcaaggaggtggccctctgccccccggccaaagctgccacataccacacacatgtcctgcattaggacaaatttgtctgtgttggagaagagaaccacggtattctgcatggtgtcatcatcttcttcctcctcctccttactgggagagctatcaatgtcagcaactaccagagtctcaatggaagaagcagttgactttagccgggcccgtcctctaccacgccctccatgggctcctccacgaggccggcgtcttcctgggaaactgctgctgcgaccctgtttgatgcgggaacgggctggggagctgcgccgccgccccttctccccctcagctttgcctccgctgatagctgtcccagcatcgcacaatagtgagtcatcagtctctggcagtgagtcagtacagagccgtagggagccctcatctcgggctggactaacatccgtagagacccccaactccatggacagggagccacccccctccgggtctggagagcccaggaggggctctgagccaggaaaactggcactggcatcaccctggctcagattagagatctcgttaacgatgtcggatttgatgagagtgggtggtgtgggggccaccggtgcacgtggctcttcctgttcttcacatggtgagccccgccctgctgtctgcttgcattcggggtagacctccataggggtcacaggggccagctcctcggggtccaggagcacaggggagcctttaagttcactagccaaactgccaggggtctgtccaggctctggctgtgaacccggagcatcaatcccatccagaggggctgtgtcttcccctaggccagagaagtcatccagggctggggcagggctgggggcggggcaggaaaggtcccccattggggaagggagaggactggtggcactgggttccaaggctgggcattcaggttctgaaactttctcagtctccatctcgtgcagctcagcctcatctgagacccccactaccttccctatgggactcaacggggagggaacggacagtggtagggcaggaggagagcactgggaaggaggggagttttggggaaccagggaatgctgaaggagtggcgaacactgaggaggaaggggctccatcaggatgggagaagccggccccactggggagcctggagatgggggaaggatcataggggggacaggctcagggtcagtgcagttagcttctggtggagggctgatgggtgtctccaggatgggggcagccaacggtgactcagggtcactgtcccctttggcaccaaaggggtactctaactcccccaaaggagacagggccggtggggacaagggagattcctcaggcggtggagacaggcgtgacaccacaggcaggggggataggcgcgatacctcaggtgggggggacataggtgattcttcaggtggtggggacataggcgagtcctcaggtggtggggacaggcgtgatgcctcaggtggtggggaaaggggagactcctcaggtggaggggacagaggagactcttcaaatggtgggaacagacgagatgcctccggtggtggagacatgggtgactcttcaggtggaggggacatgggtgactcctcaggtggtggagacaggcgagatgcttcaggtggcggggaagtgggcaattcctcaggtggcggggacaaaggagattcttcaaatggtggggacaggggcgatgcttcaggtggtggggatagaggcgtctcaagtgcaggagatgggggtgactcttccggtggagacaagggcgactcctccagtggagaaaaaggtgatgattcaggtgggggagacagaggagactcctcaggcggcggagagaggggcgattcctccagcggccgggacaggtgcaatgcctcaggaagtggggatgcgggcaattcctcaggtggtggcgacaggcgtgatgcctcaggtggtggggacgtgggtgattcctcaggtggtggggacaggggtgactcctcaggtgggggcagcagtggcatctcctcgtttaggggggcctccaactggggctcaagttggacccctgctttccctagtggtttggcttcacattgcaggggccctggttccttgggttgcatagaggtcacgtgcccaccctttggctgcccttggcatgcaacgtacagagcatcgggctcgtcagtgggggtatcgccaggctctgggggtgaaaatctgctacacaccggggtatgctgctcagcaacggagcggatagtctgacctccctgggctttgtgacagcggtgacagagagagtagttctcaaaccactccgagttgggattcagttctgctgagcccgccccacaggcccggcacacccggcacgccttgcacttccaagagtgagcaggcagttcctccatgggtggttttaggcagaaagtatggtatcctttgtcacacgtctcgcaaaccaacatcttagagtcattcccaggtttcctgcaggcttggcacactttgcattcagggcactgccagccagcacgtttgcgggcagtcagagcagtgtccaggcaggccccgtgatagtgatgcccacagctggtacagaagaacaggtcacacagctcccctggcccctcacacactgcacagcgagcctcctccagatatgcagccccctcactgtgctctgggcatagcagctgcagtgttttcatggataggaaggaaccgctggcagtcgcgcaggggaagtggtaaagccgtggacatccaggtgagcggcaagggatggaggcaccgagcctggtgcagtgggagcagcgctgtgagatccctgagaagatggccttgtccacaccacatagttgtgggccctcctgcccccatacgcctgccgaccatgcagcacaccaatggtgagcccagcaggaccctccaggttctcctaggtgggcaggtgtaaggccctcagggaaaccaatctgtgataggtcctcactgggcagcactgcctcattgggccctgggctccccccaggggacaccactggacaccggggccaatcaaatggcaactcaaagcgccgtagctcccgctgcccgtgtagagcgggctccccgcagttacagagagcacaacgccgcaccggacccccactgcagtcctgaggagtctcctgaagcctgggactcccagaactaaggacagagacctctcccacatgtgggttgggcaggtctgactcagtggcacttgggtcctcagaggctgcaggtccatcagctgccggttgtgaatctttatcctcaccagccaggttctggctgtccat

SEQ ID NO: 153773 - DNA, 4016 bp, Homo sapiens
  misc_feature (1)...(4016): n = a,t,c or g
tcatttcatcttccatcgctgataccctttcttccagttgatcgcatcagctcctgaggcttctgcattcttcccgtagttctcgaaaaaggctttcagctccgtcagctcctttaagcaattctctgtattggttattctagttatacattcgtctaaatttttttcaaagtttttaacttctttgcctttggtttgaatttcctcctgtagctcgtagtttgagcatctgaagccttctactctcaactcgtcaaagtcattctccatccagcttcgttccatgncgcgcagctttcgcgcgatcggggaggtgggaagtatccggggctggggtggggggtacgccgcacagctccagtcgccgtcgcggcttccggtgctaggtggagggaagaaaggagggagccggggagtgggccagggcagcagccgggctgaagtcggcttggggagccagagggagcggagcggaacctgcggtgcagaggcggcggccgcagcggcgcagctgatagcaggaacaggatcaagtcttccataccagggaccaggccaaaaccagactgctattgctcctacttgtgccccactgtccccatgtaaagcagctgctgtgatcatgggcaatatctttggaaaccttctcaagagcctgattgggaagaaggagatgcgcatcctgatggtgggcctggatgccgcaggaaagaccaccatcctatacaagctgaaactgggggagatcgtcaccaccatccctaccattgggttcaatgtggagacagtggagtataagaacatcagctttacagtgtggggatgtggggtggccagggacaaggattcgacccctcttggagacacttacttccagaacaacccaagggtttgatattttgtggtccgacagcaatggatcggggagcgagtaaatgaggccccgggaagagctgattgaagaatgctggcgcggagaccagcctccgggatgctgtactccttgtctttggccaaacaaacaggatctgccctaatgctatgaacgctgctggggatccaagacaaactggggcgtgcattcccttcgtcaccgtaactggtacattccaggcaacctgtgccaccagggggaaccgggctgtacgaaggcctgcactggctggcaaattcggttcccaaacaggaagtcgaaagccggacggccctaacaaagcactccacctctcccctgacatacctactgtcaccctgcccccagttcttacccttactctccatgcaaggtttggcaagggcctggggtatcatgtccacattgcccagcagaaccctgcctcccctgacctccctccccttttcctgtccacctatatgaccaatccctaattgctgtcctgatgatgagtcattccaatttactggatttaaaacaaaaagttgttacggtttcatggggtggcccctctctctctctcaccctctgggttgtcgggaggtcgagtggggtattctctttgtttggcagaggttgctgtcctcttggcatctgagtcctttccctgtccccacaagcccttctactccctgtttgcctttcctttgccaccctctccctggttttacatggaaattgcacgggcctctctgtgtttgcgtgcatgtgtgcgcctggtatatacatgtataagagagatatatttgtgggggccggggggagcggggagggggtggagtgaagctcagggcttgcagccaggacactgcccactggagcctgtcatctgccccttccgtgttggtgagattaagggaagaaggtgggagggcattagtcaagccggactgccccagtctttgactggttaccctcctctctgcaggtaggtttttctggatgataggacagatgatggattcttcaccacccattttccttgtactcttctctccacccttcttagggctggaggatggcatttatcttctagatgactgttcccaaggagatgccactctgctctgccttactgttgggaaggagagaggaacccactcactcttatcagcttagagtgttcaactgatccttccccaccatcttcagatctgttcctctggagcttgactgaggggtgggaatgacaagtccatggtgtgtgttatggaactcagggcattgggggaagggaggcgaaggcctgaggttttccatcttcattctcttttgttattaggagaaggtgaggcatgggccaatcccattcctgccttccagtgccccaccacccttctgatcttaggggttggatgggtcatctgtccttggtcagaattttctcaccctagtactcctactggcctgaccagggctgactgggtattctaatgaggagctgggaagtggggtgacatagctgaccttagtatcaacccccgctcttctccaactcttgttttctagtccaggatatgctaaaggacgaagattttctattgtttccaggccctcagaccatccttgctgtcccttcaccctccatgcctctgccatcctcactcacttctcataaatggatctgggggttagagtggaggaaataaaatcctgaaagtggttgtcagtgcttgtgggatgcagtgggtcttcagggattctccccgcattattaatgtaagttggttcagaaagctgttgctactgcgtctctctgtctgcaaggggggcaacttgttcctgaaggtcctcgcctgggtcctgacttctgtagtttctgtgaagacgtggctgtcctgtgggctcctgtgtgtgctggctgcgcctggaggtccgagacaggctggccataagctgctaaggtcagggcccagggccctccaacaagcaatggctgaagggaccccttgcccagtaagggctgtcccaagccccactccatgggggccaaggtttcctggccacttttgttgatagcagatggatcaatattagtaaccccatccaagattgaactgtgaaagagaggttccagggggtaatctccctcagtgccagttaacttagtgatgtgttacccaggatgcagcaggtgtgtgcaggtatcttgctctctaggcctgtgtgtgtgtgtgagtgtgtgtgtatatgggtgtgggtgtgtttgtgtgtggtggttgtggggggggtgttggaggttctatttcatttaaaaatgtattcattttccctgggccccacagatgcttccctccatactttttatttgctctgtttcctcagatttattttgtcttgccccattgcctctccttccttgaactctttccttttcaatctcaactcattcacctgctgttgctcatttgccctttttccattgtattttttcctacttaggattttccactctatctttgtggttcatgaggactttgcctcttctcctgcctcattccctggactttctctagtttagatgtccagtcctaaaataggttttcctcacttcagggcctcacccctcaccttgtttttttgggggctccaaggaaccaatctggggctggaaaatgttagggaggttgccttggttgctgccccagatctgtcccagccagggggcaagttaagtgaatcttgggtagtaatccctgggctggctaagcccttgggcaagggggtgggtcctttctacattcccattcacttaacagctcttttgggattgggtgtttcattccatttctgcccactccctctccatctccgtctctggtaggtttaaattttatgctttccctgattccagctttctgcttcctgaggactcccgctcccccccaccccaaagtttgtctgtggtgttatagtggtaactgcagttcctcctctggaatgtagactggtatatgtttaataactcaccttctctatccttgctcaaaatgtgggataacgcgatgactgtgaccctgggttggaaattaaacttggttttatgcagctttaaaaaaaa

SEQ ID NO: 153774 - DNA, 617 bp, Homo sapiens
gtttcacctttagaatgagaacaggtcagcctctcgcggtagaaaaacccaaaaatgggtgacggccctgcctcaataccttccgcgttcctcctggctctaaacgcaaatgccaaagaatgactcttcctggaggagaaaggaggccaggcagccgtctcctatgttctaggagccccgacccgcagtcaccaacgccggcacccccaggcgggtcctgctgacctcttgcccacagctttgtccacattcaggggcaaagtacaacaaccaaatccaatgcaaagttaagtgacgacagagaactcgggtggacagacacaatgcggaaaacaagacagaattcaagtaccgaggcacccagccaggcgcggcccgccgggctcacagtatctgtcacacctccggtccctcctggacctctccatgcaacccagctgcctcctgggcccatccccttggggaagaggaaggcagggcaggagaggcggctagatcccaggcccaccacctgccaggcggcagctccaacacggtccagtcccttctgtcctcctcaaaaggtgtggagataacgtagctctgtaatagattctatataggatatgcctcgtgcc

SEQ ID NO: 153775 - DNA, 853 bp, Homo sapiens; identical to SEQ ID NO: 133983

SEQ ID NO: 153776 - DNA, 1420 bp, Homo sapiens
atggcggctgcgctgttcgtgctgctgggattcgcgctgctgggcacccacggagcctccggggctggtgaggagcgggcgaggaaacagccctgtgggaagtcgaggttccaaggtcacagtgagggggccctggccacccgattcagcgcaggaaataccggcttcgtccaggcgccgctgtcccagcagaggtgggtggggggcagtgtggagctgcactgcgaggccgtgggcagcccggtgcccgagatccagtggtggtttgaagggcagggtcccaacgacacctgctcccagctctgggacggcgcccggctggaccgcgtccacatccacgccacctaccaccagcacgcggccagcaccatctccatcgacacgctcgtggaggaggacacgggcacttacgagtgccgggccagcaacgacccggatcgcaaccacctgacccgggcgcccagggtcaagtgggtccgcgcccaggcagtcgtgctagtcctggaacccggcacagtcttcactaccgtagaagaccttggctccaagatactcctcacctgctccttgaatgacagcgccacagaggtcacagggcaccgctggctgaaggggggcgtggtgctgaaggaggacgcgctgcccggccagaaaacggagttcaaggtggactccgacgaccagtggggagagtactcctgcgtcttcctccccgagcccatgggcacggccaacatccagctccacgggcctcccaaaagtgaaggctgtgaagtcgtcagaacacatcaacgagggggagacggccatgctggtctgcaagtcagagtccgtgccacctgtcactgactgggcctggtacaagatcactgactctgaggacaaggccctcatgaacggctccgagagcaggttcttcgtgagttcctcgcagggccggtcagagctacacattgagaacctgaacatggaggccgaccccggccagtaccggtgcaacggcaccagctccaagggctccgaccaggccatcatcacgctccgcgtgcgcagccacctggccgccctctggcccttcctgggcatcgtggctgaggtgctggtgctggtcaccatcatcttcatctacgagaagcgccggaagcccgaggacgtcctggatgcactcagaagatgcacgtggccggggctgatgagctgccccgagccacccctgggggtcactgagggcagggctggcagcacagatgcccctgctcggggcctgagtggggccagtgctgacaggctgtcctctcgtcctctttttcatggcggcggtccttcttcagatgacgacgccggctctgcacccctgaagagcagcgggcagcaccagaatgacaaaggcaagaacgtccgccagaggaactcttcctga

SEQ ID NO: 153777 - DNA, 1712 bp, Homo sapiens
tttcgtgccgcgggcggcggcggcagcggttggaggttgtacgcggattccggcgaggaataggaatcatggcggctgcgctgttcgtgctgctgggatctcgcgctgctgggcacccacggagcctccggggctgccggcacagtcttcactaccgtagaagaccttggctccaagatactcctcaccgtgctccttgaatgacagcgccacagaggtcacagggcaccgcgtggcctgaaggggggcgtggtgctgaaggaggacgcgctgcccggccagaaaaccggagttcaaggtggactccgaccgaccagtggggagagtactcctgcgtcttcctccccgagcccatgggcacggccaacatccagctccacgggcctcccagagttgaaggctgtgaagttcgtcagaacacatcaacgagggggagacggccatgctggtctgcaagttcagagttcgtgccaccttgtcactgactgggcctggtacaagattactgactctgaggacaaggccctcaatgaacggctccgaagagcaggttcttcgtgaattcctcgcaagggccggtcagagctacacattgagaacctgaacatggaggccggaccccggccaggaaccggtgcaacggcaccagctccaaagggctccgaccgaggccattacaattcctccgcgtgcgcagccacctggccgccctctggcccttcctgggcatcgtgggtggaggtgctggtgctggtcaccatcatcttcatctacgagaagcgccggaagcccgaggacgtcctggatgatgacgacgccggctctgcacccctgaagagcagcgggcagcaccagaatgacaaaggcaagaacgtccgccagaggaactcttcctgagggcaggtggcccgaggacgctccctgctccacagtctgcgccgccgccggagtccactcccagtgcttgcaagattccaaggttctcacctcttaaagaaaacccaccccgtaggaatcccatcatacacttccttctttgttaaaaaaagttgggttttctcccattcagcattctgtttccctagaattttctccttctgaaaatgttttcacgagaagcccgggaagcttgcttccctgcggcccccgtctggtggtttccagcctctgggtctgaagtcattggccgggttggggcgcaacagcctttctccactggccggaagtcagtgtccaggtcctttgccctttgtggaaagtcacaagctcacaggagggggccccgatgtcctgccttgtctgaaagccaaatgctgtctggttgcgccatttttgtgcttttaatgtttaattttatgatggccaccgggtctgtgttcgactcagccttcagggacgacttctgaccttcttggccacagaggactcaacttgcccacaccgagggcgaccccgtcacagcctcaaagtcactcccaagccccctccttgttcttgtgcatccgggggcagctctggagggggtttgctggggaactggcgccatcgccgggactccagataccgcagaagcctccccagctcacccctggaggacggccggctctctatagcaccaggggctcacgtgggaaccccccctcccacccaccgccacaataaagatcgcccccacctccaccctcaaaaaaaaaaaaaaaagggcggccgct

SEQ ID NO: 153778 - DNA, 1130 bp, Homo sapiens
tcagacaagtattctctcagatccacatttgtaatagggaaattgacaactagttggattcttctcaacaaagaagttgttcttagtgaatatcttgatacaaaagattagatatggaggcaacttggtaagctggaagcgcttcagaaagttctccttgtaagtcttatattccttctcagtgatgccattgaacttagccaggatgttgaagagtggcacttggggaatgatgagctgctccttctcgtccttgtagaggggggcagtaggaaggtccagcgtcaggtacataaaagtggactccaccattgtctcctggtactcgtcattatggagcaactgctctttttcttctgctggcagatcaggatggggaagctttttagtgaagatcctcatggacccctggaaaacatcagtcacaatagtcttctttttcttctttgtgccccccagagctgagtgcagagcattcagaaaccaagacagaaagtcaacgccatctccttgtttggtgatctgaaaagtcttcttactgcaaagtacaactgcctgaagcatctcatggggagacacatgtgccttgaaatttcgagggttccagagctttctcatcagctctccaaaacgctggaccaacaagaacatgatatcccctggaggacgtttgatgttcttataattgtcttcttccagaaagtagttccggagaggaggaacattagatagagcctgaaggacagcgttggcataatcattggcctttatgttattcagtcccacaatacccggcaggtaagtggtaccatcatatgcccgggacaatttggcttgcttgtccaagtttgcaatttgctgctttgtgaaagtgggcttcaaacacatacgtgatatcctccaatgaggaatcgatgatctcatagttgtctggaaggcagtaaaacttgagggtgtggaggttgaggaaaacatggtggctaaactggacactgtgaatgtaggcgtgagacttcaaaccccggcctgtagggaagggtgaaaagcttgaaagtacttgccacacaccagacaggcataagcattgatgtgtgagagggagatagaacacagtttctcaaagtcaaagt

SEQ ID NO: 153779 - DNA, 734 bp, Homo sapiens
agggatactgaaaggtctttattacccactggccaccaacagtttcccagccacatgctggcgcctctaggtctctccagcccactctaaggacccaagaaatgcagccacagtccatctctcttttttctctccttccgggggaccaaggtaccttctggggcatacaacatggcagcagggcctcgggaagaggggtaggaggaccgagcagcattctctgtagaggaagacaggaaaggagaccctcttggcacacatttatggagggttgtccctgaagagaggggcaggtgggaaaggttccctgttacttaagagaaggcgccagtggcaaagagcacaatgaagaggatgatgataaaaacaatcccgcagataaggacaataatcttcacgttcttccaccagaattttcgagccaccttctgcgatgtcgtcttgaagtgctcagatgtggcttccagatcctctgtcttgttgcgaagatgttccaagttttccccccgggccaggatccgctccacattctgggtcataatattattaactccctccacctcactttgcaggttccgcacacgatcatttcctccacctacaactggcttaatccatgtctcagagcagcccaggccggtcagtaagtgaattcgcctagtcggcttcctcccagggtggccctcagttcacttcctgcttgctccaactttcagcctgcccggacgcgtggg

SEQ ID NO: 153780 - DNA, 843 bp, Homo sapiens
  misc_feature (1)...(843): n = a,t,c or g
tttttactgagctccaggtggggctggcccagcatggccagtacagcaggctgccctcaagggcaagtctgtggcatgacaggaaatgcaggggtgcacaatgttggggctgccctttggcactcactggggtgggtcaagggagagcaaaacaccaaaggtccttttggagaccagaatcggccagtgcaagccatttgggcttctcccttcaggaccagctgggtcaagttccccaggccctggaggcaaatgcctgcaatcctgggtccgtggggcacttactgcttgtcacttgctcgtgagggagaaagacgaccagcagcacaatcaggatgattgagcaggacaccaaccaccaccagccccacgcagatccggtaacgattgttctcccagcacttcttctgggccaggttctgtgtaagtcttgttgaaggttgagctaccattattncaggagtttggtcttgaacgctgctgcagttcggccagcttcacaccacgctccaggaccttgccgaagttgttacgcataatttccgtcacctcgttcgcctgctgctggcaccgctccaactctattcctgcctgctccagaatggcgtctacccaatcaatgcacagctgccctaaggtttcccactggccttctggggcatacaacatggcagcagggcctcgggaagaggggtaggaggaccgagcagcattctcagtggcaaagagcacaatgaagaggatgatgataaaaacaatcacgcagataaggacaatcatcttcacgttcttccaccagaattttcgagccaccttctgcgatgtcgtcttgaagtgctcaga

SEQ ID NO: 153781 - DNA, 4170 bp, Homo sapiens
tcagttcccaggccctgaggcaatgcctgcatcctgggtccgtggggcactactgctgtcactgctctgagggagaaagacgaccagcagcacaatcaggatgatgagcaggacaccaaccaccaccagccccacgcagatccggtaacggatgttctcccagcacttcttctgggccaggttctgtgtagtcttgttgaaggttgagctcgtgatatcctccaatgaggaatcgatgatctcatagttgtctggaaggcagtaaaacttgagggtgtggaggttgaggaaaacatggtggctaaactggacactgtgaatgtaggcgtgagacttcaaaccccggccttctggggcatacaacatggcagcagggcctcgggaagaggggtaggaggaccgagcagcattctcagtggcaaagagcacaatgaagaggatgatgataaaaccaatcacgcagataaggacaatcatcttcacgttcttccaccagaattttcgagccaccttctgcgatgtcgtcttgaagtgctcagactgaacaagaaccctccggcacagacctcctttaacaagggattttgccacccaacgagcagcataagcagctgaacggtcgaccttggtataatcctttcctgaaaaggcacctcctccatgagcaccccaaccgccataagtgtccacaatgattttgcgtccagtcaaaccagcatcaccctgaggcccaccaataacaaatctgccacttggctgtaggtggtagattgtatcctcatcaaggtatttcgcaggcacaactgctttgatgactttctcctttagggcatccctcatttcatcaagacaaacctcttcatcatgctgaacagatataacaattgtgtggactctgatgggaagcacagcacctcgatcctgcatatactgcacagtaacttgagttttagaatcagggcgtaaccaaggcaaagtgccattacggcgtagttctgccagtttggcatttagcttgtgtgccaagacaatggttaaaggcatacactcctcagtttcatcagtggcatagccaaacattaagccctggtctccagcaccaatgtcttcttcatttctgtcaagatgaacaccttgagcaatatctggtgactgttgctccaaggctaccagcacgttacaagtcttgtagtcaaaaccgcccgctgcttcgttcgctccgcgccgcccgcctgctacgagtagaacgctgtccgcagcttgcgcatttcgcagccgctgccgcctcgccgcctgctccttcgtaaggccacttccgcacaccgacaccaacatgaacggacagctcaacggcttccacgaggcgttcatcgaggagggcacattccttttcacctcagagtcggtcggggaaggccacccagataagattttgtgaccaaatcagtggatgctgtccttgatgcccaccttcagcaggatcctgatgccaaagtagcttgtgaaactgttgctaaaactggaatgatccttcttgctggggaaattacatccagagctgctgttgactaccagaaagtggttcgtgaagctgttaaacacattggatatgatgattcttccaaaggttttgactacaagacttgtaacgtgctggtagccttggagcaacagtcaccagatattgctcaaggtgttcatcttgacagaaatgaagaagacattggtgctggagaccagggcttaatgtttggctatgccactgatgaaactgaggagtgtatgcctttaaccattgtcttggcacacaagctaaatgccaaactggcagaactacgccgtaatggcactttgccttggttacgccctgattctaaaactcaagttactgtgcagtatatgcaggatcgaggtgctgtgcttcccatcagagtccacacaattgttatatctgttcagcatgatgaagaggtttgtcttgatgaaatgagggatgccctaaaggagaaagtcatcaaagcagttgtgcctgcgaaataccttgatgatgttacaatttaccacctacagccaagtggcagatttgttattggtgggcctcagggtgatgctggtttgactggacggaaaatcattgtggacacttatggcggttggggtgctcatggaggaggtgccttttcaggaaaggattataccaaggtcgaccgttcagctgcttatgctgctcgttgggtggcaaaatcccttgttaaaggaggtctgtgccggagggttcttgttcaggtctcttatgctattggagtttctcatccattatctatctccattttccattatggtacctctcagaaagagtgagagagagctattagagattgtgaagaagaatttcgatctccgccctggggtcattgtcagggatctggatctgaagaagccaatttatcagaggactgcagcctatggccactttggtagggacagcttcccatgggaagtgcccaaaaagcttaaatattgaaagtgttagccttttttccccagacttgttggcgtaggctacagagaagccttcaagctctgagggaaagggccctccttcctaaattttcctggcctctttcagctcctgaccaggtgcaggcactctagtccatgacatgaattttaacttttgtgggggacttgtaagttgggcttgctattctgtccctaggtgttttgttcaccattataatgaatttagtgagcataggtgatccatgtaactgcctaggaaacaacactgtagtaaataatggctttggaaattggaacctttgtgccctatcacccaacgctccaaagtcataattgcattgactttccccaccagatgctggaaaatgtccttgtgatgtgcacgtaaagtacttgtagttccacttatagcctctgtcctggcaatgccacatttcctgtcagcatgaatttgtaatgtcttgagctctattatgaatgtgaagccttccccttatcctccctgtaacttgatccatttctaattatgtaggctctttgtcaggggagtgttccctatccaatcaatcttggcatgtaacggcagttcccagttgggagctccagcctggacatcaaaaaaggcagttaccattaaaccatctccctggtgcttatgctcttaattgccacctctaacagcaccaaatcaaaatctctccactttcagctgtcttttggaggacgtacgtaataagggtttaattttagtaaaccaatcctatgcatggtttcagcactagccaaacctcaccaactcctagttctaggaaaaacagggcacttgggcagccttgtggatgttcatacagagaagtcacagggcagtacctgagggtctgtagggtggcacactttggtaccagataacttttttttttctttataagaaagcctgagtactccacactgcacaataactcctccccaggggttttaactttggtttaattttcaaaaccaggtcccaatggagctttcttgaacagctgggtgtagcttacagagaaacccagcttcctttcagaggagccagtgccttttggccggggagggaggaaatccctttcatacttgaaacgttttctaaattgcttatttaattgtattctgggggtatggcgtaaagtacagagaagcccatcaccctcagatgggcagcttttaaaaagattttttttttttttctctcaacacccatgattccctttaacaacatgtttcccagcattccccaggtaggcccaaggtgtcctacagaaaaaccttgggttagacctacagggggtctggctggtgttaacaaaagggagggcagagctggtgcggcctggcccatggaaaaagcctgacttgggtggtgtgggtacagagaagccagcttgtttacatggcttattccatgactggcttgccctaagcaagaaagtgcctttcaggatctattttttggaggtttattacgtatgtctggttctcaattcctaacagtttaatgaagatctaaataaaatggctagggtctaaaaaaaaaaaaaatcttttaaaagctgccatctgaggtgatggcttctctgtacttacgccataccccagaatacaataaat

SEQ ID NO: 153782 - DNA, 533 bp, Homo sapiens
gctcgaccaaatgtgtggagattgccatagagtagaagctaaggatttctggaaggctgtgattcaagtgaggcaaaaggtaatgagagaagatgatgagtgagtcctacatcttatatttcgtctttgttaattataacttttccttctttctaaatccagggatagtctgggtccctgaagcattcacctttggaaatagatcattattacattttagataatctttagagattgttattgtttgaaaaatcagtatgctctatctgtagatagtatgtgtgtcctatacctataagtggcttttttgtggggcatttattgatcaaataatttatattttagactttgcataaaaaaactttctactatctggaacagttaattctgaaatatggaatgcatcagaatacacttcgtatcaaagagattcatggtgagttaaaactcaaaagcatttgaaattatgtcagatttttatttcaacatacctaagtaatcttatatttactgataatatctggattagtacc

SEQ ID NO: 153783 - DNA, 3245 bp, Homo sapiens
agatgactgaacagctcgagcctattttgatgcaggcctttatcaaatccacggctggtctggaggcgcgaaaacttaaggcatacagaacgatggaatatatggcaaaatccaccgaccgcagccctggacacatcttgtgctgtgagtgtggtgttccgataagtccaaatcctgccaatatttgtgtggcctgtttgcgaagtaaagaggacatcagccaaggtattccgaaacaagtctcgatttcgttctgcaaacaatgtcaaaggtattttcaaccaccaggaacttggatacagtgtgctttagaatccaggggaactttcttgctttggtgcttggaaaaaaatccaaagcccctctggagtaaggtacggcttgtagatgcagggctttgtttggactgagcctcatttttaagagacttaaagttaaactgactattcagaaagaggtgatgaatggtgctatccttcaacaagtgtttgtggtggattatgttgttcagtcccaaatgtgtggagatggccatgagagtgagaagctgaaggatttctggaaaggctgtgattcaagtgaggcaaaagactttgcataaaaaaactttctactatctggaacagttaattctgaaatatggaatgcatcagaatacacttcgtatcaaagagattcatgatggtctggatttttattattcctcaaaacaacatgctcagaagatggtcgaatttcttcagtgtacagttccctgtagatacaaagcatcacaaagactgatctctcaagatatccatagtaacacatacaattacaaaagcactttttctgtggaaattgttccaatatgcaaggataatgttgtctgtctgtctccaaaactggcacaaagcctgggaaatatgaaccagatttgtgtgtgtattcgagtaaccagtgccattcacctcattgatccaaacaccctacaagtggcagatattgatgggagcactttctggagtcaccctttcaatagtttatgtcatcccaaacagctagaggagtttattgtgatggaatgcagcatagtccaagatataaaacgtgctgcaggtgctgggaatgatatcaaaaaagcataccctcggggcaagtctggggtacagaaggacatctggaaatgaattacaggattaaacagtatttttgtcgtacttcatttggggacatcttgcttaaatcccggagacccgggtgttagggtttgatttggccaacttgtaacttaaatgatgagcatgtcaacaaaatgaactcagatagagttccagatgtggtattaatcaagaagagctatgaccggaccaaacgtcagcgtcgtagaaactggaaattgaaagagcttgcaagagagagagaaaacatggatacagatgatgaaaggcaataccaagattttcttgaagatcttgaagaagatgaggcaattcgaaaaaatgtcaacatttacagagattcagccatccctgtggaaagtgacaccgatgatgaaggagcacctcgaattagtctggctgagatgcttgaagaccttcatttttccccaggatgccccttggtgaaggaaggtgcatcaatgctgacataatgagatgttgtagactgtttccatacatgggcttaagaagttggacagagttaccttaagtgtctctactatctttgcctccagatttcaagaggagaaatttagttttaaacctgaataaacatgtttgttttcagtgctcactcaaaccactaaaacagatggatagctttgaggttttagataaggaaagattatggagaatgtagttgttattgatttttgggcaattttacatttgggaattttatccactgtggcttttttatatgaggcactgtagtattttccacatagtatagtactctgggatgttaaaagctcaaaaattgtgattccttgaacgttcactaaatcttcaagcaaaaacacatttttacattatttttacgttgattattttagtgaaagaccatatgaagaagcatttttaatattaacttgttacatactttgatccactttacatcatttttatgttgttgaggtagggaaattagggttcagtttatcactggacattcaggaggcaagtcaatcttttttatttcccttataaaattaactcttcaaaagctgttaaacagagagttatcttaatttttattgcagtaggaggaaatatatttaaaatatttgtagatttatagcaaatagagactcgttatttaaaggttaaataacaatttgttcttttgttgtttttgccagtttagggcagtagctgcttttgtcataaaatatcttcctaccacaatcaaaaagctgcttttaaaatttttgtttataaattgagaaggaattttcctcccctataagtttctgtcattgaacagattcacccattaaaaagaatattagaatcccagcatgaagataatggcctaataaaaatgaggtacatactttataaaaccattaatcagatttgaatgaggaatgcttcccacatccttgaaagaaaaactgtggcttacgttttgaagtattctgagaatgaagtattaagatccaatttctataagcaagatcagacttgttaagtatgccgcaagtaagagctaattcattcattccatgtgtgccactaaataaagagattgagcaagtgccactgtgtggaacatttttcttttttttaatattggactttccaattttgaaattatggataaagtcctaaattttctatagtggcttcttttctgtctgcatattttgttaaaattgtggatctaaaagccatatcctgtctttggtggtggccctggtaggaatggcttgtcctagttcttcaaaggtaagattgaccaaagcaagttctcattggtggtctgtgtttacatcttccgtgtcaagatattttaaagcatgaaaataaagccattcttgccctttttcgtgtgtttgaaatggtcgcattggtgtcatatttacatgagaaagtatcttacgcaattttccaaagtagaattgttaatgttatttaagtacttttataatcttcccactgaaaaatatagtttcccactaaccttaggaaacaaatatatcacgaaatacacaatataaactcaaaggggggtccctccataaaaacacctctaggcgc

SEQ ID NO: 153784 - DNA, 456 bp, Homo sapiens
aatgggacgatttcgtcgtttgtgcccggggtaaccccgttccgtgccaagccgcttcagcgggggacgtacccatgaaggaagagaaggagcacaggcctaaggagaagcgagtaaccctggtaacccccgccggggccacgggcagcggtggtgggacctagggggacagctccaagggggagagataagcaggatcgcaacaaggagaagaaagaagcgctgagtaaggtggtaattcgaagattacctcccactttgaccaaggagcagcttcaggaacatcttcaacctatgcctgagcatgattattttgagcttttttctaatgatacgaggttgtatgctcatatggatgcccgaagcttacatcaactttaaaaaccaagatgacattattttgttcaaggatcgctttgatgggaatgaattccttgggaataaaggtcaagaata

SEQ ID NO: 153785 - DNA, 2249 bp, Homo sapiens
tttcgtgtaaccccgttccggccaagccgcttcagcggggtacgtttccatgaaggaagagaaggagcacaggcctaaggagaagcgagtaaccctgttaacccccgccggggccacaggcagcggtggtgggacctcgggggacagctccaagggggaagataagcaggatcgcaacaaggagaagaaagaatcgctgagcaaggtgcccggtcggccgctggcccgggagagggcgggacgagtccgcaccgcggggaggatggctgggaatggggctgccccctttctttctcaggttctccttctatctcttcgcctgaatggaagtcgcatcatcctggttcatccattcacccgaaatggggagagcccctcccggccaaatcctgggtggggtttgtatcctcatatgtatgccagagcatacatcaactttaaaaaccaagaggacattattttgttcagggatcgctttgatggttatgtattccttgacaataaagctaaaaagacaaccccacttttgagcttcctgaaaaacaagcagagaatgagagaagaaaagagagaagaaaggaggaggagagaaatagaaagaaaaagacaaagagaagaagagaggaggaaatggaaagaagaagagaaacgaaaaaggaaagatatagaaaagctaaagaagatagacagaattccagaaagggacaaattaaaggatgaaccaaagattaaggtacacagggtttctgttacaagctgtgaatcagaaaaatctgctcaagaagccagaaaaaaggagatgaaaaagaattggacaaaagagaaaaagccaagaaattggacaaagagaatctcagtgatgaaagagccagtgggcaaagttgtacattgcccaagcgttctgatagcgaacttaaagatgaaaaaccaaagagacctgaagatgagagcggcagagactatagggagagggaacgggaatatgaacgagatcaggagcgcatacttcgagaaagagagaggctgaagcggcaagaagaagagcgccgtaggcagaaggagcgctatgagaaagagaagacttttaagagaaaagaagaagaaatgaaaaaagagaaagacacacttcgggataaaggaaagaaggctgaaagtacagaatcaataggcagctcagaaaaaactgaaaagaaagaagaagtggtcaagagagatcgaataagaaacaaggatcgtccagcgatgcagctttaccaaccaggagctcgaagccgaaatcgactctgtccccctgatgacagcaccaagtctggagattcagcagcagaaaggaagcaggaaagtggtattagccatataaaagaaggaggagaggagtgataagtccagatggccttaggtgtcctgactgtctaggcagccaaagagcacacgttaagcaatccagaggtgccttcagggcaaagaatagagagaaagggagccgctgtgctggtggggtacactgcagaggagtaagtcttgtgtcaaagcaggaatctgatcagaggttcagaattggaagtacaatttcattgcttttgcaatttctacaaattaattttaaagtgtcagaaaaaggtgacggcaaggacatgcattgcaatttgcagggggaattgtcaagtgaggacttcatcacatatgacacgagagaaaagtaagagctggttctaaaatcaaaagctgttgttcatcctgaattgaattttctgaatttgggtggagcagagtcgctttgaagccttgttccgatctaattctattgtattgttgatgataagtgttgacattgggtagtgtagaagcaacaagcatgtccttgtagtacaggtacagtgaaggatagaaccacactttcggttgataccaaaaatttaaatagttatgttacttctgtatccaggtgtcctaaagttttaggatcagttttagttttttgtttgcttatatgagcttagcgtaaagaatatttttaaacttcgtgttttgtccatcagcatcttttctattaaggaggttaaaattgtagtccttgtttgactctttgacaatccagtgtgtttgatcttaggtctcatgatctgagtgcataccctctccaggaaggaaactgcaccagtgtctattcctgttaaatagcaacttttagtctcagcttgtttcgttttgatgtcaataaatagtaacagcattcaagtgtgaaaaaa

SEQ ID NO: 153786 - DNA, 3731 bp, Homo sapiens
gaattcggcacgaggagattatcaaagtgacacctcttcaacaaatgcttgcctcatgtactggagctatactgacatcagtaatagtgacacccctggatgttgttaaaattagactccaagcccaaaacaacccactccccaaaggaaaatgttttgtatatagtaatggactcatggatcatctatgtgtctgtgaagagggaggcaacaaactatggtataagaagccaggaaatttccagggaacattggatggcattttttaaaatcattcgaaatgagggcattaaatctctatggagtggccttcctcctaccctagtggtggcagttcctgccacagttatttattttacctgctatggttcaattaagtgctcttctgagatctaagttaggagaaaatgaaacctgcataccaattgttgctggaattgtagccagatttggtgcagtaactgtgataagtccactagaattgattagaaccaagatgcagtccaagaagttttcttacgtggaactgcatcgatttgtcagcaagaaagtatctgaagatggttggatttccctttggaggggctgggctcctactgttcttagagatgaaccttttctcagcaatgtactggtataactatggaattttaaagaagtggttatgtgagaaatctggtttatatgagccaacatttaatgatcaacttttacttcaggggcattgtctggttcttttgctgctgttgcaactttaccatttgatgtagtaaaaacacaaaagcagacacaactttggacatatgaaagtcataaaatttctatgcctttgcatatgtcaacctggattataatgaagaacattgttgctaaaaatggattttccggattatttccaggccctaattcctcggcttaattaaaattggctcctgcttgtgccattatgatcagtacatatgaatttggaaaggctttttttccagaaacaaaatgttcgaaggcagcaatactagtgatgctgtttcaacttgaaacaacaacctatagccaaagaagaatggagactcttaaggcaagaatggtttttcaccattaattctctcacaaatgattttatgtctttctttcctataatttaaataaaccatttcagctctacctctaaatcataatggtaaaataacttttgtcttattgttggtgatattgaaaaagatattgtagaaatcacccccattgagcattcttgtaaaaatagattcctccttagcatcaaaagcagtctcttgaaagtttaatattatatgtttcagtgtaacataatcttactgggagtgtgttgaatacgccagaactttttgaattgtgtgctgaatgatgtacatagtctagaagaaaaaagcccaagtcttgtgcacatttaaatcgtgtacataagtatttccgtatttcagtaaagtagataaagcactcgttaaatagcattgtttacatcgaccaaatattgcctgtttcctttaattcaaatgcattaggttcccgcctccctctccttccccgccatgttgctgttttaaggcttcatatgtattaacatttctctgatcaaaattgtggctgttttccttatgaaccataatataatcatttgtgtgatgtacattgtgccatttttgatgactaaatgtctatatttttgccattcctgtaagagagggagtttttttactgatagtagcaaatgttcacttcagtcaaacttgggtgttcagtggtaaaccatatagtatttagactggtaaaaatagtttgcacacaggaatagcctctgatttttagctctcttgtaatccaagtatcattgttcatggaattctctaggtcatttttattgtgttgttctaacaagacagattattgctacaacaatagttacaagacatttctaaaatatcctttgatttttactctaagtatggtagagtaagaggctaaacaagaagctgtttccttgaagacattgctttcagtcaccatacatgtctaaataatttagcttatcattcattctatgtaggaatgagataagaaaggatatgatggcaggaaaagaaatgctattcattttttatactttagttttattttcctagggatctatatcctatatatatatattttttaaagcactaatttattgcagtctttattttagaaaaatgtgaagcatttttttctcccctaaaatgaatatatttagatgacaagtctttagtgctggtagaggaactaattgattttgtactatagtaggaaagtgtttatatgtttcaccagaaataaaatatgtagggtttgtatgtaatcttctgtgtttatcctatgttgatttaccttaaatttgcaacatacatatcccacataaatattccatgactttcttatatttcattaaaatgttttatggcttccttaaaatcatcactgtgcttcctaaatatttttacgtaaaatcattgtataatgctatactgtgatatacatgaaagtttatcttgaccagtgctctttaccaatattaaatttaaattttatttgggttttgctatgcttatgggtaattcatagaaaacagaaaaaatactgttcccaaaaggcagttatatatttcagtttaatatcacctataagtatgagaaaggtttccatgtctcctacccctcactgcacttaggaaaattcttatttatgaataaagtaagataagtaaatctaattgcctagtcgtttttttaacacatatacatgcaatgtatctggatgaatagaaggctgaattgaagctttctttatatttaagaggtaaaaagaaatattaatacttttaaaatatactaacaaccaaaaagtgttcagaattttgctatagtaataatttgtattaaaatagtacctagaaaaattcagtctatggaataggtaaaattttaaaattttaatttgctctcagagttctgtctgataaaataattgaactataattggcatgatgaatattcccaggttttacttcagtatataaatttaactctcagccacatgggctttccagacttttcaatacatatgatgttgcaggaattgcaatatttgcaaacatgtgccacaacagtgttcttgtgtgatgtttctaaaacagtttttattctattaatgttaaattttctaacataaacatttaattgattaatgtaaaattttaggaaggaacatctttaattttcaatatgagatggttgcaacctttaaagtagtacatatttgattttttttaaaaggcaatatttttttttctaggaaaactattcattatggttatttaactgcatatgttttttaaatttttccctctcggaacaacatgtactggggcctatcaaagggtggagggtgggaggagggagaggaacaggaaaaataactaatgggtactaggcttaatacctgggtgatgaaataatctgtataataaatccccatgacacaaaagtttacctgtgtaacaaacctgcatatgtacccctaaacttaaattcttccctctttttgtcttgggcacaagtttttgggatatggaaaagtttattgtatcccttttgaattttcttctaagatgaactttttaaataaaagatattactgcttttaaaaaaaaaaaaaaaaaaaac

SEQ ID NO: 153787 - DNA, 1373 bp, Homo sapiens
ctgggaagggagaatggcggcgcccgggctgcggctgggagcgggaagactctttgaaatgcctgcggtgctagagcgactgagccgctataatagcacgtcccaagcttttgctgaggtgctgcggctgccgaagcagcagggtggaggaagctgctgtacccgctgcaggaagtagagcggttcctcgccccctacgggaggcaagaccttcacctgcgtatctgtgacccaagcccggaggatatagccagtgtcggacaacatcttcacgggccactgaacggaaccgcatcgactacgtcagctccgccgttccgtatctgaccacgcccccggaccttccgcggccagaagtgtgtttttataggcatgaagcaatgtttggaaaatcatctctaatcaaggctttattttcactggcccctgaggttgaagtcagagtctccaaaaaaccaggacacacaaagaaaatgaattttttcaaagttggaaaacattttacagtggtggacatgccaggttatggctttagagcacctgaagattttgttgacatggtagagacctatctaaaagaacgaaggaacttgaagagaacatttttattagtggatagcgttgttggaattcaaaaaacagacaatattgccatagaaatgtgtgaagaatttgcattaccttatgtgattgtattaacaaaaattgacaaatcttccaagggacatcttttaaaacaagtgcttcatatccagaaatttgttaacatgaaaactcaaggatgttttcctcagttgtttcctgtaagtgctgtgaccttttctggaatccacctgttgagatgctttatagccagtgtaacaggaagtcttgactaatgggttcccggtttagctgaagattcaaaaaaaaaaaaaaaaagctttatgcctcccgggggtaaaacacctagaagaatttcaacattgttttaaatgttgtgcatctgtaacttcaggaggatcacttgagctttaaaacctgtgccttctcgaaacaagaatttgtgcctgaggtgaaaaaagtttgtaagttattgaattatggtgttcattagaccagctactagctgattcccctattttaacaaactgacaagagcacatccataaaatgaaaccctgttacaactatgtacagaagggtttgacgttttattgggcttttgtcttttaaagaatatgtctactatgggtattttttttttaaatgttaaaatgggctaggtaaaagggggctgcttttctgttaagcatcgataggtaagttgatggataaaagttactatgtaagcctatttttttgagtccttatttgaatattgaaaacattct

SEQ ID NO: 153788 - DNA, 466 bp, Homo sapiens
tggggagtgtgctgaagaagaccactggccttgtgggattggctgtgtgcaatactcctcacgaggaaccagatgttaaaaaattagaagaccaacttcaaggcggtcaattagaagaggtgattcttcaggctgaacatgaactaaatctggcaagaaaaatgagggaatggaaactatgggagccattagtggaagagcctcctgccgatcagtggaaatggccaatataattattaagtgactttggtgtgttcatgggaaactgatgtaattaaatattctgttatattaagagcgtgttcttattactgacattttgtaatcaagaaaagtgatatagaaaatatgtaggagactgttaaaattggtgattatggtaatatggtcatgtgaatcaatttttgatttataaagtactcacacaagttgtttcaaagatgatatttctgtgaacagagaggcc

SEQ ID NO: 153789 - DNA, 1580 bp, Homo sapiens
ggagctaagctgtttccagggtgacagagtggcgacctcggtggtcgattgagcaggtctgagaattgttcccaaagggttgtgcgtcaccgagtcgttggcgctgtcatggcgggtgtgctgaagaagaccactggcccttgtgggattggcctgtgtgcaatactcctcaccgagaggctaagaatattgtaccacaaagattccttgatgttcttgaggaaatccctaaaaaatgcagcatatagaaagtatacagaacagattacaaatgagaagctggctatggttaaagcggaaccagatgttaaaaaaattagaagaccaactttcaaggcggtcaattaagaagaggtgattctttcaggcttgaacatgaactaaatctggccaagaaaaaatgaggggaatggaaactaatgggagccattaagtggaatgagcctcctgcccgatcagttggaaatgggccaatataattattaagttgactttggtggtgttcatggggaaactggatgtaattaaaatattctgttatatttaagagcgtggtccttaatacctggcattttgtaatccaggaaaagtggttatagaaaatatgtaggagactgttaaaattggtgattatgggtaatatggtcatgtgaatcaatttttgatttataaagtactcacacaagttgtttcaaagatgatatttctgtgaacagagaggccatgggaagatttgaaaattattaaagaaaaattcctacagattttcaatgcagagaccataatcaaaaagtaaactttctttagtagtatgttcaatacatcatttaattttttaagttatcctgaagaaggaaaggtccttaattattatagtctaaacaaatttatagattactgtttgaagtaaataatacgagtgaatattttcaaatgtgataaaatagcacaagtggctggtgataaaatttgaaattatggttaacctcagctgtgatcttatgtatgtaaagtgaaatttaaatagataattataggttgattacaaaatccatagtgtcattttattttagtcattattgaattataccatttactctgttttcttatagtcttaattttattatattttgttgttactgtattatatttgaaaaccttcaaattagaatacattgtacagttaaagaaattgacttggtacttaaaagaaagatttcccattgcatacaggttattggagaaattttccttttgttgcatttgtggaagttagttttctggcccgtggcctttaattttcttaatcaacctaattacatcaggatagaggtagagtttctgtaaaagaagagacattaagagttcctgaaatttatatctggcataccgataggcttatattcaaaacatcttagtcatacgaccataaattaaaagtggagtcactaaatagtttgcagtacgtttctaatataagtgtaggtgggtatcaaaacaagacaaatgctgttcagggaaagaagttggcaagcttaaggttaaacaaaaataaaattacatgtgttttcgccttccta

SEQ ID NO: 153790 - DNA, 367 bp, Homo sapiens
ttacgccggcttcagcctctctgcgcagaagtgtcccggagccatggccgagtaatcttatgcgaagtctaccaagcttgtgctcaagggaaccaagacgaagagtaagaagaaaaagagcaaagagaagaagagaaaaagagaagaagatgaagaaacccagtttgatatgttggaaccatagccattgaaatggatgagggaacctatatacatgcactcgacaatggtctttttaccctgggagctccacacaaagaaggggaaaatggctttgttggcctcaaatggctgctttattagatgcaatgaagcaggggacatagaagcaaaaagtaaaacagcaggagaagaagaaatgatcacg

SEQ ID NO: 153791 - DNA, 425 bp, Homo sapiens; identical to SEQ ID NO: 150753

SEQ ID NO: 153792 - DNA, 531 bp, Homo sapiens; identical to SEQ ID NO: 150863

SEQ ID NO: 153793 - DNA, 877 bp, Homo sapiens
tgctgctccgggtcacatactcgtcctgagccggcttcagcctctctgcgcagaagtgtcccggagccatggccgagtaatcttatgcgaagtctaccaagcttgtgctcaagggaaccaagacgaagaggtgggtcctgcacctccggcgggagcctcctcagttcttttcggacgcactccacccccctcgaatccggtggaagccgtggcgcggagagccggctttgtggcctcccaggctttgccctggcccctgtccgggctggactgaggccggaccgcggttcctggcgcctgtgcagagaggggcagcctcccgcactgacgaccctggaaacaggatagacgggcgggtgacccgtggccccgtacccacgagtttcggtcctctgaggcatctctgcaggcctctgcctgtaagaagaaaaagagcaaagagaagaagagaaaaagagaagaagatgaagaaacccagtttgatatgtttggaatctggtgaacagtaacaaactttgatgaaatttcaggaaccatagccattgaaatggatgagggaacctatatacatgcactcgacaatggtctttttaccctgggaagctccacacaaagaagaatcgccctgaaatctggctatggaaaatatcttggtataaattcagatgaacttgttgttggcgttcagatgcaattggaccaagagaacaatgggaaccagtctttcaaaatggtgcctgtgcagcagtattcactgtgataggaagtgagaagcagtctgagtgttcattgctgagggaatcaagggcaaaatatcatggatgcactcatggacaaataagcagcagtttgaagcaacaccctagatggatgtaca

SEQ ID NO: 153794 - DNA, 1031 bp, Homo sapiens
aattcgacagacgtacgctgtcagggagtgtttacttcgcctccacttctgttcctccccgccctggtgctgctccgggtcacatactcgtcctgagccggcttcagcctctctgcgcagaagtgtcccggagccatggccgagtaatcttatgcgaagtctaccaagcttgtgctcaagggaaccaagacgaagagtaagaagaaaaagagcaaagagaagaagagaaaaagagaagaagatgaagaaacccagtttgatatgttggaatctggtgaacagtaacaaactttgatgaaatttcaggaaccatagccattgaaatggatgagggaacctatatacatgcactcgacgatggtctttttaccctgggagctccacacaaagaaggggaaaatggctttgttggcctcaaatggctgctttattagatgcaatgaagcaggggacatagaagcaaaaagtaaaacagcaggagaagaagaaatgatcaagattagatcctgtgctgaaagagaaaccaagaaaaaagatgactttttagaagaagacaaaggaaatgtcaaacaatgtgaaatcaattatgtaaagaaatttcagagcttccaagagcacaaacttaaaataagtaaagaagacagtaaaattcttaaaaaggctcagaaagatggatttttgcatgagacgcttctggacaggtagctatttatttacttattttcactatttttcagtagccaatagaaatggcatgtagaaaagctatattctcttaaattactgcagctttcacatttttgtctttatttataatttatgagtgtgggcaatattacctagagaggacatcatgagtttggggaaaagactgtcaaggaaagaatatctaaaaattataaccgattctaaggtatatactttaaggaaattcaggtttgactgtatctacttcataaatttatcattatctttttataactattagaaccagagttagaaagacgcagtttgcttatataaaaattatg

SEQ ID NO: 153795 - DNA, 1090 bp, Homo sapiens
gaaacccggaagtggaactctgagccattcagcgtttgggtgaagacggaggcgggttctacagagacgtaggctgtcagggagtgtttatttcgcgtccgcttctgttcctccgcgcccctgtgctgccccgactcacatactcgtccagaaccggcctcagcctctccgcgcagaagttgcccggagccatggccgagtactcctatgtgaagtctaccaagctcgtgctcaagggaaccaagacgaagagtaagaagaaaaagagcaaagataagaaaagaaaaagagaagaagatgaagaaacccagcttgatattgttggaatctggtggacagtaacaaactttggtgaaatttcaggaaccatagccattgaaatgggataagggaacctatatacatgcactcgacaatgggtctttttaccctgggagctccacacaaagaaaagtgatgagggccctagtcctccagagcagtttacggcctgtcaaattatctgattccagaatcgcccttgaagtctggctatggcaaatatcttggtataattcgcgatggacttgttgttgggccgttcagatgccaattggaccaagagaacaatgggaaccagtctttaaaattggggaaaatggctttgtcgacctcaaatagctgctttattaggatacagtgaagcagaggacatagaagcaaaaagtaaaacagcaggagaagaagaaatgatcaagattagatcctgtgctgaaagagaaaccaagaaaaaagatgacattccagaagaagacaaaggaaatgtaaacaaatgtgaaatcaattatgtaaagaaatttcagagcttccaagaccacaaacttaaaataagtaaagaagacagtaaaattcttaaaaaggctcggaaagatggatttttgcatgagacgctttctggacaggagggcccaaattggaagccgaccagatactgcaagtgactggggatttttgtgtctgccttatctttttgtgttttttttttctgaataaaatattcagaggaaatgcttttacagaaaaaaaaaaaaaaaaaaaaaaactcgtgccg

SEQ ID NO: 153796 - DNA, 781 bp, Homo sapiens
ccactgaagcgctcagatggctgtaacgacggccgacccacgcgtccgcccacgcgtccggacacaactgtgttcactagcaacctcaaacagacacgcatggtgcatctgactcactgaggagaagtctgccgttactgccctgtggggcaaggtgaacgtggatgaaagttggtggtaaggccctgggcaggctgctgggtggtctacccttgggacccagaggttctttgaagtcctttggggatctgtccactccctgatgctgttaatgggcaaccctaaggtgaaaggctcatggcaagaaagtgctcggtggcctttagtggtgggcctggctgcacctgggacaacctcaagggcacctttgctcacactgaagtgagcttgcactgtgacaaagctgcaccgtggatccctgaagaacttcaggctccttgggcaacgtgcttggtctgtgttgcttggcccattcacttttgggaaaagaatttcaaccccaccagttgcaggcttgcctaatcaagaaaattggttggcttggtgttggctaaatgcccttggccccacaagtaatcacttaagcctcgctttccttgctggtccaatttccaattaaaaggttcctttggttccctaagtccaactactaaactggggggatattattgaaagggccttgagcattttggattttgcctaataaaaaacatttattttcatcgcatacaagaataaaacaagcgcggccgattaagaggatacttcaggggcgcaagat

SEQ ID NO: 153797 - DNA, 2453 bp, Homo sapiens
tgggaagaaattcaagaacttaatgaagtcgcgagacatcggccacggtccacgttagttatgggaatccagcaagaaaacagacaaatcagagagttgcaacaagaaaacaaagaattacgtacatctctggaagaacatcagtcggccttggaacttataatgagcaagtaccgagaacaaatgtttagattgctaatggctagcaaaaaagatgatccgggtataataatgaagttaaaagagcagcactccaaggaactgcaagcacatgttgaccagataactgaaatggcagcagtaatgaggaaagccattgaaattgacgagcaacagggttgcaaggaacaagaacgaatatttcaacttgaacaagaaaacaaaggcttgagagagatccttcaaataactccgagaatcatttttgaacctaaggaaagatgatgcgtcggaaagtacttctttgtcagcattagtgaccaacagtgatttgagtctgaggaagagctgaagagtttctgagtctgtgagcttctttacatgggctccaaattggtcaaattaagtgaatgaatgaatgggaccagaaaattcaatcctttatttttttctctgtaaatatgtacagtgcacgggctatgagatagcaacaaaaaatgcataggtaatggtcatagactttattccaaaacataattggaaaatagaaactgagccattgccaaatggtaaagaaatgaaaagttttcacagtgactactgaatataccaagagcttttggcagtactgctggctttctgggtgattaattaggtaaacttgaatattcccagtaaatgtttgagaatgcataaaattataccaatttaaaaatataaatttttgccactgttttgtgaacggaggatttgtacgctaaatttcatccttatttggcgtcaaagttgatgcaaagtttatgtaccatgagacttctagtgattgcctactttcacatttatttaaatttttgtgaaagaaaatacagttttaaaggctataggaatgtgttatatgtaccttaaacagataatttaattttagcaatttatcataactgatacttagctaacaattgtccataacttgtttaagtgtaagaaataccatttcaggaatgaaaaagaaggaatactactttctaagaaagaagatcttataatagacatatttagtaggttaaactactcctttgaaagaataagttttggttcaaagtcaataatgaagacgagatttgtttttctcttctctggctgatttttaaggatattatgtagttcatttagttaacagaattgaaatgtttgatatggcaagataggtatggtaatttcaaagtgaattgggaattcctctggctcatagaacccttttttttttcctttaagtattcttgagatacaaaaaaaaaaagtaaatacaatttcaaaaaaaaaagttccggatctgtttttaagctccatctggtcctcataacctgcaagatttttcttaaaacctttcagctgaaagtgggggtaaaggtggagtaatctgtggatttgtttctgttgtcttttaaaatgtcaaatatataatatgtaatttttttaaaaaccaccagatacagaaatgtgctttaacatcagttgaaacctaaattttcttatgttgtggtgattgtattaaaaagggataaaagaagagtgtcaaacatggttaaatatattgtactcatttatgttgaatacgtattaaaattaagacaagtggaaaattatactttgagtatataatttgttaaatattactttatatggtaattttatgtataatttcatatattggtaaaattcaaaactacacttgagaatttttttatcttaagtttggggtgaatggggtggatgagactgattgaatagaaaagggctaatggcccaaacattatatagatttctttttttcagtcagaggccttatttgatattttataaataaatgacagtttttatttttaaactttttattgtttttgggaaagtattccttaatttaatgacacattcattcagatacttcttatccctgctaataaaggaaatctatttcaagctacaccattgagattaagtctgaggcagttcattgaggcagctctactataaaagcttacttgataaataattatttttgtaaacaagttgggttaacttattcttcgtctttttgcttggatatgaatttaaggtcttcatgtttaaagacatttactttgttatttagtgacacatttccatcctatttttttttttttttttggttgttgttaaacagaaccttaagtttatgtttgaggtatgtactgcataggaacctattttattattaaagatgaatgattaaaattggaaaaaaaaaaaaaaaaaaa

SEQ ID NO: 153798 - DNA, 926 bp, Homo sapiens
ttttgtctgtctctttcactagactgtaagcttcttcagatcaggggacatgtcttgacagtctttgtattcctgttgtttagcatagtactggcacatcataggtgtgcaagataagaaaatgagattggaagaatttatgctacttcgtgcgcctaacaaatgtggatgtctgtattatactgatactatattttcaatagttagcaaagaaggccatttaatattttaatactgaaaagcagaattgtgctcattttattcaatacttaccatataccatacactagatagtaggtggatgtaaagatgcagttcctgctctcaaagaggattatgacctagaaaaggttacagattggattgagataactttataggcctgaacaatacagaaaagatttctaaagcattgaagacttcagggaggaaaagagattgaatgcgtcggcaatttttatcattcccgttactttgaacaatagtgtatgtaagtgcaaaaaaaaagaaaaagttgctgatcattgtggtgagaggaatgtaaaatatgagtatttttcttgctgctaggtttagttatattgtgctgcttattcttaattctagtcctaacaaatttgatttcaaaagcacatctgtggtcaaccaacttcattgttaatatttgttttattcatattaagtgacaatgtaagaatattcatgttaagtggtactgcagattttataaaaaggagaggatccaaaaataaaaaagtattttgctgatttccaactcccatccctctttttcaggaactgcaagcacatgttgaccagataactgaaatggcagcagtaatgaggaaagccattgaaattgacgagcaacagggttgcaaggaacaagaacgaatatttcaacttgaagtaagttttacattgct

SEQ ID NO: 153799 - DNA, 1017 bp, Homo sapiens
atgaaaaagaatatcgcatttcttcttgcatctatgttcgttttttctattgctacaaacgcatacgctgatatccagatgacccagtccccgagctccctgtccgcctctgtgggcgatagggtcaccatcacctgcaggtcaagtcaaagcttagtacatggtataggtaacacgtatttacactggtatcaacagaaaccaggaaaagctccgaaactactgatttacaaagtatccaatcgattctctggagtcccttctcgcttctctggatccggttctgggacggatttcactctgaccatcagcggcctgcagcctgaagattttgcgacttactactgtcaacattatgatagtctcccctacacttttggccaggggaccaaacttgaagatcaaacgaactgtggctgcaccatctgtcttcatctttcccgcccatctgatgagcagttgaaaatctggaaactgccctctgatgctgtgcctgcctgaaataactttctaatccccagagaggccaaaaagtaccagtggaagggtggattaacgcccttccaaatgggggtaaactcccccaggagaggtgtcacaagagcaggactagacaaggaacagcaccctacagccctcagcagcacccctgacgctgagcaaaagcaggactacggaggaaacacaaactcttacggcctgcggaagttcacccattcaggggccttgaggttcggcccgttcacaaaggagctttcaacaggggggaggagtgtttaggagggggaggaagttgccccccaccttgtttccttcagtttcccaggcctggaccccttcccttccttttgggcttttgaccttttttttccacagggggaccttacccctatttgcggttcttccaggttcatctttcacctcacccccctcctagtcccttggctttaaattatgctaaatgttgggaggagaatgaataaataatttgtgaatcttttgcacctgtaaaaaaaa

SEQ ID NO: 153800 - DNA, 435 bp, Homo sapiens
  misc_feature (1)...(435): n = a,t,c or g
aggtgacagcccccttaacctcagtcctttccagtacagtaatgcctttgatgggtttgcagcctatggaggcctcaatgagaagtcttttgtagatggcttgaattttagcttaaataacatgcagtattctaaccagcaattccagcctgttatggctaactaaaaaaaagaaaatgtatcgtacaagttaaaatgcacgggcccaagggggannnnnnnnnncacctccttgagaannnnnnnnnnnaagcttataggaaggaaacattcaagcttggttnnnnnnnnnntaataaaacatgcatcatttttcatttgccaaccaggcacaaaggtattttatactgactggttattttaaaggatactctcagatatggcctcttacagtatttaagatataccagggacatgggtgatttttttttatag

SEQ ID NO: 153801 - DNA, 1930 bp, Homo sapiens
  misc_feature (1)...(1930): n = a,t,c or g
tttttttttttttttttggggggggagttgaaacctaattttgtggcgtagcagctatgcagcttgaaatccaagtagcactaaattttattatttcgtatttgtacaataagcttcccaggagacgtgtcaacatttttggtgaagaacttgaaagacttcttaagaagaaatatcgaagggcactggtatcctgaaaagccatacaaaggatcggggtttagaatgtatacacataggggagaaagtggacccagtgattgaacaagcatccaaagagagtggtttggacattgatgatgttcgtggcaatctgccacatggatcttgagtcgtttcggatcgacccatttgaggtttcttaccaaattggtgaaaagggaccagtgaaggtgctttacgtggatgataattaatgaaaatggatgtgaagttggataaggagatcaaaaacagctttaacccagaggccccaggtttttatgcccataagtgacccagcctcatcagtgtccagctctccatcgcctccttttggtcactctgcttgctgtaagccctaccttcatgccccggtccactcagcctttaacctttaccactggccacttttggctgccaccaagttccggctctaccaaaattgaagaatagtgggccggtagcagcaggtttgcacgtacttctcccatcaacctccggcttggaatgtggaatgacctcttggaaggcaggaaagccatctcttcctcaattgcactctctgtatgggcttggcttggggtagccagcagcagccacagcaacagcagcagccagcccagccgccaccgccaccaccaccaccacagcagcaacaacagcagaaagacctctgctctttctcctaatgcccaaggaatttatttttcctaatatgcagggtcaaggtagtagtacccaatggaatgttccccaggtgacagcccccttaacctcagtcctctccagtacagtaatgcctttgatgtgtttgctaacctatggaggcctcaatgagaaatcttttgtagatggcttgaatttttagcttaaataacatgcagtattctaaccagcaattccagccctgttatgggctaactaaaaaaaagaaaatgtatcgtaccaagttaaaatgcacgggcccaagggggattttttttttttcacctccttgagaattttttcttttttaaggcttatagttaagggttacattcaagcttggttaaaaaaataataataaaacatgcatcatttttcatttgccaaccaagcacaaagttattttatactgactgtatattttaaagtatactctcagatatggcctcttacagtatttaagatatagcaaggacatggctgatttttttttataaaaattgggcactaataagtggggtttattggtcttttctaattgtataatttaatttagtacaaagtttgtaaaatatcagaggatatatatatattgtttctacgaccatggtattgccatttatatctttttacctaccagtgatctgtgaccagccagccagccntccatgttgtattttttttactggaaattgtaaaatatcccatccttaaagacatccaactattcctaaaaattgtgtaacaggatattcctttagtggtgggatttaaaatgtacggatacttgctttttcaaaaaaatgtattttctgttaaaagtttaaagatttttggctatatattatggaagaaaaatgtaattgtaaatattaattttghtacctatattgtgcaatacttgaaaaaaacbsgmnataaaagtattttgagtcagtgtcttacatgttaagagggactgaaatagtttatattaagtttgtattaaaattctttagaattaaaaaaagaatgcctcctcgct

SEQ ID NO: 153802 - DNA, 1200 bp, Homo sapiens
atggaatactatgcaaccataaaaaagaacaaaatcatatcctttgcagcagcatggatgcagctggatgccattaccctaagcaaattaacacaaaaacggaaaaccaaataccgcatgttcttatttgtgtcagaaggccgtcctccatgggctgtggggagggagtcaggttggagacccccggtcccattttccagtgttctgctccttcgcgacccggggacgggtgttctgaaagatctgaacaatcaggaggttgatggggaacatgaggatggagctctccaggccaatcatcacctcctgccagatgagtttggtgctttggaaagtgtgaaagctgctagtgaactctattctcctttatcaggagaagtaactgaaattaatgaagctcttgcagaaaatccaggacttgtaaacaaatcttgttatgaagatgctcttacattttactttgacaagtattataaacacagaggcagtaatcctagtaatagtcttgcaaattttcatttcaaggcgctgacaattgctagcaaacaccatcagattgtgaaaatggacctgagaagtcggtatctggactctcttaaggctattgtttttaaacagtataatcagattgccacagtgctgcggctgcttcgagtcatggagcatgtgcagaccaccctcctgctgggaaaactgccaggggccttgacagcatgctgccaccccctccatctctgtgtacacaaacaggccaagtgtgttacgattgcctacagtattcagtacagtaacatgctgtacaggtttgtagcccaggagcaaaggctgtaccatacagccaaggtgaaggtcacagtgctggaagacaatgatccctttgctcagtaccactacctggtgacagtctacacaggacaccgacgaggggcagccacgtcctcaaaggtgactgtcaccctgtatggcctggatggagagagagagccccaccacctggctgatcccgacactccggtttttgagcgaggagcagtggatgccttcctcctctccaccctgttccccctgggagaactgcggagctccggctgtggcatgacaactcaggggaccgcccatcgtgcatcaacctgtgacgtgctcaaggtcacacagctggcaagtatggagcagggtctctgcattcttgaggcgaaatga

SEQ ID NO: 153803 - DNA, 1422 bp, Homo sapiens
ggctccctccggccgcgaactgcccctccccgccccgcctcccggcgcgggtggccgaggcgtagcgccgcgacccccgcacccctgcgaacatggcgctgcgagtggtgcggagcgtgcgggccctgctctgcaccctgcgcgcggtcccgttacccgcccgcgccctgcccgccgaggccctggcagctgggggtgggcgccgtccgtacgctgcgcactggaccccgctctgctctcggtgcgtaaattcacagagaaacaggaaagtggtaacaaccaagaaaaaagcatgaaccagttgggatcaggcaattttgcacagrgaagcgttgggagatgttgtttattgtagtctccctgaagttgggacaaaattgaacaaacaacgatgaagtttggtgctttggaaagtgtgaaagctgctagtgaactctattctcctttattcaggagaagtaactgaaattaattgaagctctttgcagaaaatccagggacttgtaaaacaaatttttgttatggaagatggttggctgatcaagatgacactgagtaaccccttcagaactagaatgaacttatgagtgaagaagcatatgagaaatacataaaaatctattgaggagtgaaaatggaactcctaaataaactagtatgaaataacgcaagccagcagagttgtcttaaattagtggtgggataggaagacttaggaataggaaacttttagtattacccgatggggggaaaaaaaaactactgttaacactgctaatgaaagaaaaatgccctttaactttctaaaatgataatagataaatataatatgcgtctttttcacaatatcctatgatttttagactagggctctagtgttcagaattcatggaaattatccatgaaattatccatgggtaaaaattagttacaaaaattacataattccaaaggataatgttggttattccttaagcccttatattatattggtaacctggcatgtatccatacctggatttgggatgaaatacttaatgatctttccgattggaaataactgggagtgaagaagtttttgttgcttgtacagtgtcagatgaagaacaacactatcttaattttgcaatacactgcatttgctggtgctgtttttatatagtgaagcaacaagctgtacagcaaaataataaaatactcacttcttcgttaatcatgtttgttttgatgttaatatttcatttagtaactctgctagtatttgtgaaagtgctaactttaacttacggaaagttactttttaaaaggaaatttaagccagaacaatgcaaagctccaagaaaatgttttctttagtcacaaatctggtttttcttaagccaagatctgtcaccttttaacataataaaaaataaatcacca

SEQ ID NO: 153804 - DNA, 933 bp, Homo sapiens
  misc_feature (1)...(933): n = a,t,c or g
gtgacccggaagtagaagtggcccttgcaggcaagagtgctggagggcggcagcggcgaccggagcggtaggagcagcaatttatccgtgtgcagccccaaactggaaagaagatgctaattaaagtgaagggtacctgcttctcccagtccctaacgtaggtcgcctccgagcacagccctaaaatcggggcctcccaagggctagactatgagcctttactggtggttgccaaggtgtggtatctcacccgtcctacaggaaccaaagcggggagtgtgttcagtcagtacctgccttttcttgagcctgggattctgggaccagcctcacttccttggctgaggcagacgctgaccggaaaggagattgagattgacattgaaccttacagacaaggtggagcgaatcaaggagcgtgtggaggagaaagaggggaatccccccaccaacagcagaggctccatctacaagtggcaaagcagatgaaatgatgagaagacagccagctggattaccaagattttaaggtgggttcagtccttccaaacanacncttgggggtgtttgggcttctgagaaggagggaaggtggtctttagggcagtgatggacccctccatttttacctcttttaccctgttcgcttcattaatgaggcatccatatatcctcctccactctctggggacaccataagccactggccccctccccctggattgccccagtaatgtattgtctactgggtgggagactgtgaaggatcccaagggattcagtattcctggcccagagggcccttgctgggctactgggtggttagtttgcagtcctgtgtgcttccctctcttatgactgtgtcctgggttggcaaataaaatatttcctggcctcctggaaaaaaaaaaaaaaaaaaaaaaaaagtcgacg

SEQ ID NO: 153805 - DNA, 503 bp, Homo sapiens
gagcagccttcctgagagaggagagagaaagctcagggaggtctggagcaaagatactcctggaggtggggagtgaggcagggataaggaaggagagtatcctccagcaccttccagtgggtggggcaagtccgtgggcatcatgttgaccgagctggagaaagccttgaactctatcatcgacgtctaccacaagtactccctgataaaggggaatttccatgccgtctacagggatgacctgaagaaattgctagagaccgagtgtcctcagtatatcaggaaaaagggtgcagacgtctggttcaaagagttggatatcaacactgatggtgcagttaacttccaggagttcctcattctggtgataaagatgggcgtggcagcccacaaaaaaagccatgaagaaagccacaaagagtagctgagtttattcggccagaggctgggcccctggacatgtacctgcagaataataaagtcatcaatacctcaaaaaaaaa

SEQ ID NO: 153806 - DNA, 335 bp, Homo sapiens
ggcaagtccgtgggcatcatgttgaccgagctggagaaagccttgaactctatcatcgacgtctaccacaagtactccctgataaaggggaatttccatcaactgtgcagcaacatatactttaaaaagttttatgtcttctagatgaaacaacagggagttggtgggctactctgtgaaggctggttgggacctaacaggaaaatgatcattgtatttgggggaagcatcaggatcattaaggctggctggagaggaggtgcatgtagggggatgtttgtagatacatgttaggccttaaccgtggagggactgacaccatgctgaggcatttt

SEQ ID NO: 153807 - DNA, 968 bp, Homo sapiens
gttggccccgcactttgggcttctcttggggagggtcagggaagtggagaaagctcagggaggtctggagcaaagatactcctggaggtggggagtgaggcagggataaggaaggagagtatcctccagcaccttccagtgggtaagggcacattgtctcctaggctggacttttcttgagcagagggtggggtggtaaggaaagtctacgggccccgtgtgtgtgcacatgtctctgtgtgaatggaccctttcccttgccacacgtgtatccctatcatcccacccttcccaccagagccatagccatctgctggtttggttatttggagagagcaggccaggacaaggccttcgcttggggcatgaatcctctgcgtactgccctggccagatgcaaattccctgccatgggattccccaaaaggttctgtttttcaggtggggcaagtccgtgggcatcatgttgaccgagctggagaaagccttgaactctatcatcgacgtctaccacaagtactccctgataaaggggaatttccatgccgtctacagggatgacctgaagaaattgctagagaccgagtgtcctcagtatatcagggtgaggaggggcttggggtggcgggggctctctgcctggtcctggggctgccctgggccagcggtcctccctgccacccttcatagatggctatgcctcggctctctctgagatctttaaactctggcttcttcctcctcaatcttgacagaaaaagggtgcagacgtctggttcaaagagttggatatcaacactgatggtgcagttaacttccaggagttcctcattctggtgataaagatgggcgtggcagcccacaaaaaaagccatgaagaaagccacaaagagtagctgagttactgggcccagaggctgggcccctggacatgtacctgcagaataataaagtcatcaatacctcaa

SEQ ID NO: 153808 - DNA, 497 bp, Homo sapiens
tgttttgatatcagaatttctggagaacatttggatttccagaatctctttcacatcagctgtaatgtggggcaagttccgtgggcagtcattgttgacgcgagtctggaggaaagcgcttgaacatctatcatcagactgtctaccacaacgtactcccttgataaaggggaatttccaatgccgtctacaggggatgacctgaagaaattgctagagacccgagtgtcctcagtatatcaggaaaaagggtgcagacgtctggttcaaagagttggatatcaacactgatggtgcagttaacttccagggagttcctcattctggtgataaagatgggcgtggcagcccacaaaaaaaagccatgaaggaaagccacaaaggagttagcttgagtttactgggcccaaaaggctgggcccttgggggacatgttacctgcagaataattaaagtcatcaatacctcaaaaaaaaaaaaaaaagtcgacgcggccg

SEQ ID NO: 153809 - DNA, 806 bp, Homo sapiens
ccactgaagcgctcagatggctgtaacgacggccgacccacgcgtccgcccacgcgtccggacacaactgtgttcactagcaacctcaaacagacacgcatggtgcatcttatctcctgaggagaagtctgccgttactgccctgtggggcaaggtgaacgtggatgaaagttggtggtaaggccctgggcaaggctgctgggtggtcctacccctgggacccccaaaaggtcctttgaagtcctttgggggaatctgtcccaactccctgaatgctggttaaatggggcaaaccccctaaaggtgaaaaggctcaatggcaaaagaaaaagtgctcgggtgccctttagtgaatggcccctggctcacctgggacaaccctcaaagggcaccctttgccccacactgaagtgaagctgcactgtgaacaagcttgcacgtgggatcctggagaactttcaggcgtcctggggcaacagtgcctggtctgttgttgctgggcccatcatcttttggcaaaagaatttcaaccccaccagtgcaaggttgccctattcagaaaattggttggcttggtgttggctaaatgcccttggccccacaagtatcacctaaagctcgctttcttgctgtccaatttctatttaaaggttcctttgttccctaagtccaactactaaactgggggatattatgaagggccttgagcatcttggattttgcctaataaaaaaaatttatttttcatcgcatacaagaataaaacaagcgcggccgattaagaggatacttcaggggcgcaagat

SEQ ID NO: 153810 - DNA, 637 bp, Homo sapiens; identical to SEQ ID NO: 144817
  misc_feature (1)...(637): n = a,t,c or g

SEQ ID NO: 153811 - DNA, 715 bp, Homo sapiens
  misc_feature (1)...(715): n = a,t,c or g
aattttgccctcgaggccaagaattcggcgagggcaataagctcctagtcccagacgcccatgggtcatttcacagaggaggaccaaggctactatcgacaagcctgtggggcaaaggtgaatgtggaaagatgctggaggagaaacccctgggaaggctccctggttgtctaccccatggaccccagaggttctttgaccagctttggcaacctgtcctctgcctctgccatccatgggcaacccccaaagtcaaggcacatggccaagaaggtgctgactttccttgggagatgccaacaaagcaccctggatgatctcaaagggcaccttttgcccaagcctgaagtgaactgcactgttgacaagcctgcaatgtgggatcctgagaacttcaaagctcctggggaaatgttgctggtgacccgttttgggcaatcccattttcggcaaaagaattcancccctggaggttgcaaggcttcctgggcagaaagatgggtgacttggagttggccagtgcccttgttccttccagataccactgaagcctcttggcccatgaattcagaagctttcaaggataaggcttttattcttgcaagcaattacaaataataaatctatttctgctaagagatcacacatgattttcttcagctcttttttttacatctttttaaatatatgagccacaaagggtttatattgagaa

SEQ ID NO: 153812 - DNA, 908 bp, Homo sapiens
  misc_feature (1)...(908): n = a,t,c or g
cccatggtttattctccagccgctggcatgccccacactgctcttctcaatcagactttacacctccctccggggaagcagccatgtccaggcactgtggtaactggagtagagggtaacatcaggatctttcagacatttgattttcagcctaaaaaggcacgcacatttggcagccttgttattttagcaataggcagagttttccttctatctagtttctttctacccataaagtcataatttggcaaattataaacatgatgtcagagtatacacgttcagtttaggcaggaccgaaaaatgagctatgggactttctgtcccttgccctgcccccacctgaagagagccatgtgtttctaggtcttccacgtgctgccctctcccctggatggagcccagagctatgtgtcctcctgtaggtgccatgaggggcagccgcagagacccggcctccagcagcctctcacctgaccacctggcacagctgcaaccaggggcgggtttcctcttttgctccgcccctgccctgagtgggtcctttccacccagaccttcaccacagggtcacttggcaactgctggctcctggctttgccaccagttcaggcccagccacaggcacctgctctgtgtggacccaggagaggggtagcttgggtgggcatcgcttgggaagattcaggaaagtctgtgggtgaagtagccagcgcnnnnnnnnnnnnnnnnnnnnnnnnnnnnnnnnnngcctcctgcaatggctccatgctggaccagcaacagctccacgccggctggacttcctcttacttgttttgtccccatgtgcacaggttcaggaggaaatgggctcagccttcccggttcttccaggaggctccactggctggggggctttgcagatg

SEQ ID NO: 153813 - DNA, 1365 bp, Homo sapiens; identical to SEQ ID NO: 137043

SEQ ID NO: 153814 - DNA, 915 bp, Homo sapiens
  misc_feature (1)...(915): n = a,t,c or g
tgcattgtgagaggttctaaatatgttttacacaagtaaaagtcctaaatgagagccaggtgcagtggtgtatgcctgtggtctcagcctctccagtagctgggataacagacgcgcaccaccacacccggctaatttttgtgcttttagtagaaatggggttttgccatgttgggcaggctggtccgaaattcctaatttcaaagttattggcccacctcagcatcccaaagtgctaggattacaggcatgaaccaccgcacctggcccagatgcaatttaaaagctatttcaaaaaaaaaacaaaaaaagcagttgtatttctgataattttttttttcttttagctatcatggtgaacttacttcagattgtgcgggaccactggggttcatgattcttgtccctatgggatttgtcattggatgttatttagacagaaagagtgatgaacggctaactgccttccggaacaagagtatgttatttaaaagctttccacacagggaattgcaacccagtgaagaagttacctggaagtaaagactggctagattatcgaatgttcacattttaaagttccgaagagaaataatatacatgaagaatctgccnnnnnnnnnnnnnnggggcggccgttttaaaggatccttgggggggcccaagtttacccgtgcatgcaacgtaatagttttttccttatagggaggccgattaaaaacctacctgggaatttttggaaagaacctttattttgggggggggacatattgggccaacctccctacaaaaatttaaagcctttagggaaaataaaaatttttaaggggtaaaaggggtaaaacaacctccatatccttgctgttggaaagttttgtttcctgggtttgatttatgaaatttttttccccggga

SEQ ID NO: 153815 - DNA, 409 bp, Homo sapiens
cggacgcgtgggcgactgtgagccacaacaccaagaggttccgctttgccctgcccaccgcccaccacactctggggctgcctgtgggcaaacatatctacctctccacccgaattgatggcagcctggctgtgggctcctacttggttcggaggtcccgccggcctcaggtcactctcctggaccccagtgaaaagtacctgctacgactgccgacatgatccgggaacacctgcccgctccaggggatgatgtgctggtactgctttgtgggccacccccaatggtgcagctggcctgccatcccaacttggacaaactgggctactcacaaaagatgcgattcacctactgagcatcctccagcttccctggtgctgttcgctgcagttgttccccatcagtactc

SEQ ID NO: 153816 - DNA, 880 bp, Homo sapiens
tcggcttgtcaggtggtggaggaaaaggcgctccgtcatggggatccagacggtaagaccctcattcagtatcctccactgggggacccctccccatctggttctggccactcagctccggaccaggggctgtcgctgccgaccccgccccgcagggctctgggcccaccgtggatgctggggtcccgatcccgcacatccgggctcgggactccgccaggttacccctctgcccttggcatgcctccgcgctggagctcgggatcgccacccctgggacggtcaccacccaagccccgggctcttacccagcctggcggtcacgctgcctcctctacccacagagccccgtcctgctggcctccctgggggtggggctggtcactctgctcggcctggctgtgggctcctacttggttcggaggtcccgccggcctcaggtcactctcctggaccccagtgaaaagtacctgctacgactgctagacaagacggtaagttggggaagaaagggccagggtgaaggaggggaccagagtgctcctggcatgtagggtacagcacccacggtggttgggatgtccaagggacgtggcagcgccaggcgcgcttggtgaaacacttgtgtcctccaccctccagactgtgagccacaacaccaagaggttccgctttgccctgcccaccgcccaccacactctggggctgcctgtgggtaaggaaagtgtggaatgggctcctttccctgggtatcctcagaaggtgactcccctcctgggatctcatgaaacacgctgcttcaaccggtttgctccacacaccatttccccttcccccacttggctctgcatcctccaagctgtgaggtgccactgggccc

SEQ ID NO: 153817 - DNA, 623 bp, Homo sapiens
ttggatacctaaaggttggggaatgtggtgaagtttcgggggccaaagcgggttgctctcttacactggaaaagggcattttaacattcagcccaacaagaaatctccaccagaaccccgagtggcgaagaaactgggaatgattgccggcgggacaggaatcaccccaatgctacagctgatccgggccatcctgaaagtccctgaagatccaacccagtgctttctgctttttgccacccagacagaaaaggatatcatcttgcgggaggacttagaggaactgcaggcccgctatcccaatcgctttaagctctggttcactctggatcatcccccaaaaggtatccttcccatttctggacatcccactatcccctcatcgtcaaaatcaaagccttgcccctttgtgaattctggcttcattgaaatcaaccttgcctcacactgccaactcggaagtctgagtgcacagacacagtgatctcctggtccctttcctttgggttcctgtttaccaggtgggtgacagggatggcggtgctgctaaggctcagcttgaggcaggctgagtatacccattcccagctgctgctaccacttgacactttctccagagcctt

SEQ ID NO: 153818 - DNA, 1706 bp, Homo sapiens
cccacgcgtgcgcccacgcgtccgcccacgcgtccggtcggcttgtcaggtgggggaggaaaaggcgctccgtcatggggatccagacgagccccgtcctgctggcctccctgggggtggggctggtcactctgctcggcctggctgcgggctcctacttggttcggaggtcccgccggcctcaggtcactctcctggaccccaatgaaaagtacctgctacgactgctaaacaagacgactgtgagccacaacaccaagaggttccggtttgccctgcccaccgcccaccacactctggggctgcctgtgggcaaacatatctacctctccacccgaattgatggaagggtgcggcatcaagccatacactcctgtcaccagtgatgaggatcaaggctatgtggatcttgtcatcaaggtctacctgaagggtgttgcaacccaaattttctgagggagtggaagatgtctcagtacctggatagcctgaaggttggggatgtgggtggagttttcgggggccaagcgggttgctcacttacactggaaaagggcattttaacattcagcccaacaagaaatctccaccagaacccccgagtggcgaagaaactgggaatgattgccggcgggacaggaatcaccccaatgctacagctgatccgggccatcctgaaagtccctgaagatccaacccagtgctttctgctttttgccaaccagacagaaaaggatatcatctttgcgggaggacttaagaggaacttgcaggcccgctatcccaatcgctttaagctctggttcactctggatcatcccccaaaagattgggcctacagcaagggctttgtgactgccgacatgatccgggaacacctgcccgctccaggggatgatgtgctggtactgctttgtgggccacccccaatggtgcagctggcctgccattcccaacttgggacaaactggggttacttcacaaaagatggcgatttcaccttattgagcatcctccagcttccctggtgctgttcgctgcagttgttccccatcagtactcaaggcactataagccttagattcctttcctcagagtttcaggttttttcaagttacatctaagaagctgaaatctgggatagtacctgcaaggaacaatattcctgtaagccaatggaaagagggccaaggctcagtcactccctttggatgggcctccctaaatctccccagtggcaaccaggtccaggagaggcccatggagcagtctcttccatggaagtaagaaggaagggagccatgtacggcttgggtccaagattggcttagttcccttgatagccatctttactctcacctcctttgtgtcctgtgatgaaagggaacagtctgtggcaatggggttttaccttaaactttcactgtttcaacctatggaggcaaattctgtattgtgtggagttttaagtttgagccttagccttactttccagaggtgggtcttatggagatggcgaagaacggaggaagagatttcttcagatctcaaaggagtctgaaatatcatatttctgtgtgtgtctctctcagcccctgcccaggctagagggaaacagctactgataatcgaaaactgctgtttgtggcaggaacccctggctgtgcaaactaacactggctgaggcccctgtgtgatattgaaaa

SEQ ID NO: 153819 - DNA, 2781 bp, Homo sapiens
atgagactctttctcggaaaggaaaagaaaaagaaagaaagtgaaactacaggaatgggccaaaccctgaagaagtgtgcgtccagcaagaaaagtggcttggggttggacactggggacagttaccttttaagacggacagaggaggaggggcctgcccaggaaataacaagcagcagctggctccccaggggacatcccagtgaagacttcgctgaccacgtcaggaagaatgagagggacagcaactgtgttttgcagacaagtaccagcaacttccctggtgggccacagccagtctcagatggtggcttcggcttcagagacaacgccaagaaccgctacagaaatgtgctgccctatgactggtcccgggtgcccctgaagcccatccatgaggagcaggctctgactacatcaatgccagcttcatgcccggtctctggagccccaggagttcattgcaacccagggtcccctgccacagacagtgggtgcttctggcgcctggtgtgggaacagcagagccacaccctggtcatgctgccaactgcatggaggccggccggcccatctgctggttcacatttggggccaaagcagaccccacagacctggtgcggcgtgggtcgcacaggaaccctcattgccctggacgtcctgctccggcgctgcagtccgagggtctccttgggcccttcagctttgctcatacgtattcctgcatcagtgcatcctgcggttcctccaacagtcagcccggccccagccgagaaggaagtcccgtatgaggatgtcgaaaacctcatcacgagaacgtggccgccatccaggcccacaagttggagaaaagactccaggacccgccaccatgttcccggagcccccaaccccggggcctccatcgcccgacagcctcccgactccagtcgcatcagccacggcccagtgcccccctgggccctggccccatcgtgctggtctcaggcctcctcatcttcagctgctgtttctgtcttaccggaagagctgtcggaggcggacaggcaagaagagccaggcccaagccagaacccaccttactggctcatcctccctgtgtgtctagccctcaactggctctggggacccagagatggaacagaactagttgctattcccaagaactcccagtctgctgctggtgggcattctgcaagcaatggattggcagccttggatcttggtggctcctcggacccctatgtgcgggtcacctgctgccggacaaacggaggcggtacgagaccaaggtgcatcggcaacgctgaaccctcactttggggagaccttcgccttcaaggtcccctacgtggagctggggggcagggtgctggtcatggggtgtacgacttcgaccgcttctctcgcaatgacgccatcggggagaccatacgtcaaggtccacctgctgcagggcggcaaaaaggtgcggaagagaaaaccaccatcaagaagaacactctgaacccctattacaacgaagcttcagcttcgaggtgccctgtgaccaagtccagcccatccctgcactgctcctggggccaaataaatattcagcagctccgtggcctgggcccatgctccttgatgggggtgggcaagggctgggacccagaggaaacctcgtttccaggaatgggcgctcgcagggcgggtgatgaccacacctgcggctccggcagcggcttcggctccgtgtcctggtggggcctgtccccgggctggacctgcaggctgaaagcctcctgtggacccagactcccaggccgatacagtgcacagcaaccccggctagatgtgctgcttctgggctctgtggatggacggcacctgctgcggccctgtcccgagcgaagttctggcctcgcaggaggttcaacagcgaagcgagaccttcctggaagtgtgggggaacgcgctgtgcgcccgccagtggccgccttcgtgcgtgcccaggccgacctgctggccacctggtccccgagcccgaccgcctggaggaacagctgccctggctcacctccgcgccctcaaggtgccgccgcccggcctccatctgggatcgggtgccgcgggaataatggaagcgcacagtccaaaggaccgtggggagcgcgtggcagcgcgcgggtactggggggactcgccacggggcccttcgtggccttcggcatcgaagcggacgacgagagctcctgcggacgagcaacggccagccagtcaagacggccggggagatcactcaacacaactgacggagctgctccgcgacgtggccgcctgggggcgcgcgagagccacgggggggacctggaggagcagcagcacgcggagggaagcccggagccaggactccagcagccccgaccccggatctttcaccgtccacttcctgccgctcgattctgctcagactctccacacaagagctgctacaacggccgattccagctcctctatgtggcctgtgtgtcctcggggagtctcaagcagcccggagagactgacggtccctgggaccctgaaggtcacccgggcggccccctcatgaccctccaaacgcccctgtcctcgccctgcctcctgccattcccggctgagtctcagcatggcggatggaaaaaatctaagatctccgcctcgagaaaattgcagctgaagactctgctgctgcagattgcaaagcaagagctgagcgagaggcggaggagcggcgcggagagaaggggcgcgctctga

SEQ ID NO: 153820 - DNA, 409 bp, Homo sapiens; identical to SEQ ID NO: 137294

SEQ ID NO: 153821 - DNA, 490 bp, Homo sapiens; identical to SEQ ID NO: 137295

SEQ ID NO: 153822 - DNA, 2616 bp, Homo sapiens
atgacctacgaaccgcccgatacacaaacggacgacgtggaggtggtgcagggagatgcccccgcaaggggtctagtccctctggttccctgcctggctgtggtcgggctggctcaagtcctgggctgcgttcctggtctgcaggaccacgggttacctgtggctgttgatctcgctgctggtgtggtagttggggcactgcctccagctgtctacagggcgcaaagggtgccagtgcgcacaaatggccctgtgtgcctgtgccattcccatttgcaaagagatacccatgtggcaagaatctctgccacgacaacccacaagaccccccatgatgacaacgcacaaccacaacccaagggctacagtgtggtccacagacctgcagaggtcattgcctggttctgcagtcatacccactacgaggagacccaatcgcagagcagatctgggtccccggggctgcctagggctgcctacctgcaccctctctcattcctgcatagaccaggggccactgacacccaggccgatttagtgcactacgaggggtgcttgtctgtgacacgcacagaagccctggcagctgggaactgctactttgacccctgcatactgccccctgtctacgcccacattgaaccccattctcctgaccctggtggcggcctgagcggaggcactatccagattccactgctcaaagggtggccgttgctggtggttagcaagtgccctggtgcagggcacttgagggagacctgtgcaagtggtagccagggcagccgtccctgcccccacgactcaatgtccaccttcaagagggccagttgggcccttggtgtcccacggtcagctgcagccggtgctggtcgacctgggcttagtgggaaccagagcgtccctcgcctgctcatggctgttcttgggttgggactgtccttggggctgctttttaatgccgggataggaggcgctagccagattaccctgcatcaagggtggcagtggcgttgttacgcaagttccctggtggaggtggaagctgaagtgccttgtactctcctcactcacctgccaggacgtcttgtgcgattcaccctacactatgatcaatcagtcatcatcgtcaatcagttcagccagcgtggggagcgcgtggcagcgcgcgggtactggggggacatcgccacggggcccttcgtggccttcggcatcgaagcggacgacgagagcctcctgcggacgagcaacggccagccagtcaagacggccggggagatcactcaacacaacgtgacggagctgctccgcgacgtggccgcctgggggcgcgcgagagccaccgggggggacctggaggagcagcagcacgcggagggaagcccggagccaggactccagtctcagttgcctgatctgtacacagccccgaccccggaatctttcaccgtccacttcctgccgctcgattctgctcagactctccaccacaagagctgctacaacggccgattccagctcctctatgtggcctgtggtatggtccatcttctcatccctgagcttggggcctgtgtggcacccggagggaacttgattgtggaattagcccggtacctggtggacgtgcggcaggagcagctgcagggattcaacacccgggtcagggagctagctcaggcagctggatttgctccacagaccggggccaggccttcagagaccttcgcacgtttctgcaagtcccaggaatcagctctgggcaacactgtcccagctgtggaacccggaactccgccccttgacatcctggcccagcctcttgaagccagcaacccagcccttgagggcctgacccagcctctgcagggtgggaccccacactgtgagccctgccagctgccctctgagtctccaggttcactctcagagtgtcctcggggagtctcaagcagcccggaggagactgactggtccctgggaaccctgaaaggtcaccctgggcggccccctcactgaaccctccaaacgcccctgtcctcgtccctgcctcctgccattcccggcctgagtctcagcatggcggatgggagcagcgatgcggctagggaacctcgccctgcaccagccccaatcagacgccgctcctccaactaccgcgcttatgccacggagccgcacgccaagaaaaaatctaagatctccgcctcgagaaaattgcagctgaagactctgctgctgcagattgcaaagcaagagctggagcgagaggcggaggagcggcgcggagagaaggggcgcgctctgagcacccgctgccagccgctggagttggccgggctgggcttcgcggagctgcagcctgatcacacttggtttattgatggcagttccaccaggcctaatcgccacacaccagcaaaggcaggctatgctatagtatcttccacatctatcattgaggatactgctttgcctccctccactacctctcagcaagctgaactcattgccttaactcaggccctcactcttgcaaaaggactacgcgtcaatatttatactgactctaaatatgcctttcatattctgccccaccatgcagttatatag

SEQ ID NO: 153823 - DNA, 954 bp, Homo sapiens
ggaattcccggtcgaccccgcgtccgagtctcaagcagcccggaggagactgacggtccctgggttctctgaaggtcacccgtgcggccccctcactgagcctccaaacgcccgggtcctcgccctgcctcctgccattcccggcctgagtctcagcatggcggaatgggagcagcgatgcggctagggaacctcgccctgcaccagccccaatcagacgccgctcctccaactaccgcgcttatgccacggagccgcacgccaagaaaaaatctaagatctcccgcctcgagaaaattgcagctgaagactctgctgctgcagattgcaaagcaagaagctggagcgagaggcggaggagcggcgcggaagagaaggggcgcgctctctagcaccccgctgtccagcccgctggagttggccgggcctgggcttcgcggacttgccaggactttgttgccgacagttccacgcccgtgtgggacaaggtggatgaagagagatacgacatagaggcaaaagtctccaagaacatcacggagattgcaaattttgacttcagaagatttttgaccttcgaagcaagtttaagcggcccacccttgcggagagtgaggatctctgcagatgccatgatgcaggcgctgctgggggcccgggctaaggagtccctggacctgcgggcccacctcaagcaggtgaagaaggaagaccccgagaaggaaaaccgggaggtgggagactggcgcaagaacatcgatgcactgagtggaatggagggccgcatgaaaaagtggagagagctgagccttcctgcctactgcccctgccctgaggagggccactgaggaataaagcttctctctgagctgaagaaaaaagaaaggggggggcggttaaaaagaataccatgaggagccaaggttaatcacgcctggaaacccaatacttttt

SEQ ID NO: 153824 - DNA, 2883 bp, Homo sapiens; identical to SEQ ID NO: 140161

SEQ ID NO: 153825 - DNA, 5070 bp, Homo sapiens
ctcctccccatcctctccctctgtccctctgtccctctgaccctgcactgtcccagcaccatgggacccacctcaggtcccagcctgctgctcctgctactaacccacctccccctggctctggggagtcccatgtactctatcatcacccccaacatcttgcggctggagagcgaggagaccatggtgctggaggcccacgacgcgcaaggggatgttccagtcactgttactgtccacgacttcccaggcaaaaaactagtgctgtccagtgagaagactgtgctgacccctgccaccaaccacatgggcaacgtcaccttcacgatcccagccaacagggagttcaagtcagaaaaggggcgcaacaagttcgtgaccgtgcaggccaccttcgggacccaagtggtggagaaggtggtgctggtcagcctgcagagcgggtacctcttcatccagacagacaagaccatctacacccctggctccacagttctctatcggatcttcaccgtcaaccacaagctgctacccgtgggccggacggtcatggtcaacattgagaacccggaaggcatcccggtcaagcaggactccttgtcttctcagaaccagcttggcgtcttgcccttgtcttgggacattccggaactcgtcaacatgggccagtggaagatccgagcctactatgaaaactcaccacagcaggtcttctccactgagtttgaggtgaaggagtacgtgctgcccagtttcgaggtcatagtggagcctacagagaaattctactacatctataacgagaagggcctggaggtcaccatcaccgccaggttcctctacgggaagaaagtggagggaactgcctttgtcatcttcgggatccaggatggcgaacagaggatttccctgcctgaatccctcaagcgcattccgattgaggatggctcgggggaggttgtgctgagccggaaggtactgctggacggggtgcagaacctccgagcagaagacctggtggggaagtctttgtacgtgtctgccaccgtcatcttgcactcaggcagtgacatggtgcaggcagagcgcagcgggatccccatcgtgacctctccctaccagatccacttcaccaagacacccaagtacttcaaaccaggaatgccctttgacctcatggtgttcgtgacgaaccctgatggctctccagcctaccgagtccccgtggcagtccagggcgaggacactgtgcagtctctaacccagggagatggcgtggccaaactcagcatcaacacacaccccagccagaagcccttgagcatcacggtgcgcacgaagaagcaggagctctcggaggcagagcaggctaccaggaccatgcaggctctgccctacagcaccgtgggcaactccaacaattacctgcatctctcagtgctacgtacagagctcagacccggggagaccctcaacgtcaacttcctcctgcgaatggaccgcgcccacgaggccaagatccgctactacacctacctgatcatgaacaagggcaggctgttgaaggcgggacgccaggtgcgagagcccggccaggacctggtggtgctgcccctgtccatcaccaccgacttcatcccttccttccgcctggtggcgtactacacgctgatcggtgccagcggccagagggaggtggtggccgactccgtgtgggtggacgtcaaggactcctgcgtgggctcgctggtggtaaaaagcggccagtcagaagaccggcagcctgtacctgggcagcagatgaccctgaagatagagggtgaccacggggcccgggtggtactggtggccgtggacaagggcgtgttcgtgctgaataagaagaacaaactgacgcagagtaagatctgggacgtggtggagaaggcagacatcggctgcaccccgggcagtgggaaggattacgccggtgtcttctccgacgcagggctgaccttcacgagcagcagtggccagcagaccgcccagagggcagaacttcagtgcccgcagccagccgcccgccgacgccgttccgtgcagctcacggagaagcgaatggacaaagtcggcaagtaccccaaggagctgcgcaagtgctgcgaggacggcatgcgggagaaccccatgaggttctcgtgccagcgccggacccgtttcatctccctgggcgaggcgtgcaagaaggtcttcctggactgctgcaactacatcacagagctgcggcggcagcacgcgcgggccagccacctgggcctggccaggagtaacctggatgaggacatcattgcagaagagaacatcgtttcccgaagtgagttcccagagagctggctgtggaacgttgaggacttgaaagagccaccgaaaaatggaatctctacgaagctcatgaatatatttttgaaagactccatcaccacgtgggagattctggctgtcagcatgtcggacaagaaagggatctgtgtggcagaccccttcgaggtcacagtaatgcaggacttcttcatcgacctgcggctaccctactctgttgttcgaaacgagcaggtggaaatccgagccgttctctacaattaccggcagaaccaagagctcaaggtgagggtggaactactccacaatccagccttctgcagcctggccaccaccaagaggcgtcaccagcagaccgtaaccatcccccccaagtcctcgttgtccgttccatatgtcatcgtgccgctaaagaccggcctgcaggaagtggaagtcaaggctgccgtctaccatcatttcatcagtgacggtgtcaggaagtccctgaaggtcgtgccggaaggaatcagaatgaacaaaactgtggctgttcgcaccctggatccagaacgcctgggccgtgaaggagtgcagaaagaggacatcccacctgcagacctcagtgaccaagtcccggacaccgagtctgagaccagaattctcctgcaagggaccccagtggcccagatgacagaggatgccgtcgacgcggaacggctgaagcacctcattgtgaccccctcgggctgcggggaacagaacatgatcggcatgacgcccacggtcatcgctgtgcattacctggatgaaacggagcagtgggagaagttcggcctagagaagcggcagggggccttggagctcatcaagaaggggtacacccagcagctggccttcagacaacccagctctgcctttgcggccttcgtgaaacgggcacccagcacctggctgaccgcctacgtggtcaaggtcttctctctggctgtcaacctcatcgccatcgactcccaagtcctctgcggggctgttaaatggctgatcctggagaagcagaagcccgacggggtcttccaggaggatgcgcccgtgatacaccaagaaatgattggtggattacggaacaacaacgagaaagacatggccctcacggcctttgttctcatctcgctgcaggaggctaaagatatttgcgaggagcaggtcaacagcctgccaggcagcatcactaaagcaggagacttccttgaagccaactacatgaacctacagagatcctacactgtggccattgctggctatgctctggcccagatgggcaggctgaaggggcctcttcttaacaaatttctgaccacagccaaagataagaaccgctgggaggaccctggtaagcagctctacaacgtggaggccacatcctatgccctcttggccctactgcagctaaaagactttgactttgtgcctcccgtcgtgcgttggctcaatgaacagagatactacggtggtggctatggctctacccaggccaccttcatggtgttccaagccttggctcaataccaaaaggacgcccctgaccaccaggaactgaaccttgatgtgtccctccaactgcccagccgcagctccaagatcacccaccgtatccactgggaatctgccagcctcctgcgatcagaagagaccaaggaaaatgagggtttcacagtcacagctgaaggaaaaggccaaggcaccttgtcggtggtgacaatgtaccatgctaaggccaaagatcaactcacctgtaataaattcgacctcaaggtcaccataaaaccagcaccggaaacagaaaagaggccttcaggattgccaaggaacactatggatccttgagatctgtaccagggtaccgggggagaccagggatggccactatgtctatattgggacatatccatggatggactgggctttgctccaggacacaggttgaccttgaaggcagctgggccaatggtgttgacagatacatctccaagtatgagcttggacaaagccttctccgataggaacaccctcatcatctacctggacaaggtctcacactctgaggatgactgtctagctttcaaagttcaccaatactttaatgtagagcttatccagcctggagcagtcaaggtctacgcctattacaacctggaggaaagctgtacccggttctaccatccggaaaaggaggatggaaagctgaacaagctctgccgtgatgaactgtgccgctgtgctgaggagaattgcttcatacaaaagtcggatgacaaggtcaccctggaagaacggctggacaaggcctgtgagccaggagtggactatgtgtacaagaaccgactggtcaaggttcaactgtccaatgactttgacgagtacatcatggccattgagcagaccatcaagtcaggctcggatgaggtgcaggttggacagcagcgcacgttcatcagccccatcaagtgcagagaagccctgaagctggaggagaagaaacactacctcatgtggggtctctcctccgatttctggggagagaagcccaacctcagctacatcatcgggaaggacacttgggtggagcactggcctgaggaggacgaatgccaagacgaagagaaccagaaacaatgccaggacctcggcgccttcaccgagagcatggttgtctttgggtgccccaactga

SEQ ID NO: 153826 - DNA, 1295 bp, Homo sapiens
  misc_feature (1)...(1295): n = a,t,c or g
ctgaaggaaaaggccaaggcaccttgtcggtggtgacaatgtaccatgctaaggccaaagatcaactcacctgtaataaattcgacctctgcctcccaggttcaagacagaaagtcgaagtcttcctggggccatgtctgcagcctgggactttcctttggagtagaaataggagggtgcttggttttcccagcatgaatggagaggacatggggcttctcttcctctgctctgagtgggaaaggagctctgagggctggctctgcaacagagaagggggaagtggacactcaattgaaccccactgctgtaccttcctgcatctcactcaccgttcactggctttttctcttctagcaggtgtctcctgcacctgcgccagctcctgcaagtgcaaagaagtgcaaatgcacctcctgcaagaagagtgagtgcggggccatctccaggaatctggggctgtggcttaaggttgggagggaacccaaggctgtccctgaagtgcgtgcttctggggaaccggccttcctttgtccctgtaggttgtcactgcctgtctagtcttctgcaactttccagggcttatgtgaagtggggcagctttctccaaaggaagacccgattctcaatgtccaaccaagttgtctcctgacaaaaaaccatgcccatcatgaactaaagggtccctctggggctgggagggatggagacaggcctctgttggggcagggagttcctctggatcgagtctgcctctgaccctctcaatctcctttcctcccccaggctgctgctcctgttgccccctgtgggctgtgcccaagtgtgccccagggctggcatctgcaaaggggcatcggagaagtgcagctgctgcgcctggatgtcgggacagccctgctcccaacgtacaaatagagttgacccgtaaaatccagggatttttgtgtttttttgctaacaatctttgaacccctttggctaacattccttttttttctgtggaaatatgtggaataattaatttaaacacttaagacttgnnnnnnnnnnnnnnnnntataatggggcgccccttttaaagaacccttggggggcccaaatttaacccgggctgggaaggctatagcttttcccttatagggggggttttaaaaagctagtggggaattttgggaaaaaaccctttcttgtgtgggggagcatattggaccaccctcccctccgaattttaacgccccagggcaaaataaaatttttaagggggaagggggtaaaccaacccgctattcccg

SEQ ID NO: 153827 - DNA, 1972 bp, Homo sapiens
ggtccaaccagccgctccgccgtgaagctttcccagaaacccccaaaggcctccgccagggtattccgggggagccggagaatggggacagatcccatttcttttcatttgacgtgaccgctgtcatgatactttacaaagaatcgcaggctctcactgggaatctgccgggaccgcagttgccaaggcgactccgcgctgcagggcgaggcggccatccgtctgtgcccgccccctcacgccgtggcgcgctctcacgcttccccgcctccgggcgctccgcggtgccgaccattggctggctctgcaggtctcactatcctcactccatccgcggagccaatggctgggaccgccaggagctcgttcgcgcgagtcacacgatgtcggcaactgcacagaccaatcaccgcgccgagaaggcggggcgggagctctcgcaggccaataacgacaggacgggccgcctggcccacccggctccacccccaagccaggcgaggcaggttccgaggttggaacacctggcgagtcctcggtgtcggtggccggcagtcatctcgcggccgttcagatcgtggcattgcatcttagaaataaggtttaggaagggcaagcttggaggcagggcaagtccagaaaatgaaggagctggtgaaatccgtgttaaagtgccaaaggacagagactggctgacagctaaacttcaaggtgacttacttacagttagccaaactgcaaagttggaggacatggtccttcagactgccaagtccactcaagactttctgacaccaacggcaaggagttacagcccaactacaaagctaaaagggaaagtcaacacaaaatctcccacacttctgacaccaaccgcaagaggaagacattacctactcggagcaccaattgcctcatggagatgtcatacgtcgactatacgttatcatacggtcgtagtcatgtctatgacactgacggaatctgagcatcaggctggttcggtagatatgtctgcaaatgattatgctcattattcaggcgctagtggagataatgaaatgtgtgttgtaattgcatgtccaacgccacttttcctgagtccacgggcctggaaaccatgtgatgctgggtccaaagtgaagaattgggggatagagaacgggaatcttgttcacacagttctctccagtacccagcatggtgacccagaacatgtacatgctccatttggaatggaagctgaatatgcacatcctttggagactctaattcttggaactggatttttcattggaatcgtgcttttgtgtgatcatgtaattcttctttgggcatgggtgaccattcgtttattagaaactattgatgtccatagtggttatgatattcctctcaaccctttaaatctgatccctttctatgctggttctcggcatcatgatttccaccacatggaacttcattgggaaactatggcttccaacattttacacggtggggattggaattttttgggaacagactctcagtataatgcctataatgaaaagaggaagaagtttgagaaaaagactgaataaatatctcacgtaaaccttcctgaaagataaacgttttcctgaattcagaaactagtagctaacattgcttctggagagcagaaataagcatgtcttctggctactaagtgataagaagaacattaacaacctttaattaccttcctagtggggaactttttctactttacctacaagttctatatatgtaggaaatgaataaatatatatttaaggtacagttttccatgagggaagtttttaaaaggccatgttccctaagcttcccaggaagggttttggggtactaggaggtatttaatctatgggcttttctcccagtaaaaccatagggcctgaagtttgacattgggtctttaaatcttttagatatatactggtcatttcag

SEQ ID NO: 153828 - DNA, 3239 bp, Homo sapiens
cggacgcgtgggcgaaatgagccaggggcgtggaaaatatgacttctatattggcctgggattggctatgagctccagcattttcattggaggaagtttcattttgaaaaaaaagggcctccttcgacttgccaggaaaggctctatgagagcaggtcaaggtggccatgcatatcttaaggaatggttgtggcgggctggactgctgtcaatgggagctggtgaggtggccaacttcgctgcgtatgcggttgcaccagccactctagtgactccactaggagctctcagcgtgctagtaagggccattctttcttcatactttctcaatgaaagacttaatcttcatgggaaaattgggtgtttgctaagtattttaggatctacttgttatggtcattcatgctccaaaggaagaggagattgagactttaaatgaaatgtctcacaagctaggtgatccaggttttgtggtctttgcaacccttgtggtcattgtggccttgatattaatcttcgtggtgggtcctcgccatggacagacaaacattcttgtgtacataacaatctgctctgtaatcggcgcgttttcagtctcctgtgtgaagggcctgggcattgctatcaaggagctgtttgcagggaagcctgtgctgcggcatcccctgggcttggattctgctgctgagcctcatcgtctgtgtgagcacacagattaattacctaaatagggccctgggatatattcaacacttccattgtgactccaatatattatgtattctttacaacatcagttttaacttgttcagctattctttttaagggagtgggcaaggatatgcccgttggacgatgtccattggtactttgaagtggcttctttacaatcattgtggggggatattcttgttgcatgcctttaaagacgtcagctttagcctaagcaaagtctggcctgtgtcttttccgaaaaagacgaggaaagcaatgaatggcaatctctctaatatgtatgaagttccttaataataatgaagaaagcttaacctgtgggaatcgaacaacacactgggtgaaaaatgtctcccgaaggaaatgggaaatctgacagctttttaaggaaaggtggaattaaaagggttaatctgtggattgttatggaagtgaatttggaatatcatccaggaatgtgtctggaaaaaacattgtccctcaaataatgttcttttaaaggcaatctttttaaagatttcactaatttggacccaagaaaattacttttcttgtatttaaacaaacaatggtagctcacctaaaatgacctcagcacatgacgatttctattaacattttattgttgtagaagtattttacattttcatcccttctccaaaagccgaatgcactaatgacagttttaagtctatgaaaatgctttattttttcattggtgatgaaagtctgaaatgtgcatttcgtcatccccactccatcaatccctgaccatgtaaggcttttttattttaaaaaaaacagagttatcccaatacattatcctgtgatttacccttaccctacaaaagtggctccctgtttgtttggatgaatgattggttttatttttgaaaatatttattaagggaaaactaaagttactggaatgaagggaaccctcttccttacaaaaacaaaaaaaagggcaagaaatcaccccccaaggaacgatttcctcagggttgagatgatcacccgtgaatccggctttcctctgaggcattcgatgggccttagcacctccatccaagcccagcacatcctggcctggctggttgcagcctgggctgggggttattctttcagttacccttaagtccccatggatgcctgggaacccttgattaaccgtttttacatcagccccttgtaccttttcagtatattttcataatgaagttatattgtcatttaagactttgaaccagctcctgggaaatagaagacctagggttgtttcttaaaagtttagccccatgttaataaataaaaaagttggaaatgaagttcttattctaaaagtctggaatgcttaggaacaaacttaacatgtttataggaatatgggtctctttgtaccaagtactttggcttaaggagctcctttggggccactacatattttgggtttctaggaaaatgtttgtttgtttatggaggagtcggtgggaaaactgcaaacatatgcagaaaaggtagaataataaaaaaggtctaatgaactccattcagctttgaacctatccactcataacccattgactggccctttaaaaaaaagtattggcagaattaatttcccacctaggtgatgggaagaaagtgttcgcctgttcccagccctgtggctcctggcctggaggttaccccagtggtgcgccagcgccaagccatcaacttccccgagggcctccccgtgccaatggtgctggtatcccatgcagctcaccactggctgcgtggaaactccctttttttccaactttattattggccttctaaggagctgttttagatgttttttctaactgcctcctcccaatgccattttaatactacagatgtactacatatctgtttatatactgtacctacatctgtgctttgtacataaaagaaccagttttctcccccttgaggacagagactcatttgaacatgcataggttaataaataataataaattcttatttaacattttgtagcacttgagattgtcttatacctaaggtattacatatttggtatataattaagccttataaaacttggtaattgattaagttttaccataatttttcatcctattctgtagtttctaagataagcacagctaccacctctaaatctgcagcagaatgctggccccagggttattaattcacattaccaaaagcatttttagggaactttttataaagaaagaataattgtttgttaggcttcatgtcacttgagtgagtttggcagtgtaacaggatggttcgtacacttactacttttctgtgccgtgcatcatatgcttctggacagtttccaaaggcctccggaaaagtaggcgaggcctgctttttatggcaacttggcatccatagaaaattttaaaattggtgaaggttgcaatactccaaataatgtaaaatgactgccaggctacaatataaagtgagttcagttaatc

SEQ ID NO: 153829 - DNA, 533 bp, Homo sapiens; identical to SEQ ID NO: 152310

SEQ ID NO: 153830 - DNA, 870 bp, Homo sapiens
ctcccggttcgacgatttcgtggcgcccgggcctggcgcggagcctgagcccgccggacgggaggcggccccgccgcgggctcggccccggccccagccccgccagcatggccggccggactgtacgggccgagacccggagccgggccaaggatgacatcaagaaggtgatggcgaccatcgagaaggtccggagatgggagaagcgatgggtgactgtggccgccactccctttcggatcctcaattgggttgcaagtggtggatccccaggaggaggagcgaagcgcgggcaggtggcggggcagagagatcccgtgggccgggaacgtcggggcaggggcgccagtcccgatgggggtgggccctcttcatcctgctggatcttaaatgatgagaacagcaaccagaggtttccacttcggaagggttccttgcaaaggggcacagaggcccagtcctgggggcacccccaaagcccaaccggccttgtgtcaccttgccggaccccccagaagggggtccctgcacgagggctcagccccccacgggttgggccaagaagagagatcccccgggggcataactgtttggcagcaccgacgaaccccccaatgctgaccaaggaggagcctgttccagaactgctggaagctgaggcccccgaagcttagccctgtctttgagccagtgccacctgtccctgaggcagcccagggtgacacagaggacttcgggagtgccccccccactcaagcgcatctgcccaaatgcccctgacccctgagaagccggcctgcctgtcctgttcgcccaggggcccctttgcgctttttacaaataaagacccttttgtaaaaaaaaaaaaaa

SEQ ID NO: 153831 - DNA, 442 bp, Homo sapiens
gattgtgtcagaaaacagctcaaaaaagagaggcccatcatcctggatccggccgaccccaccctcaacgtggcagaagggtactggttgggtctggggatctatggcatccaagacagtgacactctcatcctctcgaagaagaaaggagaggctctgtttccagccagttagttttctctgggagacttctctgtacatttctgccatgtactccagaactcatcctgtcaatcactctgtcccattgtctactgggaaggtcccaggtcttcaccagttttacaatgagttatcccaggccagacgtggtagctcacacctgtaatcccagaactttgggaggccgaggtgggaggagcgcttgagccgaggagttcaagaccagcctgggtatcatagggagaccccgtctctacaaaataaaaaataattcactggg

SEQ ID NO: 153832 - DNA, 5501 bp, Homo sapiens
  misc_feature (1)...(5501): n = a,t,c or g
atggtttctaaactgagccagctgcagacggagctcctggcggccctgctcgagtcagggctgagcaaagaggcactgatccaggcactgggtgagccggggccctacctcctggctggagaaggccccctggacaagggggagtcctgcggcggcggtcgaggggagctggctgagctgcccaatgggctgggggagactcggggctccgaggacgagacggacgacgatggggaagacttcacgccacccatcctcaaagagctggagaacctcagccctgaggaggcggcccaccagaaagccgtggtggagacccttctgcagtaaggagccctgccccgtccccgctcccaggagagcctagaggggcccccctcagctcctaacgagccccccttctgagttgagtccccatgaccttcagcctttagcctagttgctgggaagggggacagggcccatgagagcccaggggtccttgcttggaggtttgagcctccagcccctgaactgctcctctgcagagtcccaaatcccatgagcccaggcctttagcccagtccttgggcnagggggacatttcccagggggtccaagatgggagaaaaagcagtgaattcacaactcaaatgccncacccacccatccatccatccgtccatccacccattcatccattcatccattcacccatccatccatccacatatcttcatctgtgttgtgtgtctgtgtatccatgtttctaaacctttatctgttccagtgtctgtatccataggcctgtgtccacgtttgtcatgtgtgtgcgtcnacaagtctctgtcctcatgaccatgtgtctgtgtccctgtgtcctggcataaatgaccatacctcaccgtccctgagtctatgtgtaggcccctgggctccataactgctttcatgcacagtccccaccctcagagttgacaaggttccagcacccaggaccgcagccccacctatggggagagacagcccttgctgagcagatcccgtccttgccctctcccagggaggacccgtggcgtgtggcgaagatggtcaagtcctacctgcagcagcacaacatcccacagcgggaggtggtcgataccactggcctcaaccagtcccacctgtcccaacacctcaacaagggcactcccatgaagacgcagaagcgggccgccctgtacacctggtacgtccgcaagcagcgagaggtggcgcagcgtaagtaatgaccctaccccgcatcttccctgggagggcccaggactctcccctaactcataggtgggggctggaagcttcaccatccccattacacagacaggtagatggaaaggaagtcagtgggattcaacctgcatttattacctattctgcgccaggcactctgtgggacgggagtanacttggtcctgaacatccaaagatgaatgaaatgggtccctgctttctttttctttttttagatancgtgactctggaaaaatatgtaagctctctgagcctcagcttcttcatctgtacaatggggatagtaaatgtgccaaatcagaacaaatgctaatgcttacctgcagtcttgtactgagaaggatggtgagatcatatcttgggttggtaggaaagcattcagggattgattagtgatgtttgccttgaacacaggttaagaaagtgatggcatgtgtgctgtgtgtttgtcatcagtagattagatgatttctaagttctagctgtaagctcctctggttcagcgccatggcaatgagaaagaatcaagggcaaggtcaggggaatggacgagggaaggtgagagtggccagtaccccactcacggctttctgtgcctgcagagttcacccatgcagggcagggagggctgattgaagagcccacaggtgatgagctaccaaccaagaaggggcggaggaaccgtttcaagtggggcccagcatcccagcagatcctgttccaggcctatgagaggcagaagaaccctagcaaggaggagcgagaggtacaacggcgggcgggaaacagtgctggtttggtctgggctgcggcaaggccaggggaaggggaaggtgactctaggtcctgtaaaaggctgtccagttgccgagaactcctgatattggcttagcctggcccagaaaattgagaatacttgaacctaagcccattcctcgcagcccccctgcaccntggacaccaagcaaccccttccatggatgctcacccaattcgattctctctacaatcctatggctcttttgctcactttatgaatggagagactgaggtcagacagactgtcaattgcccaaggtcacacagcagacctggcattggaacccagatctgccagcctcaaaccctccggcagagntcagcttctcagaaccctccccttcatgcccaggacagggttcctctgagcctggcctggaggctcatgggtggctatttctgcagggcggaatgcatccagagaggggtgtccccatcacaggcacaggggctgggctccaacctcgtcacggaggtgcgtgtctacaactggtttgccaaccggcgcaaagaagaagccttccggcacaagctggccatggacacgtacagcgggccccccccagggccaggcccgggacctgcgctgcccgctcacagctcccctggcctgcctccacctgccctctcccccagtaaggtccacggtaagtggtatgtggggacaagggacacgtgggaaggtgggagggttggggaggactgtcccattgacagcagtcacctaaacctctttgcacgtcagtttggttccattcngcagctgacccagggattggcaaaaggtagaaacaaaggcagatttgctggctgcataaaggcagacaggcagatggcctaagcaaaccaatggagtttgaagtgctgagggctgtggaggcaggggagggcagggaagtggggtgctgaggcaggacactgcttccctctccaggtgtgcgctatggacagcctgcgaccagtgagactgcagaagtaccctcaagcagcggcggtcccttagtgacagtgtctacacccctccaccaagtgtcccccacgggcctggagcccagccacagcctgctgagtacagaagccaagctggtgagtgtccttgcttgtaaggaaaacccaacctcatctttccttggcagggagattctggagcagtccctagggaggccctgtggggaccccggccccccggacacagcttggcttcccctcgtaggtctcagcagctgggggccccctcccccctgtcagcaccctgacagcactgcacagcttggagcagacatccccaggcctcaaccagcagccccagaacctcatcatggcctcacttcctggggtcatgaccatcgggcctggtgagcctgcctccctgggtcctacgttcaccaacacaggtgcctccaccctggtcatcggtaagctggtggggatgggtgggcacctgggtgggaggctcatggggcaaccgcanaatccaggagctggaaaagccactgggactcattcattcattcattcattcatacaacatgtntaggagaggggagcagagaactgaccccatggcctttgcactgctgtggtaccccagggctccagggaaccgcagtttgacaacttttgaacaagtcaccgcttgcttttcccattagcttagacaaagagctaaaggctcagagagggggaatgacttgccagagccacttaaattagtggcaggtcccagtggagggctgtttcctgaccaccttgccccttcttccaaaccacgggctctgggaaggagaggtggtgcccttgggaggtcttgggcaggggtgggatataactggggggcccagctgattccctccccttccactccaggcctggcctccacgcaggcacagagtgtgccggtcatcaacagcatgggcagcagcctgaccaccctgcagcccgtccagttctcccagccgctgcacccctcctaccagcagccgctcatgccacctgtgcagagccatgtgacccagaaccccttcatggccaccatggctcagctgcagagcccccacggtgagcaccctgtgccccacacagcaggagatgatgatagaggttggctgtcaatggatgcaggggaaaggggtgcctggcaggcattgcagtctgcatgtgtctctgggacaagtgtgtttccgtgattgagggtgtctgcaggccagtgtgttcccatgtgaatgcacgtatctgtgtgtgtgcacgactgcttgtgtgagcagatccctagtgcgtgtctgggtgtgtatcggttgtgcatgcatttgtgtgcatgcctgtgtttctctgaaactcttagggccatatgaatttctaaaatctattcaganccagttttgaaaatcagccttggatctccaactgctgcccagtctggctgttcagcaggccccatgcccccctttccccagtcttgaggcctgggactagggctgtcaggcacgtttgccacgtctgcccctctctcccctgcggccagccctctacagccacaagcccgaggtggcccagtacacccacacgggcctgctcccgcagactatgctcatcaccgacaccaccaacctgagcgccctggccagcctcacgcccaccaagcaggtaaggtccaggcctgctggccctccctcggcctgtgacagagcccctcacccccacatcccccgggctcaggaggctgctctgctcccccaggtcttcacctcagacactgaggcctccagtgagtccgggcttcacacgccggcatctcaggccaccaccctccacgtccccagccaggaccctgccggcatccagcacctgcagccggcccaccggctcagcgccagccccacaggtgagaggccctggctccaccccctcccttactgtccctgcccccttccatgttggtcccaccccttctgttgctgtccgtcactgtggggctgtgcatgcagcaggcctagggctgctgtgaggaagcactggcaggcgtggaagggtggggtggcttccatgaantccagtgttcacagtaagatgtactcaggccagtccatgggcggccgtggaccctggctgggaggctccctttgttaagaaccgagggtagaggtgtgactttggggttcctgttatgtgctgtgatccaggaggtgtggccctgcctccccatcctgagtacccctagggacaggcaggtggggtgggtgtgggtgcctggtgggtggctagcagccttgtttgcctctgcagtgtcctccagcagcctggtgctgtaccagagctcagactccagcaatggccagagccacctgctgccatccaaccacagcgtcatcgagaccttcatctccacccagatggcctcttcctcccagtaa

SEQ ID NO: 153833 - DNA, 2309 bp, Homo sapiens
ggggccctgattcacgggccgctggggcagggttgggggttgggggtgcccacagggttggctagtggggttttgggggggcagtgggtgcaaggagtttggtttgtgtctgccggccggcaggcaaacgcaaccacgcggtgggggaggcggctagcgtggtggacggcccgcgtggccctgtggcagccgagccatggtttctaaactgagccagctgcagacggagctcctggcggccctgctcgagtcagggctgagcaaagaggcactgatccaggcactgggtgagccggggccctacctcctggctggagaaggccccctggacaagggggagtcctgcggcggcggtcgaggggagctggctgagctgcccaatgggctgggggagactcggggctccgaggacgagacggacgacgatggggaagacttcacgccacccatcctcaaagagctggagaacctcagccctgaggaggcggcccaccagaaagccgtggtggagacccttctgcaggaggacccgtggcgtgtggcgaagatggtcaagtcctacctgcagcagcacaacatcccacagcgggaggtggtcgataccactggcctcaaccagtcccacctgtcccaacacctcaacaagggcactcccatgaagacgcagaagcgggccgccctgtacacctggtacgtccgcaagcagcgagaggtggcgcagcagttcacccatgcagggcagggagggctgattgaagagcccacaggtgatgagctaccaaccaagaaggggcggaggaaccgtttcaagtggggcccagcatcccagcagatcctgttccaggcctatgagaggcagaagaaccctagcaaggaggagcgagagacgctagtggaggagtgcaatagggcggaatgcatccagagaggggtgtccccatcacaggcacaggggctgggctccaacctcgtcacggaggtgcgtgtctacaactggtttgccaaccggcgcaaagaagaagccttccggcacaagctggccatggacacgtacagcgggccccccccagggccaggcccgggacctgcgctgcccgctcacagctcccctggcctgcctccacctgccctctcccccagtaaggtccacggtgtgcgctatggacagcctgcgaccagtgagactgcagaagtaccctcaagcagcggcggtcccttagtgacagtgtctacacccctccaccaagtgtcccccacgggcctggagcccagccacagcctgctgagtacagaagccaagctggtctcagcagctgggggccccctcccccctgtcagcaccctgacagcactgcacagcttggagcagacatccccaggcctcaaccagcagccccagaacctcatcatggcctcacttcctggggtcatgaccatcgggcctggtgagcctgcctccctgggtcctacgttcaccaacacaggtgcctccaccctggtcatcggcctggcctccacgcaggcacagagtgtgccggtcatcaacagcatgggcagcagcctgaccaccctgcagcccgtccagttctcccagccgctgcacccctcctaccagcagccgctcatgccacctgtgcagagccatgtgacccagagccccttcatggccaccatggctcagctgcagagcccccacggtgagcaccctgtgccccacacagcaggagatgatgatagaggttggctgtcaatggatgcaggggaaaggggtgcctggcaggcattgcagtctgcatgtgtctctgggacaagtgtttttccgtgattgagggtgtctgcaggccagtgtgttcccatgtgaatgcacgtatctgtgtgtgtgcacgactgcttgtgtgagcagatccctagtcgtgtctgggtgtgtatcggttgtgcatgcatttgtgtgcatcctgtgtttctctgaaactcttagggccatatgaatttctaaaatctattcagattttagaaaggtaatctggggccaggcgtggtggctcatgcctgtaatcccagcactttggaaggccgaggtgggcagatcacttgaggtcaggagttcaagaccagcctggccaacacggtgaaaccccgtctctactaaaagtacaaaaattagccaggcgtggagcacgtgcctgtagtcccagctacttgggaggctgaggcagaatcgcttgaacctgggaggcggaggttgcagtgagctgagatttggccactgcactgcactccagcctgggcaacagagtgagtactctgcc

SEQ ID NO: 153834 - DNA, 2983 bp, Homo sapiens
gtggggttttgggggggcagtgggtgcaaggagtttggtttgtgtctgccggccggcaggcaaacgcaaccacgcggtgggggaggcggctagcgtggtggacggcccgcgtggccctgtggcagccgagccatggtttctaaactgagccagctgcagacggagctcctggcggccctgctcgagtcagggctgagcaaagaggcactgatccaggcactgggtgagccggggccctacctcctggctggagaaggccccctggacaagggggagtcctgcggcggcggtcgaggggagctggctgagctgcccaatgggctgggggagactcggggctccgaggacgagacggacgacgatggggaagacttcacgccacccatcctcaaagagctggagaacctcagccctgaggaggcggcccaccagaaagccgtggtggagacccttctgcaggaggacccgtggcgtgtggcgaagatggtcaagtcctacctgcagcagcacaacatcccacagcgggaggtggtcgataccactggcctcaaccagtcccacctgtcccaacacctcaacaagggcactcccatgaagacgcagaagcgggccgccctgtacacctggtacgtccgcaagcagcgagaggtggcgcagcagttcacccatgcagggcagggagggctgattgaagagcccacaggtgatgagctaccaaccaagaaggggcggaggaaccgtttcaagtggggcccagcatcccagcagatcctgttccaggcctatgagaggcagaagaaccctagcaaggaggagcgagagacgctagtggaggagtgcaatagggcggaatgcatccagagaggggtgtccccatcacaggcacaggggctgggctccaacctcgtcacggaggtgcgtgtctacaactggtttgccaaccggcgcaaagaagaagccttccggcacaagctggccatggacacgtacagcgggcccccccccagggccaggcccgggacctgcgctgcccgctcacagctcccctggcctgcctccacctgccctctcccccagtaaggtccacggtgtgcgctatggacagcctgcgaccagtgagactgcagaagtaccctcaagcagcggcggtcccttagtgacagtgtctacacccctccaccaagtgtcccccacgggcctggagcccagccacagcctgctgagtacagaagccaagctggtctcagcagctgggggccccctcccccctgtcagcaccctgacagcactgcacagcttggagcagacatccccaggcctcaaccagcagccccagaacctcatcatggcctcacttcctggggtcatgaccatcgggcctggtgagcctgcctccctgggtcctacgttcaccaacacaggtgcctccaccctggtcatcggtaagctggtggggatgggtgggcacctgggtgggaggctcatggggcaaccgcagaatccaggagctggaagagccactgggactcattcattcattcattcattcatacaacatgtatttatccagtgcctactctggaccagtcactgtgctacatcagtgatacctgggtgaaccaaacagaccaaaatctcagcaactcaagcagggaggcaggcactaagcataatacatcaattctgtggtacctcagaaggtgaagggtctatgggcaaattacagcagggtaagggagactgatgttttctaagtttttgttttatgaagaaaaattaagcccagaaagcccttatttgcaggtacaattatgcagaagcccagtacataagatagataaggagctgctaggagaggggagcagagaactgaccccatggcctttgcactgctgtggaaccccagggctccagggaaccgcagtttgacaacttttgaacaagtcaccgcctgcctctcccactagcctagacaaagagctaaaggctcagagagggggaatgacttgccagagccacttaaattagtggcaggtcccagtggagggctgtttcctgaccaccctgccccctcctccaaaccacgggctctgggaaggagaggtggtgttgggaggtcttaaacaggggtgggatataactggggggcccagctgattccctccccttccactccaggcctggcctccacgcaggcacagagtgtgccggtcatcaacagcatgggcagcagcctgaccacctgcagcccgtccagttctcccagccgctgcacccctcctaccagcagccgctcatgccacctgtgcagagccatgtgacccagagccccttcatggccaccatggctcagctgcagagcccccacggtgagcaccctgtgccccacacagcaggagatgatgatagaggttggctgtcaatggatgcaggggaaaggggtgcctggcaggcattgcagtctgcatgtgtctctgggacaagtgtttttccgtgattgagggtgtctgcaggccagtgtgttcccatgtgaatgcacgtatctgtgtgtgtgcacgactgcttgtgtgagcagatccctagtgcgtgtctgggtgtgtatcggttgtgcatgcatttgtgtgcatgcctgtgtttctctgaaactcttagggccatatgaatttctaaaatctattcagattttagaaaggtaatctggggccaggcgtggtggctcatgcctgtaatcccagcactttggaaggccgaggtgggcagatcacttgaggtcaggagttcaagaccagcctggccaacacggtgaaaccccgtctctactaaaagtacaaaaattagccaggcgtggagcacgtgcctgtagtcccagctacttgggaggctgaggcagaatcgcttgaacctgggaggcggaggttgcagtgagctgagatttggccactgcactgcactccagcctgggcaacagagtgagtactctgcc

SEQ ID NO: 153835 - DNA, 2402 bp, Homo sapiens
  misc_feature (1)...(2402): n = a,t,c or g
atgatgctgaaaggaaaagctcattgtagcattttggattttggatttttggatttgcagtgttcaaccaattcggctgctgagttcatcagaagctgggaggacccgtggcgtgtggcgaagatggtcaagtcctacctgcagcagcacaacatcccacagcgggaggtggtcgataccactggcctcaaccagtcccacctgtcccaacacctcaacaagggcactcccatgaagtcgcagaagcgggccgccctgtacacctggtacgtccgcaagcagcgagaggtggcgcagccccacatcccctaccccatccctgagaacagcactggcacagaatggctgattgagctgacttggctggacccaactcacgcaaagaatgatcaggaacacagaactgattctccagtaaattatgggaaaaagaaaggaaaggagaacaagaatttgaagccaccccctgaggtctatgtgagcctgatcaaggcctgcggtggtcctggaaatttctgcccatccttcagcgagctgcagagaaatttcgtgaaacatcggccaactaagctgaagagcctcctgcgcctggtgaaacactggtaccagcagtggctgcagccccaccgggagtggaaggaagaggtgctagacgctgtgcggaccgtggaggagtttctgaggcaggagcatttccaggggaagcgtgggctggaccaggatgtgcgggtgctgaaggtagtcaaggtgggctccttcgggaatggcacggttctcaggagcaccagagaggtggagctggtggcgtttctgagctgtttccacagctttccaggaggcagccaagcatcacaaagatgttctgaggctgatatggaaaaccatgtggcaaagccaggacctgctggacctcgggctcgaggacctgaggatggagcagagagtccccgatgctcttgtcttcaccatccagaccagggggactgcggagccccatcacggtcaccattgtgcctgcctacagagccctggggccttctcttcccaactcccagccaccccctgaggtctatgtgagcctgatcaaggcctgcggtggtcctggaaatttctgcccatccttcagcgagctgcagagaaatttcgtgaaacatcggccaactaagctgaagagcctcctgcgcctggtgaaacactggtaccagcagtatgtgaaagccaggtcccccagagccaatctgccccctctctatgctcttgaacttctaaccatctatgcctgggaaatgggtactgaagaagacgagaatttcatgttggacgaaggcttcaccactgtgatggacctgctcctggagtatgaagtcatctgtatctactggaccaagtactacacactccacaatgcaatcattgaggattgtgtcagaaaacagctcaaaaaagagaggcccatcatcctggatccggccgaccccaccctcaacgtggcagaagggtacagatgggacatcgttgctcagagggcctcccagtgcctgaaacaggactgttgctatgacaacagggagaaccccatctccagctggaacgtgaagagggcacgagacatccacttgacagtggagcagaggggtttacccagatttcaacctcatcgtgaacccttatgagcccataaggaaggttaaagagaaaatccggaggaccaggggctactctggcctgcagcgtctgtccttccaggttcctggcagtgagaggcaggcttctcagcagcaggtggctccttagccaaatatgggatcttctcccacactcacatctatctgctggagaccatcccttccgaagatccaggtcttcgtgaagaatcctgatggtgggaagctacgcctatgccattcaacccccaacagcttcatcctgggtctgaagcagcagattgaagacccancaggggcttcctaaaaaggcagcagcagctggaattcccaaggccaaagtcctgcaaggactggttggggtctggggattttatggcatccaagacaagtgacactctcaatcctctcggaagaagaaaggagaggctctgtttccagccagttagttttctctgggagacttcttctgtacatttctgccatgtactccagaacttcatcctgtctatcactctgtcccattgtctactgggaaggtcccaggtcttcaccagttttacaatgagttatcccaggccagacgtggtagctcacacctgtaatcccagaactttgggaggccgaggtgggaggagcgcttgagccgaggagttcaagaccagcctgggtatcatagggagaccccgtctctacaaaataaaaaaataattcactgggaaaaaaaaaaaaaaaaaa

SEQ ID NO: 153836 - DNA, 442 bp, Homo sapiens
tttcgtctctggctgctctgttaacgtgtcccgcgagcgaggtgcgttgcaaaaggtcgcggcggaacttccctgcgcttttcagaccatactctttacggtactaggcactgctgagctgggagatgtcggcggcgtgttgggaggaaccgtggggtcttcccggcggctttgcgaagcgggtcctggtgaccggcggtgctggtttcatgtaggtaatggcgccgctagccaagcagtggctccccagaaacccctaccttttcccgcagctctgcttgccctagtgcatcacatatgattgtctctttagtggaagattatccaaactatatgatcataaatctagacaagctggattactgtgcaagcttgaagaatcttgaaaccatttctaacaaacagaactacaaatttatacagggtgacatatgtgattctc

SEQ ID NO: 153837 - DNA, 1925 bp, Homo sapiens
tccgtaagctgcctctggctgctctgttaacgtgtcccgcgagcgaggcgcgtacgcaaaaggtcgcggcggaacttccctgcgcttttcagaccatactctttacggtactaggcactgctgagctgggagatgtcggcggcgtgttgggaggaaccggtggggtcttcccggcggctttgcgaagcgggtcctggtgaccggcggtgctggtttcatgtagtgcatcacatatgattgtctctttagtggaagattatccaaactatatgatcataaatctagacaagctggattactgtgcaagcttgaagaatcttgaaaccatttctaacaaacagaactacaaatttatacagggtgacatatgtgattctcactttgtgaaacttgctttttgaaacagagaaaatagatatagtactacattttgccgcacaaacacatgtagatctttcatttcgtacgtgcccttggagttttacccatgttaatgttttatgggcactcacgttttggtaagtgctgctcatgaagccagagtggagaagtttatttatgtcagcacagatgaagtatatggtggcagtcttgataaggaatttgatgaatcttcacccaaacaacctacaaatccttatgcatcatctaaagcagctgctgaaatgttttgtacagtcttactgggaacaatataagtttccagttgtcatcacaagaagcagtaatgtttatggaccacatcaatatccagaaaaggttattccaaaatttatatctttgctacagcacaacaggaaatgttgcattcatgggtcagggcttcaaacaagaaacttcctttatgctactgatgttgtagaagcatttctcactgtcctcaaaaaagggaaaccaggtgaaatttataacatcggaaccaattttgaaatgtcagttgtccagcttgccaaagaactaatacaactgatcaaagagaccaattcagagtctgaaatggaaaattgggttgattatgttaatgatagacccaccaatgacatgagatacccaatgaagtcagaaaaaatacatggcttacgatggagacctaaagtgccttggaaagaaggaataaagaaaacaattgaatggtacagagagaattttcacaactggaagaatgtggaaaaggcattagaaccctttccggtataatcaccatttatatagtccgagacagttgtcaaagaagaaagttatcctacctcgccaagtggtatgaaattaagtgaccaaatgaagtgcactcttttcttttggaattagattcatgactttctgtataaaattcaaatgcagaatggcctcaatctttgggagagtttcagtactggcatagaatttaaatgtcaaaattctttctgaaaccctttctcctaggaaactagggaaataataggtgtaggaagactctccctaagggtagccagggaaggaagtctcctgatttcggacaaccatgagggggtagtgggtgctaggggagaagggcaaccttcactggttttgaactcagtgcctaagaaagtctctgaaatgttcgtttttaggcaatatagggatgtcttaggccctaattcaccatttcttttttaagatctgatatgctatcattgccttaataatggaacaaaatagaagcatatctaacactttttaaattgataattttgtaaaattgattacgttgaatgctttttaagagaagtgtgtaaagtttttatattttcacaatttatcatgtttactgtttaaaatgattgtatttataaaattgtcaatatcttaatgtatttaatgtagaatattgcttttttaaaataatgtttttattttgctgtagaaaaataaaaaaaaatttgattatatatttttaatccttc

SEQ ID NO: 153838 - DNA, 1252 bp, Homo sapiens
ggcaatgataaaaacacttaatgtattctgacatgagtgctctaatagcctccttctcctcatttttaaactgcatacattactttcaaaataggtatagatattctgtcccgccttttgagctattagcctgttcctgtttccctttgtcacctaagcaaggctttttctgagaaggtagtgaatggtttcaaatgttgcatactataagaataatcattgggtaactgttgtttagaccaacacttagaaatactatatttgtgccttttcatttttaattttaatgtgtgttgatatttggagcacaaataatgaaggtgccataatagtggcttgccgaatgttacctccttgaatagtcatgtgtcattgtcttgaattggtaattggagaaccctgccatgaaatatgtggatccgtgtgtgtgtgtgtgtatgccgccgtgtgtgtcctgtgtgtttgtgtacatacctgtatttgctttggggcttgtgtgtggtatgttaccaaagagtgaatttctggaaatagaaatcagttaaatgttgaaagttcaggttagcagaaatatttcatttaaatatgctttactttggaggacaattgattaacagagggaaatgataattttcaaaaatgtgatcaatttactgcatgatgaaatgtgaaaacagtgcctttttaggacatcaattataataaaattgttttaaaatattaacaaagatctcaaaaagttgtcatgaacattattcatttatttttaaactggatctaaataagagcttagatggccaaaattagaattaataatatacccatttaaattttgttcataaatttaaaatcttaatcagaattctttataaaatgtgggtcatagatatgacccagtgttactaaaatagaacaaggattgtgaaaatccagctcaacatacttaagtatacttggcttagagccaagtatacttgaagaggtgaattattctgacttggacatgcatgctctttgatggataaaataaaaatattcaatttattcttacaaaagaaggtgggtgggtgagtgggttcgttttagtgttctcagattataaagacagctataaagacagcactttccgcacacaaagtgtattttacaaaccttttttatacaaattaatgagctctactttatttaagtgttcatggaatgatgtaaattttaggtccagttgaacaaatattgagtgcctatcatatgc

SEQ ID NO: 153839 - DNA, 2025 bp, Homo sapiens
  misc_feature (1)...(2025): n = a,t,c or g
agcggccgctcgcgatctagaactagggccagcctcggagccagcagggagctgggagctgggggaaacgacgccaggaaagctatcgcgccagagagggcgacgggggctcgggaagcctgacagggcttttgcgcacagctgccggctggctgctacccgcccgcgccagcccccgagaacgcgcgaccaggcacccagtccggtcaccgcagcggagagctcgccgctcgctgcagcgaggcccggagcggccccgcagggaccctccccagaccgcctgggccgcccggatgtgcactaaaatggaacagcccttctaccacgacgactcatacacagctacgggatacggccgggcccctggtggcctctctctacacgactacaaactcctgaaaccgagcctggcggtcaacctggccgacccctaccggagtctcaaagcgcctggggctcgcggacccggccccagagggcggcggtggcggcagctacttttcttgtcagggctcggacaccgggccgtctctcaagctcgcctcttcggagctggaaacgcctgattgtccccaacagcaaaacggcggatcacgacgacgcctacacccccccggacagtacttttacccccgcgggggtggcagcggtggaggtgcagggggcgcatggggcggcgtcaccgaggagcaggagggcttcgccgacggctttgtcaaagccctggacgatctgcacaagatgaaccacgtgacaccccccaacgtgtccctgggcgctaccggggggcccccgcatgggcccggcgtatacgtagcgcgagcccggagccaccgtcccgtttacaccaacctcagcagctactccccagcctctgcgtcctcgggaggcgccggggctgccgtcgggaccgggagctcgtacgccgacgaccaccatcagctacctcccacacgcgccgcccttcgccggtggccacccggcgcagctgggcttgggccgcggcgcctccaccttcaaggaggaaccgcagaccgtgccggaggcgcgcagccggtgacgccacgccgccggtgtcccccatcaacatggaaagaccaagagccccttcaaagttggagcccagcgggctgcggaaccggctggccggccaccaaagtgccggaaagcggaagcctgaagcgcttcgcgcgcctggaggacaaagttgaagacgctcaaggccggagaacgcggggcctgtcgaagtacccccgggcctccctccgggaagcaggttggcccaggctcaaaccagaaaggtcattgacccacgcgtcagcaacggcttgtccagcttgctgtttggggtccaggggacacgcctttttgaacgtcccctgccccctttagggacccccccttcgcttgggacgggctggccacacgcatcccacactggggtcccagggaaccaggccggtgggcaccccacccccgggaccctaggggcgccggcaaacccacactggactccggcccctccctaccctgcgccccagtcccttcccacctcgacggtttacaagcccccccttcccactttttttttgtatggttttttttcctgctggaaacaaacctcgattccatattgaaatataatatatttgtgtatttaacagggaggggaatagggtgtgcgatcgtgggcggagctggcccccccgccttggtactgcaagcccgcggggacattgggaaaggggacccccgccccctgccctcccctctctgctctcgtactgtgggaaaagaaacacgcacttagtctctaaagcagtctattttaagacgtgtttgtgtttgtgtctgtttgttctttttattcacatctatttaagtaaaaaaaaaaaattggtttttnnnnnnnnnnnnnnnnnnnnnnnngggggggccccttttaaagaacccttggggggccccagtttaccccgggatggcaacgtaaaacctctccccttatggggggccgaataaaacccg

SEQ ID NO: 153840 - DNA, 5918 bp, Homo sapiens
attcgaagaccactagaccagcgcggtggaattcctctaaggaaaaaacctttggaagacttagtctgtaaactcgcagatataagtattaattatgtcaatgaacgaaagtcagagcaacatctaaggtttctttctactctgcttgactccttttcttcaagccgagtatttaaaatgctacttggtgatgaaaaacagagtattgtccaagccaaacctcttgaaatagccaagcttgtacaaaaaaatcctgcggtgcagtttttataccagaaactgataggttggctaaatgaagatcaaaaggaaggattttggtttcctggtggacattttgtacagtgctctccggtgctgtgacaatgatatggaaagaaaaaaagtcttggatgatctaaccaaggtggacttgaaatggaattctcttcttaagattattgaaaaggcatgtcctagttcagataaacatgctttagtaactccttggctcaaaggcgatatccttggtgagaaattggtcaacttggcagattgtctttgtaatgaggacttggaatccagggtatcttcagaatctcacttctcagaaagatggactcttctaagcttggtattatcccaacatgttaaaaatgattacttgattggagacgtatatgttgaaagaatcattgttagacttcatgaaactttattcaaaacaaagaaattatcagaagctgaaagcagtgactcatcagtgtcttttatctgtgatgtggcctataactatttcagctcagcgaaaggatgcttgctaatgccatcatctgaagatttattattaactctctttcagttatgtgctcagagcaaagaaaaaacacatttgccagattttcttatctgtaaactgaaaaatacttggctctctggtgtaaatttattggttcatcaaactgacagttcatataaagagagtaccttcctacatttgtctgctctgtggctgaagaaccaagttcaggcttcatctttggatatcaacagtctccaagtcctcttgtctgctgttgatgatttgctaaatacacttctagagagtgaagattcttatcttatgggagtttatattggaagtgtaatgccgaacgacagtgaatgggaaaagatgaggcagtctcttcctatgcagtggttacatagacctcttttagagggaagattgagtttgaattatgaatgtttcaaaacagattttaaggaacaggacataaagacacttcccagccatttgtgtacttcagcattattgagcaaaatggtcttaattgcactgagaaaggaaacagtcttagaaaataatgagcttgagaaaataattgcagaactgctttattcactgcagtggtgtgaagaattagataacccacctatttttctaattggattttgtgaaatacttcaaaaaatgaatattacgtatgataacttacgtgtacttggtaatacgtcgggccttttgcagctgttatttaacaggtccagagaacatggcacactgtggtctcttattattgctaagttgatcctttcccgaagcatttcatctgatgaagtaaaaccacattataagagaaaagaaagtttttttccactaactgaaggcaatttgcataccattcaaagtctatgtccatttttgtcaaaagaagaaaagaaagaatttagtgctcaatgtatacctgctcttttgggctggactaagaaagatctttgcagcactaatggaggttttggacatcttgccattttcaattcttgtctgcaaaccaaaagtatagatgatggagagctattacatggaatattaaaaatcataatatcctggaagaaagagcatgaagatatttttcttttcagttgtaatctatcagaagcaagtccagaggtactgggtgtaaatatagaaataatccggtttctttccctgtttctgaaatactgctcatcccctttggcagagagtgagtgggacttcatcatgtgctccatgttggcttggttggagacaacaagtgagaatcaggcattgtattctattccacttgtgcaactgtttgcctgtgtcagctgtgatttggcctgtgacctcagtgctttctttgattccacaactctggataccattggcaatcttcctgtaaatctaatcagtgaatggaaagaatttttttcccaaggcatccacagtttgcttttacctattttggtgactgttacaggagaaaacaaagatgtgtctgaaacatcctttcagaatgcaatgctgaaacccatgtgtgaaacattaacgtatatctcaaaggaacagctattgagtcacaaacttcctgcaagattagttgctgaccaaaaaacaaacttaccagaatatctccagactttgttaaatacattggccccattactcctcttcagagctaggcctgtgcaaattgctgtttatcatatgctatacaaattgatgcctgaattaccacagtatgatcaggataatctaaagtcatacggagatgaagaagaagagccagccttgtcaccaccagcagcactgatgtctcttcttagcattcaagaggacttactagaaaatgttttggggtgtattcctgttggacagatagttactattaaaccactgagtgaagacttctgttatgttctgggataccttctcacttggaaattaatactaactttcttcaaagctgcatcatcacagcttcgggctttgtattccatgtatcttcggaaaacaaagagtttgaataaattgctctatcacctgttcaggcttatgccagaaaatccaacctatgcagagacagcagttgaggtcccaaataaggaccctaaaacattctttactgaggagctccagctgagtattagagaaacaacaatgcttccataccacattccacacttggcttgttcagtctatcatatgacattaaaagacttgcctgccatggttaggttgtggtggaatagcagtgagaagcgtgttttcaatattgtggatagatttacaagcaagtatgtcagcagtgttctttcttttcaagaaatatcttctgtacaaacaagtacacaactatttaatggcatgacggttaaagctcgagctactactcgagaggtaatggctacttatactattgaggacatagttattgaacttataatacaactgccttcaaattatccactgggttcaataatagtagaaagtgggaaaagagtaggagtagctgttcagcagtggcggaactggatgctgcagttaagcacttacctcacccatcagaatggaagtattatggaaggcttagctttatggaaaaataaccgtagacaaacgttttgagggtgttgaagattgcatgatctgtttcccagtcattcacggtttcaactattcccttcccaaaaaagcctgtaagaacatgccagaaaaaattcccattcagccctgcttgtacaaatggtttacatctagcaacaaatccacttgtccactgtgtcgtgagacgtttttctgagatttttttcactggaagggatccctgaagtacatcaaacaaaggcattggatttggatccgtctgaaagtgtggatgtggggaagccagtgagcattacttttaaataggaccttctctggaaaattattttggttaatgtaataatcctaaaatcaggtttacttaactttagattgctttgtaaatgtttggaaactttcttttacaaaagaatattacatatttgagagaaaatatttctattaatggtttaatttctttgtatatttaaaaataaatatgaaaaacccctaaattacagaattggaatttgtgaaaagattgcacaactatattattgataaacccattccgtttgttgatctgtgttttagaatagtccaagtgaagcaaaacgaactgagagagctgatttacatctatagatattttaagccttatttattagttatgacaataaattagtattctgatatttgtagattattttaatgataaaaatgacactaagctattaatacggcttgtcttaagatatctggaggcatgctctgaaatcctatataaaagagtttaaactgaactttaaggtgcctccatttatcaagggttatgaaactcagaaaattaaattcttgatgctgacctttttgcttgtgggagaattatttctatatattagtgaaatttgaattgtaaacttgtcagtgaatttatcactctgagcgagtctctagagggtgagaatttgagagaaatagtaatttgattatttcattcatgaagcggagtggtagttatccttctattgagagggaagaaataaatgagtattactgaaacttaaagatcagtggaaaaaaaaaacatttaaaaatgttgtaggagactttcaattttggaagcaaactgagctattcttaccagccaaagttatactaaataagagacttgggggagcaaatgtttttcagccttcagaaatgaaagttaaggattttagcactaggtaaaattcagtataataggctgaagtggagtaagtgaaaacctgccttttgccactcttaaaaattgtgcccaaaatataaaagtgtggaactttagaacttggaataattttattgcagtcttccattacatggaaatagcatatctaatatctaggttacttgagagaccagctaatcatctctgttgcacatgtttaattggcaaaaagcaattcatgataaataaaattactgctttccatctactgggtaaaatgactattgaaatagtatgaatgtggtcagaggattatagttgagagtgaagtactatgtgtgagttatagatctctcgaattatatttatagatgcagtgtcctgcccagttttgtttgcctcctacattttactgtaaaatatttattgtcttctagccttgagcctctgagggtcagtaagtgaagtacagatagcaaaattttactacctcgttaacccttttcttaaaatattctctatctttctatgtctctttctgacatagtaatcccaaaggattgtgttactccccgtgaaagttattacttttcctttaaaaatggttttataataagactgtttaaaacctttccagtattggtacatcttggcttctggcccaaaccccaagcagaaaagaaaatggaataatggagcattgtttttccacattagtattagggcatcagatttcttggtgaaacactataattaagtagttataattaaataactgttcttcatacttagacttctaaatacatttctttaagactgtaaagtataattgtaaggcttgttaactgttttatatactaaagaaaaagctttacaagataagactgtaattcagaataccacattaaagttttatctgtacagcgttgacaactctaactaaaaggattacagcccttaaaattttagcttaaggacattttaaaattgcatgagattagaaaaattattaatttaaaacccccaaagtaaattgcaaattttaaaatttatttttgactcttttatcacatgctcccaatgtatgtacataagtgtctgtggcttaaataatatgttgttatttgatacattttttgtggtgcaagtaattaatgttattatttgattgttataccatatgtgcccattaaaattctttttaattaaaaatatttcaaatatgcagaaaaataataatataaatgcccttgtacccttcacatactattttgccatatttgcttctgatttttaaataaataaaatgttactcttttgtaaaaaaaaaaaaaa

SEQ ID NO: 153841 - DNA, 939 bp, Homo sapiens
ttagacatccgtgagagacaatgccctccatggcccagtttccaggcagagagaagcagctctgggctgaccgccaaggctccggcccgagagggtctttaagtggagtaaccagtcttcaagaccccgctcccaagccaccgacgcgctcacgctgcagccctggacctgctgggggcctcttcctccgacccgcatgctgacagcgggactggcaactgggcagaggtcgaccccgggtccgcacagcacctcccgagacccagctcgcagctccctcacttcctgctctctggaggcgggcccggccagtgccgccgaggccagcgcggcgagctcctccccagcagcggcgggacggccacaccctgcgcgccgcgcgggctcgggtggggtctccgctcctgcgccctgcgcgccgcagccgcacccccgacggcgccccaaacgctgttgcgccgcgcgccccgcccagcccggcctcgcgctggtcccggtctcgccccgcagccctcgatctcccgtgacttcctcggccaggccgcctgcgcctctgggaccatgttgcgctggctgcgggacttcgtgctgcccaccgcggcctgccaggacgcggagcagccgacgcgctacgagaccctcttccaggcactggaccgcaatggggacggagtggtggacatcggcgagctgcaggaggggctcaggaacctgggcatccctctgggccaggacgccgaggaggtgggtcgccgccggggcgccgcctgagcgtagggagggctgcgggcgctggggacactgcgaggaccgaggagggcggcggcttgaggcgttgccaggagaggaaggaggaactgtggcgcccagcgctccggtggcttcagaaactcgggcgtggggccgcgaccggcgaccccggtaacagaagtgggtcat

SEQ ID NO: 153842 - DNA, 3380 bp, Homo sapiens
cgggacgcgcgccggtattccggaacgacaccgcacccctcgatctcccgtgacttactcggccaggccgtctgtgcctctgggaccatgttgcgctggctgcgggacttcgtgctgcccaccgcggcctgccaggacgcggagcagccgacgcgctacgagaccctcttccaggcactggaccgcaatggggacggagtggtggacatcggcgagctgcaggaggggctcaagaacctgggcatccctctgggccaggacgccgaggagaaaatttttactactggagatgtcaacaaagatgggaagctggattttgaagaatttatgaagcaccttaaagaccatgagaagaaaatgaaattggcatttaagagcttagacaaaaataatgatggaaaaattgaggcttcagaaattgtccagcctctccagacactgggtctgactatttctgaacaacaagcagagttgattcttcaaagcattgatgttgatgggacaatgacagtggactggaatgaatggagagactacttcttatttaatcctgttacagacattgaggaaattatccgtttctggaaacattctacaggaattgacataggggatagcttaactattccagatgaattcacggaagacgaaaaaaaatccggacaatggtggaggcagcttttggcaggaggcattgctggtgctgtctctcgaacaagcactgcccctttggaccgtctgaaaatcatgatgcaggttcacggttcaaaatcagacaaaatgaacatatttggtggctttcgacagatggtaaaagaaggaggtatccgctcgctttggaggggaaatggtacaaacgtcatcaaaattgctcctgagacagctgttaaattctgggcatatgaacaggttatgaaaaccaggctggctgtaggcaaaactgggcagtactctggaatatatgattgtgccaagaagattttgaaacatgaaggcttgggagctttttacaaaggctatgttcccaatttattaggtatcataccttatgcaggcatagatcttgctgtgtatgagctcttgaagtcctattggctggataattttgcaaaagattctgtaaaccctggagtcatggtgttgctgggatgcggtgccttatccagcacctgtggtcagctggccagctacccattggctttggtgagaactcgcatgcaggctcaagccagtgttagaaggttccccacagctgaatatggttggcctctttcgacgaattatttccaaagaaggaataccaggactttacagaggcatcaccccaaacttcatgaaggggctccctgctgtaggcatcagttatgtggtttatgaaaatatgaagcaaactttaggagtaacccagaaatgatgttgcattttttgctttagcctgataattgaaactttcaacaatctctggagtgactttttctcctcgaattgaaacaagtctatggcaaaagaagctgcattttttttcacaaaagggaagatggtaacaatggtcacttcaaacttttgggctaaattatatgtacacagaaatgttcaaaatcatagttttaatgtgttttgaaaaggccacacaattatactttatcttttcttaataatcctgcaaatctctgccctggaatccgaaatctgaaaatgtactggcttgaacaaaatttgttttgtgtgttaggagttattaaatccatttaatctttatttcggggtgggtttacggtttatgccagttcctttatatttaaatttcttgttttatatattttgaatgtctttatagatttctttaaatttccttatagaaccattaatagaaaatcattacatttaaaatataccttacagcaaaagcatccaaataagtatagggtttatgtccttatttttctttcagctgaatacgaatgaacacagtggtggaatttctgaagggaagtgatgaaattatatttatttcagtgggcacttttccattttaccactgtaccattatttggttcctggagttatacactacgttttcagtatattactgttaaattaccaacacacggcattctatttgaaagattccgcttatcctgccattgctttgaaaagcagcaggaaacgaaatcctttgacttgtatcagcttctgcagagcatctattgtttcctttgtcctttgtttcctaccttttgaatcagattccgttttagtcaggaagacttcttgggaccattcttagtaacctgaaatttcttttttaattgcatgaagtggattgatcatgagcaaatgatgtgcttatttctccctcactgttgaatatctttgaacttgctgttttcaatatgggcagcacaaaggtgagagatacatattaatagtagtatgtattactcttatacattagatacctatatttaaatgaaaggcccaatttgtaaacatatacattcatattctctcttgccccaagttttagggaacatgttagggatatagggagacttaatttattaattaatgaggaggcatttttttattttactaaagccatttttatagtcaactatcttttcttatttgtgtgactagaacttagaaaaattatttactagttgaagttattatcagtttttaatttagttcttaaactcatttcacttctaataatttctgttataaatctccagcattttaatgaaaatctaatgatgtaataggcattttctttatttgaacctacctcttttattttctgaaccaaagagaaagatggactggtgtttgtgaaacatttttaaaaatgtagtttcatttatattagttatgtttgataaatgtctcagtatttttataatatgataagcccgggattcctacttttagggttatttgtacttttgagtaatatataaagtgacaatattaaggtacatgatcagctctttcgtatttttactcgtaaaaattatgggaaatgaataattttggcctaacaacctttgaaatttccaaaccttcctggaaaatatgaaaatattcattgttccattatggaatttaaaattgtaagggtatggaatgtggatttgtctgtacatcttgtatcttttccaaaaaatgattctgtatcttttggaaaaaagccgagagttgaagatagtatatttctggtagtactgaatatttacttacagtttctatcaaaaatatatatttgtttctaaaattacttgttttccagtttttattttttttagagaaaattcttaagtctcagtttcctaattgaaaaaaaaaaattataaataaagcaaaaattgtatcctaaa

SEQ ID NO: 153843 - DNA, 513 bp, Homo sapiens
gccaaaaggcttctctttctgctgctcaccatcgtcttctgccagatcctgatgcctcaagagggtgtgccggcgcccctgcctccagaggacgcccctaacgccgcatccctggcgccaacccctgtgtcccccgtcctcgagccctttaatctgacttcggagccctcggactacgctctggacctcagcactttcctccagcaacacccggccgccttctaactgtgggggaggacgtcccggctgggatgaagtctggtggtgggtcgtaagtttaggaggtgactgcatcctccagcatctcaactccgtctgtctactgtgtgagacttcggcggaccattaggaatgagatccgtgagatccttccatcttcttgaagtcgcctttagggtggctgcgaggtagagggttgggggttggtgggctgtcacggagcgactgtcgagatcgcctagtatgttctgtgaacacaaataaaattgatttactgtcaaaaaaaaaaaaaaa

SEQ ID NO: 153844 - DNA, 1607 bp, Homo sapiens
  misc_feature (1)...(1607): n = a,t,c or g
ttcccgcgtcgacccacgcgtccgacactccgctcggctcaccatgtgtcactctcgtatgctgtcacccgaccatgaccatcctgcaggccccgaccccggccccctccaccatcccgggaccccggcggggctccggtcgctgagatcttcaccttcgaccctctcccggagcccgcagcggacccatgccgggcgccccagcgcctctcgcgggcaccgaaagcgcagccgcagggttctctaccctcgagtggtccggcgccagctgccaagtcgaggaaccgaacccaagccaaaaggcttctctttctgcttgctcaccatcgtcttctgccagatcctgatggctgaagagggtgtgccggcgcccctgcctccaagaggacgcccctaaacgccgcatccctgggcgcccaccccttgtgtcccccgtcctcgagccctttaatctgacttcggagcccttggaactacgcttcttggaacttaagcactttcctccagcaacacgccggccgccttctaactgtgactccccgcactccccaaaaagaatccgaaaaaccacaaagaaacaccaggcgtacctggttgcgcgagagcgtatccccaactgggacttccgaggcaacttgaactcagaacactacagcggagacgccacccggtgcttgaggcgggaccgaggcgcacagagaccgaggcgcatagagaccgaggcacagcccagctgggggctaaggcccggtgggaaggagagcgtcgttaatttatttcctaattgccccctaaataaatatttatatgtatttaatgaacgtcctcctaaggtgatggagattgtgtaccgtaatattttatttttaactttatgccaagggtgtgagatgttcccctctgcctgtaaaatgcaaggtctccttgggtatttaattgagcctttgttgggactggtggaagcaaggacacctgtgaactgcggcaaaagtaggcagaagaaatggggaaggactcgggtgggggaggacgtccccggctgggatgaagtctggtggtgggtcgtaagtttaggaggtgactgcatcctccagcattctcaactccgtctgtctactgtgtgagacttcggcggacccattaggaatgagatccgtgagatccttccatcttcttgaagtcgcctttagggtggctgcgaggtagagggttaggggtttggtgggctgtcccggagcgactgtcgagatcccctagtatgttttgtgacaccccaataaaattgatttactgtcnnnnnnnnnnnnngggggcggccgttttaaaggatcccttggggggccccaattttacccggggggtccaggattttatttttttctttttaggggggcatttaatcgcctcgctgggaattttgggaaagaaccctttttttgggggggggacttattggcccaacctccctacagaatttaaaggctttagggaaaatataaatttttaaagggtatagggggtaaaactacctgcatatcctggctgctgaaaagttttgcttcctgggtttgttttataaaaattttttccccgggacctggggttta

SEQ ID NO: 153845 - DNA, 2349 bp, Homo sapiens
atgggcttcctggcttattatgtgtccaccagccctaaggccaaggaacccttgcccctgcccttgggagactgcagcagcggtggggcagctggtcctggccctgcacggcctccagttccacctcggccccccaggcctccagagacagctcgaactgaacccgtggtccttgtgtttgtggagagtgcatactcacagctggggcaggaaattgtggccatcctggagtctagtcgttttcgttatagcactgagttggcacctggccgaggggacatgcccacattgactgataatacccatggccgctatgtcttggtcatttatgagaacctgctcaagtatgtcaacctggatgcctggagtcgggaactgctagaccggtactgcgtggagtatggtgtgggcatcattggctttttccgagcccacgagcacagcctactgagcgcccagctcaagggctttcccctttttttacactcaaacttggggctccgggactaccaagtgaatccttctgccccgctactgcatctcacacgccccagccgcctagaaccagggccactgcctggtgatgactggaccatcttccaatccaatcatagtacatatgaaccagtgcttcttgccagccttcggccagctgagcccgcagtgccaggaccagttcttcgtcgggcccggcttcccactgtggtacaggacctggggcttcatgatggcatccagcgggtgctctttggacatggcctttccttctggctccacaaacttatcttcgttgatgctgttgcatacctcactggcaagcgcctctgcctggaccttgaccgctacatcttggtagacatcgatgacatctttgtgggcaaggaagggacccgcatgaaggtggctgatgttgaggctctgttgaccacccagaacaaactcaggaccttagttcccaacttcaccttcaacttgggcttctcgggcaagttctatcatactgggacagaggaggaggatgcaggggacgacatgctgctgaagcaccgcaaagagttctggtggttcccccacatgtggagccacatgcagccacacctgttccacaatcgctccgtgctggctgaccagatgaggctcaacaaacagtttgctctggagcatgggattcccacggacctggggtatgctgtggccccccaccactcgggtgtgtaccccatccacacgcagctctatgaggcctggaaatccgtgtggggcatccaggtgaccagcactgaggagtatccccatctccgccctgcccgctaccgccgtggcttcattcacaatggcattatggtgctgccccggcagacatgtggcctcttcactcacacaatcttctataatgagtatcctggaggctctcgtgaactagaccggagcatccgaggtggagagctctttctgacagtgctgcttaatccgatcagcatctttatgacccatctgtccaattatggaaatgaccggctgggcctatacacctttgagagcttggtgcgcttcctccagtgttggacacggctgcgcctacagacccttcctcctgtcccacttgcacagaagtactttgaacttttccctcaggagcgaagccccctttggcagcaagccatcatcaccgacatctccgtgatgcaagtcgcctctggaggggcagatccgggggaccttcagtcacaagaagacccaccttcctgccctcctacccacccgcccctgctcatgctccggcttccgctccggggccgtcctgactccgactgctcaccgcccttctcccggcgccgctccccgacgcgaactgactgctttgtgtgccgccctgtatgccccttccccttcattgtcccgcctggccgcgctccatcccgcatggcagaagtgctgctcctgctcctgctcctttcgctgcccagtgctgctgccaaaatccagggctatcccagctgcccgggaccccagttgagccgggatattttgtcttctggagatggctggtgggcaggcctcagtggtcatcatagggtctgcgggggtcctggggtgcaggagccacaaaccactgtggtacacaacgctacagatgggatcaagtacatccaccaccgcttgattcacctgactcctgcggactacgacgactttgtgaatgcgatccggagtgcccgcagcgccttctgcctgacgcccatgggcatgatgcagttcaacgacatcctacagaacctcaagcgcagcaaacagaccaaggagctgtggcagcgggtctcactcgagatggccaccttctccccctga

SEQ ID NO: 153846 - DNA, 657 bp, Homo sapiens
tctctttagttctatttcacacaataatgtctacttgagcagcaatttacatttttcaaaatgattttcccattcattacttcatctgacactcacaacattctttaaggtggtattggttagcctcattttacgtacagtaactcgaaagttcagagcaatgaataaatccgtcaaagatcacacagccttcaaaaactgtaaccttttccccacttttggcggtgaaataatataccttcccaaaatgaatgaaagggcctttccctaagcaaaaaggcaggggagaatcattacttctatctcccccattcttttcctgagaaagcacccccaggagccatcggtcacctgagccctcgcggcacaatcgaggaagccctggatctcttttctgcacgcatcgtcgcggaattcattgtgcttccagcaagccatcatccccgacatctccgtgatgcaagtcgcctctggaggggcagatccgggggaccttcagtcacaagaagacccaccttcctgccctcctacccacccgcccctgctcatgctccggcttccgctccggggccgtcctgactccgactgctcaccgcccttctcccggcgccgctccccgacgcggttagctagaatgagaggtttattgggcttcag

SEQ ID NO: 153847 - DNA, 573 bp, Homo sapiens
ttttttttttttctgttcagaggattttatttcaagataaatcataacttctccccatactatgattccaaagggtgaaaaaagtgttttgcctcttctaccctccaaagagggcatggcaatgccaatgctctctaaaatgcctctgcatagttgtcagaagctatatttcagtcattgaaaatacttgtccattttcagctgaggtaaggtttgttaggaaacctctgtaacaacttattcaatttatttggaagtaaactcccagactatcccagggtctcctgaattgatctcatctactcgggcttcatgagccctcgcggcacaatcgagcaagccctggatctcttttctgcacgcatcgtcgcggaattcattctgcttccagcaagccatcatcaccgacatctccgtgatgcaagtcgcctcgcccttctcccggcgccgctccccgacgcggttagctagaatgagcaggtttattgggcttcagcacaggcttccgcgggttcccaaaccgcgccagacgaccccgcaggctgggtgtcgccatagcgcaccaagctcccg

SEQ ID NO: 153848 - DNA, 931 bp, Homo sapiens
atgacgctggaagagctcgtggcgtgcgacaacgcggcgcagaagatgcagacggtgaccgccgcggtggaggagcttttggtggccgctcagcgccaggatcgcctcacagtgggggtgtacgagtcggccaagttgatgaatgtggacccagacagcgtggtcctctgcctcttggccattgacgaggaggaggaggatgacatcgccctgcaaatccacttcacgctcatccagtccttctgctgtgacaacgacatcaacatcgtgcgggtgtcgggcatgcagcgcctggcgcagctcctgggagagccggccgagacccagggcaccaccgaggcccgagacctgcattgtctcctggtcacgaaccctcacacggacgcctggaagagccacggcttggtggaggtggccagctactgcgaagaaagccggggcaacaaccacacaacccccccaaaacaacccaacccacgaggaccatcgggggcagagtcgttggagactgaagaggaagaggaggaggagaaggggagtgagcggccgcccccagggcggagatccaggagctggcggccgccgatccgatggagaaggggggacccaggccagcaggagacaggacccccgaagctgaggccttgggatggagcagaagccggagtggcggggcacgctgccgccttccccatcacggagggtccagactgtccactcgggggtggacaattaagagaccggtttattacgaaacctggccgccgtgccaccactgttactggctgtgcaggagccaaccccaagctctgggcacatatggaggcatttcagcgggagggggtgctggctgcagcccctgaccgcctaggcggccaccgcagcccaaggtccggatcggtcaagggggcacctggtaccacacagcgag

SEQ ID NO: 153849 - DNA, 757 bp, Homo sapiens
gacccagacagcgtggtcctctgcctcttggccattgacgaggaggaggaggatgacatcgccctgcaaatccacttcacgctcatccagtccttctgctgtgacaacgacatcaccatcgtgcgggtgtcgggcatgcagcgcctggcgcagctcctgggagagccggccgagacccagggcaccaccgaggcccgagacctgcattgtctcctggtcacggtgagtcgggcctctgccctgccccgctacgcccgggcaccctgggccggtgtttgtcaacaaagtcgggctgactggtcctgcacagctcagcgctcagccacgtttggcatgtcccgtgggcagccgggctggggcctcctcacccaggaagctattttgagcctgacctgttttccccacacaggggccccgggagagggaggctccactaaaccccttcttttccctcctacagaaccctcacacggacgcctggaagagccacggcttggtggaggtggccagctactgcgaagaaagccggggcaacaaccagtgggtcccctacatctctcttcaggaacgctgaggcccttcccagcagcagaatctgttgagttgctgccacaaacaaaaaatacaataaatatttgaacccccctcccccccagcacaacccccccaaaacaacccaacccacgaggaccatcgggggcagagtcgttggagactgaagaggaagaggaggaggagaaggggagtgagcggacgc

SEQ ID NO: 153850 - DNA, 1497 bp, Homo sapiens
cccacgcgtccggcgtcggactaccgttggtttccgcaacttcctggattatcctcgccaaggactttgcaatatatttttccgccttttctggaaggatttcgctgcttcccgaaggtcttggacgagcgctctagctctgtgggaaggttttgggctctctggctcggattttgcaatttctccctggggactgccgtggagccgcatccactgtggattataatctgcaacatgacgctgggaagagctcgtgggcgtgcgacaacgcgggcgcagaagtaagtagccggggctgccgccgcctgaggatgcagacggtgaccgccgcggtgggagggagcttttggtgggccgctcagcgccaaggaatcgcctcacaagtgggggtgtacgaagtcggccaaagtttgatgaatgttggacccaagacaagcgtggtccttctgcctctttggccatttgacgaaggaaggaaggaaggatgacattcgccctgcaaaattccactttcacgcttcatccagtccttctgcttgtgaacaacgaacatcaaacatcgttgccgggttgtcggggccattgccaaggccttggcgcaagcttccttgggagagcccggcccgagaccccagggcacccaccgagggcccgagacctgcattgtcttcccttcctacagaacccttcacacggacgccttggaagagccacggcttggtggaggtggccagctactgcgaagaaagccggggcaacaaaccagtgggtcccctacatctctcttcaggaacgctgaggcccttcccagcagcagaatctgttgagttgctgccacaaacaaaaaatacaataaatatttgaacccccctcccccccagcacaacccccccaaaacaacccaacccacgaggaccatcgggggcagagtcgttggagactgaagaggaagaggaggaggagaaggggagtgagcggccgcccccagggcggagatcccgggagcttgcggccccccgatccgatggagaaggggggaccccaggccagtcaggagacaggaccccccgaagctgaggcccttgggatggagcagaagcccggagtggcggcggcacgctgccgcctttccccattcacggagggtccaagacttgtcccactcggggggtggagtgagactgactccaagcccccaccctcccttaggactggagctgggcttttgcattacgagagactttggttgaacttggttggtccttgatctgcacccctcgacaagaccacactttgggacttgggagctggggctgaagttgctctgtacccattgaactcccaagtttgcgaattatagagacaatctattttgttacttgcacttgttattccgaaccactgagagcgagatggggaagcatagatattctatatttttatttctactattgaagggccttgtaataaatttctaaagcctctataaaaaaaaaa

SEQ ID NO: 153851 - DNA, 682 bp, Homo sapiens
  misc_feature (1)...(682): n = a,t,c or g
ggcacgagacgtgcacccactgcctcttcccttctcgcttgggaactctagtctcgccctcgggatgcaaatgagaccccaactgctcctgagccgctgcaggtgtctccctgcaacctgcgccagctcctgcaagtgcaaagagtgcaaatgcacctccatgcaagaaagaagagctgctgctccctgaatccctgtgggctggtgcccaagtgtgccccacgggcttgcatctgcaaaagagggcatcggagaagtgccagcttgctgcgcctgatgactgggacagccctgctcccaacgtacaaatagagtgacccgtaaaatccagggatttttttgttttttgctacaatcttgaccccctttggctacattccttttttttctgtggaaatatgtggaataataattaaaacacttagacttgnnnnnnnnnnnnnnnnntataatggggcgccccttttaaagaacccttggggggcccaaatttaacccgggctgggaaggctatagcttttcccttatagggggggttttaaaaagctagtggggaattttgggaaaaaaccctttcttgtgtgggggagcatattggaccaccctcccctccgaattttaacgccccagggcaaaataaaatttttaagggggaagggggtaaaccaacccgctattcccg

SEQ ID NO: 153852 - DNA, 1118 bp, Homo sapiens
gtttccagaaacattactttttattcaaaagaaaatatagttacttttaaaatttttttttgagacagggtctcactctttcatccaggttggagtgcagtggtgtgatcatgactcacttgatctcccaggctcaggtgatccttcctctcatctaagtagctgggactgcaggtatgcatgaccacacctggctaattttttgtatttttagtaagaagatggagtctcactgtgttgctcaggctggtcttcaactcctgggcaaaagtgatcctccaccttggcctcccaaagggctggggattacaggtgtaagttgctgagtccagcctacagttacatttttaacatacaaataagctgcagttcaactttgatagatataggggaggtttgttctaagaagtggtaaagctggtcacaatttaataaaagtgacttcagttaatagcaatttgaacagtagcttagtggtcctttgagaacagtctagttgattcccctgtgtaagcaactctgtggggatgagggctcttttaaaaatgtttaagccacaagatatatgagaaggttttaaaaatctggcgctaattataaaaatgctactgacaaagtctctgagatccagtaatagagtcataatgacctctttttaatatacataaagaattagggattaaaagccactttgtgaggaaagctgtatctacattggccattaataagtttgttagagcaatttctagcataattgctatgctaaagaatttgtggccagttctaatagcattgttagtgaataaaatgtactgttatcataaactggagatatgattcaagcatgggaattaattgtaattacatacactacgtttaaatgttaagttaaaaccagcccttcaactttagtccaaacttagtttgttaaattaattaatgaattttaaggggggattttctgacttggctaattaattgaatagttatatgattgaaagttacagttttcatatctgagaatagacttgcttcagtgctaaggaggtatagcagtgtttttactaggcatatcattagtcataacttctgtagatattccattgaataaaagtatc

SEQ ID NO: 153853 - DNA, 3562 bp, Homo sapiens
atgttacatcatccttcccaaggattccgctttggaactgtccgagaaagcagtgctgaagattatgtgagacaaagtttcccagagatgcatgaatatatgagaaggtacaatgttccagccacccctgatggagtggagtatctgaagaatgatccagagaaactagacgccttcatcatggacaaagcccttctggattatgaagtgtcaatagatgctgactgcaaacttctcactgtggggaagccatttgccatagaagcctttttctttcttctgagtcaggaaaggggtgctgatgaggcaagattccgaacatttgtggattcctggccgtatactactgctcatgacatggattctttagaatttagtgatccatctcatcatcttgactgcccattgggaaagacgctcaatctctacccatgtggattttcttggaattcctgtaagctccaagggctcccacttcacggaatgaaatgtgaagtccacttggggccagttaattctttccaagatagtcaaggtgttccactgccaggcaccaggaacacttgtttccctggtgttgaccatcttacttcatttacaggaaaacgactgtcttcttctgccaaaatgtcaggaattggaaataaaagagcagctggagaacctggcacctccatgcctcctgagaagaaggcagctgttgaagattcagggaccacagtggaaacaattaagctaggaggtgtctcttcaacggaggaactagacattagaacactgcaaaccaaaaatcgcaagctggcagaaatgttggatcagcggcaggccattgaagatgaacttcgtgagcacattgaaaaactggaacgacgacaggccactgatgatgcctcactattgattgtcaaccgatactggagtcagtttgatgaaaacatccgtatcatccttaaacgttatgatctggagcagggcttgggagacctactcacagaacgaaaagcccttgttgtgcctgaaccagaaccagactctgatagcaatcaggagcgtaaagatgaccgagagagaggcaagtgggaagggcaagagccagctttctctttccttgctactttggccagcagttccagtgaagagatggagtctcagctgcaggaacgtgtggagtcttcccgccgagccgtgtcccagattgtgactgtttatgataaattgcaagaaaaagtggagctcttatcccggaagctaaacagtggagataatctgatagtggaggaagcagtgcaggagctgaactctttcctcgcacaggagaatatgaggctacaggaattgacagatcttcttcaggaaaagcatcgcaccatgtctcaggagttctccaagttgcagagtaaagtggagacagccgaatcacgagtgtctgtcctggagtccatgattgatgacctgcagtgggatattgacaaaattcgaaagagggaacagcgactcaaccgacacttagcagaagtcctagaacgggtgaattccaaaggttataaggtgtatggagcggggagcagtctgtatggcggcacaatcactatcaatgctcggaagtttgaggaaatgaatgcagagcttgaggagaacaaagagttggctcagaaccgtctctgtgagctggagaaacttcggcaagactttgaggaggtcactacacaaaatgaaaagctgaaggtggaattgcggagtgcagtggagcaagtcgttaaggaaactccagaatatcgctgcatgcagtcacagttctccgtcttgtataatgagagcctacagttgaaagcacacttggatgaggctcggaccctgcttcatggcaccagaggaacccaccagcaccaggttgagcttattgagcgagatgaggttagtcttcataagaagctgaggactgaagtaattcagctagaagatacattggcccaggtccgcaaggagtatgaaatgctgaggatagaatttgagcagacccttgctgccaatgaacaagcaggccctataaacagggagatgcgccacctcatcagtagcctccagaatcacaatcaccagctgaaaggggaggtcctgagatataagcggaaattgagagaagcccagtctgacctgaacaagacacgcctgcgtagtggtagtgccctcctgcagtcccagtctagtactgaggacccgaaggatgagcctgcggagctaaaaccagattctgaggacttatcctcccagtcctcagcctcaaaggcatctcaggaggatgccaatgaaatcaagtctaaacgggatgaagaagaacgagaacgagaaaggagggagaaggagagggaacgagaaagagaacgggagaaggagaaggagagagaacgagagaagcagaagctaaaagagtcagaaaaagagagagattctgctaaggataaagagaaaggcaaacatgatgatggacggaaaaaggaagcagaaattatcaaacaattgaagattgaactcaagaaggcacaggagagccaaaaggagatgaaactattgctggatatgtaccgttctgccccaaaggaacagagagacaaagttccagctgatggcagctgagaagaagtctaaggcagagttggaagatctaaggcaaagactcaaggatctggaagataaagagaagaaagagaacaagaaaatggctgatgaggatgccttgaggaagatccgggcagtggaggagcagatagaatacctacagaagaagctagccatggccaagcaggaagaagaagcactcctctctgaaatggatgtcacaggccaggcctttgaagacatgcaggagcaaaatatccgtttgatgcagcaattgcgggagaaggatgatgcaaatttcaagctcatgtcagagcgtatcaagtccaatcagatccataagttgcttaaagaagagaaggaggagctggcagaccaggtgttgactctgaagactcaggttgatgcccagctacaggtagtaaggaaactggaagagaaggagcatctgttacagagcaacattggcacaggggagaaagagctgggtcttaggacccaagccttagagatgaataaacgcaaggcaatggaggcagcccagcttgcagatgacctcaaagcacaactggagttggctcagaagaagctacatgattttcaggatgagatcgtggagaacagtgttaccaaagaaaaggacatgttcaatttcaaacgagcccaggaggacatctctagacttcgcaggaagctggagaccacaaagaaaccagacaatgtacccaagtgtgatgagattctgatggaagagattaaggattacaaggcacgcttgacctgtccgtgctgtaacatgcgtaaaaaggatgctgttcttactaagtgttttcatgtcttctgctttgagtgtgtgaagacacgctatgacacccgccagcgcaaatgtcccaagtgtaatgctgcttttggtgccaatgattttcatcgcatctacattggttga

SEQ ID NO: 153854 - DNA, 467 bp, Homo sapiens
  misc_feature (1)...(467): n = a,t,c or g
tagtgccattagaaaccgcattttcctacgtgaaggctgacaatcactatgaacaaattattactatgaacatacctctatttttgcagttaacctctcaatttcagaccgatcttccctgtgatttttggtatttcctgttcacggattttcaagcaagtttttagagcatgtgtacgtccttcccattcagattttttatgagccaccattatgtcaatctgtttcatgagctcctgtagttctgcttcgcaagatgtcaaaaatcccccaccatgccctcgattttgtattccttctaacaaagcctccatcaccaaatcccctttgttttggcaactcgggccggcgctgcgcacaaacgccacaaaaggctttcgtccagcctctcgaaatcgtcgacccggaattccggtccggtncggcgtgctgacgcttacaaataatctctttnnntnggggggggg

SEQ ID NO: 153855 - DNA, 611 bp, Homo sapiens
atcgatcggctgcaggaattcggcacgaggtttccagcgcccccggcctaggttttggaggcgcgggaatgcgttcgttgctcagtgtcggacttccccctattcccatcggccgaggctgtcactttacgctcataaccgcttttctttactgcactcgtgtcgggaggaaagggacttgcgtggcacccccagacctccccgtctccgcttccacgtttggtacatcctgcctgaggcaggaagccgcagctgagggacggcctgtcgtacggtgcggatggtggtggcctgcgaggctcatttctagcaaggaacaaggctttcccgctttgattttataaatattatgtttacaaagctgtaatatatagaaattgataagacgtgtccctgtccctggaaacgcaggcaccgcgtgtttggaaagacattcatctgggctgtttgacagactccccagttggtgccatgctctgtgcttagggaactgtgagacccctggaggggtgggtaccgggaccgcactcagcctggggtttggaggcggcctcctataggaagcgacctgggacctaagatttttagactgactgtgggttcactggaat

SEQ ID NO: 153856 - DNA, 660 bp, Homo sapiens
tttcgtggggaagtctggagaaggcattgtttcaattattaaaagtgtggtggcagtgggcggaacaaacgcgccgactacagaggctggacgtaagcttagcggtggcgcgcgtgcgcagcgccggcccgagttgccaaaacaaaggggatttggtgatggaggctttgttagaaggaatacaaaatcgagggcatggtgggggatttttgacatcttgcgaagcagaactacaggagctcatgaaacagattgacataatggtggctcataaaaaatctgaatgggaaggacgtacacatgctctagaaacttgcttgaaaatccgtgaacaggaacttaagagtcttaggagtcagttggatgtgacacataaggagggttggaatgttgcatcagcaggtagaagaacatgaaaaaatcaagcaagagatgaccatggaatataagcaggagttgaagaaactacatgaagaattatgcatactgaagagaagctatgaaaagcttcagaaaaagcaaatgagggaattcagaggaaataccaaaaatcacagggaagatcggtctgaaattgagaggttaactgcaaaaatagaggaattccgtcagaaatcgctggactgggagaagcaacgcttgatttatcagcaacaggta

SEQ ID NO: 153857 - DNA, 1762 bp, Homo sapiens
cctgttcacggattttcaagcaagtttctagagcatgtgtacgtccttcccattcagattttttatgagccaccattatgtcaatctgtttcatgagctcctgtagttctgcttcacaagatgtcaaaaatcccccaccatgccctcgattttgtattccttctaacaaagcctccatcaccaaatcccctttgttttggcaaccacatccgggaatccgaggaaagcgagtgcagacacgtgatgcgggggagggcggggcgtggcaggagcaagcgtctgccgcggtggccgggtgccggtaagggtttccagcgcccccggcctaggttttggaggcgcgggaatgcgttcgttgctcagtgtcggacttccccctattcccatcggccgagaatgtcactttacgctcataaccgtttttctttactgcactcgtgtcgggaggaaagggacttgcgtggcacccccagacctccccgtctccgcttccacgtttggtacatcctgcctgaggcaggaagccgcagctgagggacggcctgtcgtacggtttgacaagatccaaagctgccaggtaaaatggaccagtgaggtttcagagagatggaaggatcttgggatttgattgatgatgctttggccgagaagacaagctgccttatgaggatgtcggcaataccactgaattgaagcttcctgaacctgaacaagacaatggttggcaccacagaatctgtcaaagaacaagaaatgaagtggacagacttagccttacagtaagctccatggagaatgtttccccccatttggaaactggacgcttggctccttttcttgtgggatggattttctcaaagtacacagattaaagcatggtttgttttcagtctccaaatttcaaacctttggagtaattaattcacacttcaaaaatgttacaccccttttagtttgtgggtagccaaagtgcaatgcgaaattgaatgagaaactgagatttctcagtaatgggtgaatatttcgctctttaaacctaaaactcttcattgagtagcttatatttgaacatgattggttaaacatttgcctctacctctgattttgctttgctgtcaaagtttaacaccttccaactacttatgtgtgtcctgtaacacaggtgattgaacgtatgagagggaaaggcaaagaaaaaggaagccagacactaggagaattattaacttctcatacttccccacattgagaaggcattcggagtgtatttagccctgtaggatgttgtggatatgccaaatatccccattcccctggttactgggcattcctaaggattcttccatgggtattttcaaaacttggggaaaaatttaccagaattaggaaagatacctgaacagttaaacctctgttcctcccttaacaaattcccttttgtgcctgctgggaaagggatctttgggctagggtggatgactagttttatttcaaagcctttttctcaaagccctttcagttacaaccacccccactatggggatcagtatttaggttatacatttgtataagaacctgtattttgaaaaacacattcatgtatatttattcctggaattatttgcactgttaaacagtgtctttcatgttctctcccccagattgtaaactctgtaagaagctgcttgtatctatatccctatgttgaaactcatgaaaacactgaataaataaaatcaattctcatccttaaaaaaaaaaa

SEQ ID NO: 153858 - DNA, 978 bp, Homo sapiens
atcctgcacccatgttatgtgactctcccaaatgtgccttacatgttgtgccatactggggctcaatatatcacattcgacattgttacatattgctgggttaaacacccaggtgatgtaactttttttttctgggactgcgtgcaggggaccttgtgacataactcaatgtccatcaccatactgatgttactctcttctcctgcctgatctctgctcacagagaaattgtgacacatcactggcctagcatctaggtgatgtgactctcctctttttttcaggctctgcatatttggggtattgtgacatatttgctgaactcaacaccctaagggatgagaagtctcctacctgtgcccttcctacaggggacattgtgacatgtctctgcattcctcatccaggagatgtgactctccttttctgcctacaccctgcctacacagaaagttgtggcatattgctgtggtcagcaaccagatgatatatttctcctgcctgggtctttattacaggaaagatgattgacatattactgggcccagcatccagatgatgtgactctcttcttctgttggtccttgcttacgagggaaactgtagcatattgctacacccaacacctagcttatgtgattcttcttttaggtttgcccttcagggaacattgtgacatattgctgggccctgcactgataatttgtgactcttctgcctgtgatttgcccacttggggcattgtgacatattgctgggtttaacactcaggtgatgtaacttttatgcctaggccttgcttacaggaggcattttgaaatgtctttgtggctgggcatggtggctcatgtctgtaatcccagcgcttggggaggccgaggtgggcagatcacaaagtcaggagttcgagaccagcctggtcaacatggtgaaaacctgtctctactaaaacaaaacaaaacaaaacaaaacataaca

SEQ ID NO: 153859 - DNA, 1088 bp, Homo sapiens
accgcgccttccggttcgacgataccatggcaggcggcggctgcagggcaggtccaggggccacatgttctgatggggacgcagggagcgaccagaggcagaatgaggaaattgaagcaatggcagccatttatggcgaggagtggtgtgtcattgatgactgtgccaaaatattttgtattagaattagcgacgatatagatgaccccacatggacactttgcttgcacgtgatgctgccgaatgaatacccatgtacagctccacctatctaccagttgaatgctccttggcttaaagggcaagaacgtgcggatttatcaaatagccttgaggaaatatatattcagaatatcgctgaaagtattctttacctgtgggtggagaaaataagagatgttcttatacaaaaatctcagatgacagaaccaggcccagatgtaaagaagaaaactgaagaggaagatgttgaatgtgaagatgatctcattttagcatgtcagccggaaagttcgcttaaagcattggattttgatagtcagtgaagctcggacagaagtagaagtagaagaattacctccgattgatcatggcattcctattacagaccgaagaagtacttttcaggcacacttggctccagtggtttgtcccaaacaggtgaaaatgggtctttccaaattgtatgagaataagaaaatagctagtgccacccacaacatctatgcctacagaatatattgtgaggataaacagaccttcttacaggattgtgaggatgatggggaaacagtagctggtgggcgtcttcttcatctcatggagattttgagtgtgaaagatgtcatgggggtacgggcgcgctggtatgtggggatggggctaggaccagatcgctttaaacatatcaacaactgtgtgcagaaacatactagtggaaaagaactacacaagttcactggaggagtcatctaaggctttgggaaagaacaaaaaagtaagaaaagacaagaagaggaatgaacattaatacctgaaactataggaaaggttaattgtgcctggtgggggtatacattccgggggct

SEQ ID NO: 153860 - DNA, 444 bp, Homo sapiens
ttgcaattatcaattgactttatttcctttcatatggtaacaccagcagtgtatcgatatttgtaaataaaatacgtcataaaaaaatttaaccttattacctattatcagttaggttataccatcctgaataaaaaatatttgggccgggcatggtggctcacgcctgtaatcccagcactttgggagaccgaggggggcgattcacgaggtcaggagattgagaccttcccggccaacacggtgaaaccccgtctctaccaaaaatacaaaaacaaaattagccaggcgtggtggcaggcacctgcagtcccagctgcttgggaagctgaggtgggagaatggcgtgaacccaggaggcgtctgtaacagtttcctggtattttcaaccaggttctaagaacaaattgattttttgaagtggtgacatctagtcacattaaa

SEQ ID NO: 153861 - DNA, 471 bp, Homo sapiens
  misc_feature (1)...(471): n = a,t,c or g
ttgctagtattttgctgtaatgacacagttaacaaagagaaaagaaacaattctgtaaaggtttctgctttgcttttggcttcgtcaaaaactatttctacaaattttggggagaggaggtgattctgaatgtattcaagttagtggtnnnnnnnnnnnnnnnnnnnnnnnnnnnnnnnnnnnnnnnnnnnnnnnnnnnnnnnnnnnnnnnnnnnnnnnnnnnnnnnnnnnnnnnnnnnnnnnnnnnnnnnnnnnnnnnnnnnnnnnnnnnnnnnnnnnnnnnnnnnnnnnnnnnnnnnnaagggtggggtggggtgggagtccacacacctccaannnnnnnnnnnnnnnnnnnnnnnnnnnnnnnnnnnnnnnnnnnnnnnnnnnnnnnnnnnnnnnnnnnnnnnnggccngttctctnaantnaancgncttcnnntggaaacttnnttttaaaagncggccgcctcn

SEQ ID NO: 153862 - DNA, 1601 bp, Homo sapiens
agtgttgtccagcctggtctcaaactcctgatcctcaagtgatcctcccacctcagcctttcaaagtgctggtaattacaggtgtgagccactctgcctgggcctaccactaacttgaatacattcagaatcacctcctctccccaaaatttgtagaaatagtttttgaggaagccaaaagcaaagcagaaacctttacagtattgtttcttttctctttgttaactgtgtcattacagcaaaatactagcagtctgcctaaacatgttcattgtacatttctcaggctatcaatgaatggaggtttttaaaaagttgaatatttgtctgaacattttatttcaaagttcaaaaaaaacagaggctgcaaaattcattttataatggctattttgtgacgataaaatgtagttcatgtttttttgtagccctgggcccaaatattctttgtaaagaaaaatcgctgcagcaaaaactgttactgtgtttattatatttgtagaagtattagaaaaatattctattttttattcagtgctgcgtaattacccatggtagccaaccctacaaaagacaggttttcacaaattgaggtggaggtgggcggttcagtatctgccactggacttgattataaactgtatttgaatatcagtggtattatcttttaagttgtcagcaagttaccaaggtattcattaaagaacttgtaatatcaaattactatttattcataacaattgatttgatgctaataataattttctttaaactctaccattcattatgtggtaactgtattgaacttactttatttggattttattttaatgtgactagatgtcaccacttcaaaaaatcaatttgttcttagaacctggttgaaaataccaggaaactgttacagacgccatttttttttttttgagacggagtcttgctctgttgcccaggctggagtgcagtggcacaatctcagctcactgcaagctccgcctcctgggttcacgccattctcccacctcagcttccccaagcagctgggacctacaggtaccctgcccaccacgcctggcctaattttgtttttgtatttttagtagagacggggtttcacccgtgttagcccaggaaggtctcaatctccctgacctcaggtgaccagcgccgcctccgcctcccaaagtgctgggattaacaggtgtgagccacccatgcccggcccaaatattttttattcaggatggtataacctaactgataataggtaataaggttaaatttttttatgacgtattttatttacaaatatcatacactgctggtgttaccatatgaaaggaaataaagtcaattgataattgcctcatttttattgcccttatttcattttccgttgttcatagtaacaggctttgtttctgacatagaaaataacacaatctctttataaactgccataaatttgttcgaatggagtttataatgtgtatcaacagataggaatttgaggcctttgtttgagaagcttttgtaggaaaagaagcaactgagctggggaatgaagaatcatggcagaaggtaaaagaaacaaaaacaaa

SEQ ID NO: 153863 - DNA, 639 bp, Homo sapiens
gggatggttccatcatggcgtcaatgcagaaacgactacagaaagaactgttggctttgcaaaatgacccacctcctggaatgaccttaaatgagaagagtgttcaaaattcaattacacacgtggattgtatacatggaaggtgcaccatgtaccttatatgaaggggaaaaatttcaacttctatttaaatgtagaagacgatatccttttgactcttctcaaggcatgtttactggtgaaaatattactgatcatcctcatgtttatagcaatggtcatatgtgcttatccattctaacaaaaaactggttcccagcgctctcagtccaatcagtttgtcttaggcattattagcatgctttccagctgcaaggaaaacgacgaccgaccacccggataattctttttatgtgcgaacaatgtaacaagaatccaaagaaaacaaaatggtggtatcatgatgatacttgttgatggccactgttatcatcctcctagcagaagatagtcctacttgagaaaatgagcactttgatccattcagtctttgaactttaaccctttgactgggaagtgacctataggcaatggagactactttcctttactgcattttaactcgtgtgcattttgggg

SEQ ID NO: 153864 - DNA, 996 bp, Homo sapiens; identical to SEQ ID NO: 141492

SEQ ID NO: 153865 - DNA, 500 bp, Homo sapiens
cgacgatttcgtcgcgggttgcggacggaggcgcgggaggcggttttgcgctttgggggccgtacccgcggcggagcgaggaggcgagaatggaccaatggtgccacggagcacatcgctgacgctgattgtgttccttttccacagattgtctaaagccccaggaaaaatggtggaaaattcaccgtcgccattgccagaaagagcgatttatggctttgttcttttcttaagctcccaatttggcttcaaaaatctgaagggatctcgtgtttgctgagtgttccgtgtgccagcactagcctaggaggttttagtctctacaaatatttatacagcaccagacgcgatggcaaagtggataaagcctgggtccctgcccttaaggaggtcgtggtcttgtggaggagacagacggtactttacctcgtgtggggcctttattcctgaatcttgggcttaaactctttagggtttaacctattggcctccaaaatatt

SEQ ID NO: 153866 - DNA, 766 bp, Homo sapiens
  misc_feature (1)...(766): n = a,t,c or g
ggcgcgggaggcgttctgcgcggcgggggcctacccgcggcggangaggaggcgagaatggatcaatggtgtcacggagcacatcgctgacgctgattgtgttccttttccacagattgtctaaagccccaggaaaaatggtggaaaattcaccgtcgccattgccagaaagagcgatttatggctttgttcttttcttaaagctcccaatttggcttcatactttacctcgtgtgggccttaattcctgaatcttggctaaactctttaggtttaacctattggcctcaaaaatatttgggcagttgcattacctgtctacctccttattgctgtagtaattggctacgtgctcttgttttgggattaacatgatgagtacctctccactcgacttccatccatacaatcacagataactatgcaaaaaatcaacagcagaagaaataccaagaggaggccattccagccttaagagatatttctattagtgaagtaaaccaaatgttctttcttgcagccaaagaactttacaccaaaaactgaactgtgtgtaaccatagtaacaccaagcacgtatttatttataagtttttgccattataattttgaccataaattaatttgaccatctctcttattaatagagaagtaaaaaatgtaagttgaccttctcttagattatgttcaatgaatattgtaaatgttcaagtattgttaatgaatagaataaatacaatattgcattcccaaaaaaagtcgacgc

SEQ ID NO: 153867 - DNA, 290 bp, Homo sapiens; identical to SEQ ID NO: 137313

SEQ ID NO: 153868 - DNA, 996 bp, Homo sapiens; identical to SEQ ID NO: 137314

SEQ ID NO: 153869 - DNA, 3117 bp, Homo sapiens; identical to SEQ ID NO: 137315

SEQ ID NO: 153870 - DNA, 1440 bp, Homo sapiens; identical to SEQ ID NO: 137316
  misc_feature (1)...(1440): n = a,t,c or g

SEQ ID NO: 153871 - DNA, 3243 bp, Homo sapiens; identical to SEQ ID NO: 137317

SEQ ID NO: 153872 - DNA, 4632 bp, Homo sapiens; identical to SEQ ID NO: 137318

SEQ ID NO: 153873 - DNA, 1440 bp, Homo sapiens; identical to SEQ ID NO: 137319

SEQ ID NO: 153874 - DNA, 766 bp, Homo sapiens; identical to SEQ ID NO: 137320

SEQ ID NO: 153875 - DNA, 3797 bp, Homo sapiens; identical to SEQ ID NO: 137321
  misc_feature (1)...(3797): n = a,t,c or g

SEQ ID NO: 153876 - DNA, 1488 bp, Homo sapiens; identical to SEQ ID NO: 137322

SEQ ID NO: 153877 - DNA, 1417 bp, Homo sapiens; identical to SEQ ID NO: 137323

SEQ ID NO: 153878 - DNA, 1780 bp, Homo sapiens; identical to SEQ ID NO: 137324

SEQ ID NO: 153879 - DNA, 600 bp, Homo sapiens
ggctgctgctggcaggtggggcgcgggccggcgcgagctgacccagcactcggcgggcgcggcgggactgcggcccgtggcggcgtgcgcggggacctgcgctgactaggtccggggaagtccctgctatgtggatatttggtagcaatgactgatgtggaaactacatatgcagattttattgcttcaggaagaacaggtagaagaaatgcaatacatgatatcctggtttcctctgcaagtggcaacagcaatgaattagccttgaaattagcaggtcttgatatcaacaagacagaaggtgaagaagatgcacaacgaagttctacagaacaaagtggggaagcccagggagaagcagcaaaatctgaaagctaacaccccactttgaccctcgaccacacctgaaaatgtctcaaatctccaggagtatctggaatgcatttgtttccatgagtgaaaagaggaaaaagaaaatggctgtgctgcattgcaggaacctgctcattatcatgttaaaaatgaaggcagaagctgtggctgcaggcagacttttccctacctctgtcattagccaatggttgaaatcattggggcttg

SEQ ID NO: 153880 - DNA, 385 bp, Homo sapiens
tatatatatatatatctattatgtgggagaagtcctccacttgagaataaaacaaatttgacagattgaattccagtctgtgcaaacaccaaacagactgaattcaggtgatattcccattaatggatattttcaaatgtctctataataaagcaatggagtcttgatgaatctgttagacttaatcacctcctcgtcatacaatgagcaaggggaaaggctgtgttttgaaaaaagggtgttctatcctgtgtgcgccgccacagtatggaaacctaaaatgaaaagccagcccttttaaaaatgagtggtataaaaattcccagtcctgtacatcattttgtttttcataagcaatcagagaagggggcagtctgagcatata

SEQ ID NO: 153881 - DNA, 3496 bp, Homo sapiens
gaattccgcgctttgcagagaaagcccccctggctcttctctctcaatccataatccagcgatgctgcagctgtaaaagcattaatagaaaatcaatccacaacctcgcggggcagcgatcgtcgagcgccgtttccaggctgccttccctggggtcgggagcggccccgctccccccgtggctggcgcgaaatgtggtgatccgtcccggggcggggatgacttcatgcagccggagctccgcggcgggagcggaggctgctgctggcaggtggggcgcgggccggcgcgagctgaccgagcactcggcgggcgcggcgggactgcggcccgtggcggcgtgcgcggggacctgcgctgactaggtccggggaagtttcctgactttctgagaagccctggtttccccaaagaagtgacttttctgatagaaatctgaaggtcatctccaagaaaaaagagatctagtatagtcaatgaattaaagacaagaaggtttccaatcagtccctgctatgtggatatttggtagcaatgactgatgtggaaactacatatgcagattttattgcttcaggcaagaacaggtagaagaaatgcaatacatgatatcctggtttcctctgcaagtggcaacagcaatgaattagccttgaaattagcaggtcttgatatcaacaagacaagagggtgaagaagatgcacaacgaagtttctacagaacaaagtggggaagcccagggagaagcagcaaaatctgaaagcttaacaccccacttttgaccttcgaccacacctgaaaatgtctcaaatctccaggagtatctaggaatgcattcgcttccatgagtgaaaagagggaaaaaggaaaatgggctgtgctgcattggcagggaacctgcttcatttttcatgtttaaaaatgaggggcagaggctgtggctgcagggcagacttttccctacctctgtcattagcaatggttgaaatcatgtggcttgtgtttgggcgtcatttttgtatggatcctttcacttgatcatatgacgaaatgcttatagagagtagctccgacctaggatgatgattcttcctgtaggcatctggcccctcacaatgtcagagggtttaattgtgtctaattgcgaagggttgattgaaccccagagtttaaatatctctggctcaaagtgttcacccacgtaaaaggaaagatccaggaaaggcactgttttttaggctttacgtattctgtgtgttactgctcgtgttattttacactgttttggtaattgtaccaatatatatggctcagcactggcccccttctctggattgcttatgagaaacaaaaatgatgtacattactggtgaatttttataccactcatttttaaaaagggctggtcctttcatttaagttttccatactggtgggtgggtgtacacaggatagaacacccttttttaaaacacagtctttccccttgctcattgtatgttgatgagttgattaagtctaacagattcatcaagactccattgctttattatagagacatttgaaaatatccattaatggtgaatatcacctgaattcaatctgtcaaatttgttttattctcaagtggagaacttctcccacataatatatatatatatatatatattttaatttatgagaattttggccaattggaaaggtagaaaagaaaagccaagatcatactaaggactggaaatattttgttttatggaatcaaatttctcccaatgctgtatgatactatttaaatttggaggacaacttattttcactaagactgaaatcaggtggagaaagtaatctccttgcaatccatgtggacaccccaatcacaaaaagtaaagcccccggtgttgtgttttccatgtcttttttcagcccctctcagatcccaaatgttattatgcactttttaatgtttgtaaacttttacctaataattagtgtgaattgcattctgatacaataatgattatcattagaagctaacaaaattctcattaatactgtgtttgatggcctctgctgtgttttaacatcgtgcttcttatatggaaagtttttgtgagctgtgtaatccctctggtcagtattatgaaatcatttgtcagtggtaataaataaggaaccagtaatatgccaatggttcatgaattactggacaaatagcagacaatgggagtcccttttactataacgatcctacttagctgcccttgagggcttagataccttgccacgtgaagtaggtagagcagcatttcaataggtaatttgtgtggttgtgccagaaactcagcccttctatgtaattacatacaggataaaaggtaagtcttgcttcacttctccttctacaggggcatttcaacttgactgggaataagggcatggttgcatttagtactcaatcagatattactagaaaaaaaattaataatgtgagcctttccgagagcagaacgaggaaagattaaattttagaatgcttccttctgtctaatccatcaggggccaaaatgcccagtaaaattcaaacacatcacctattaatagacttacaagtgagaaaagaggttcctagggttattttaggcaatccctggtaaactgtttaaaccatcaaacccctacagtcagttttcagtatcctcatttaatattttaataggtttcttgtgaatttaaacttctcttctttcttaaggttgtgaaattccaaactgattttatgtgattttgaaaagtttagaaccagtgctgagtctatgtggagggtttatattcctatgtgatatactgttattaatgcatgtggtgccatgcttgtctttaaatatataaatagtgctaaaattgcaaagtcatatggagctttgggatttagtttgacttcttactactgctttgtctgctatattcaaacccaaagggcattcccaagctagggagataaaaattaattttctaaaatgtccacatcctatacattttgcttattcatggcatctttcaaattttattttagtttcctttatttgccaagaatacatatgggatttgaatttttaaggagagaaggaaagggtagggaaaccaggggccttgggtttaggtaacagggcattggatgtctatttaaccaactatttcttacggctaatgggctttgcagctcctattctcccatttgatcctcaaacaattctattagagtggtatttttatccaatttcacagattaaaatataaggcacttcaataaaatataacctttaggaagcttaaaaagctagtaaggtgatggaactgagggtttgaacccatgtttgtcaccaagggagctttccgggggcacatgttcataaattagagccaactgcagagctgttaggggaacttttagagatgaacttcttcagcctccatattttacagaaggaaactgaa

SEQ ID NO: 153882 - DNA, 650 bp, Homo sapiens
cacccttccgctgacgcgtgggggaatacgacgggtacgaggctggcccggcaccctgtcccccgagagcctcactctgccaacaggaccagaccaggggcctccttcctgtacccaggcgataccggcccctcgcaagccccacccatgcccttggcctcagggtcccaaaaaactgggggagctaccagggctctgccttcagggaagccccacagctgggcaccccccttgccccccccaggaaaccggggcgcaaggcggggcaccggcctcaccctggttctcccaaaacaacgctgcctgcggtctgatttgcttttgtcctccccagcccagaattttcctttgtataaacagtaactcctagttcaggaagcaatatcatttcagggtctaaagaaagggacgtgtcatctggccgagggcagttcagtctcactgcagagcccgcagcccgctgcgcagctcggcccctcccgcgccgcacgggcagctgaaggccgctgttttctaatatttgtattctaatttaattgtttttaaaaaatgcaaataaaaaaggtcgaggtgaagccaaaaaaaaaaaaaaaaaaaaaaaaaaaaaaaaaaaaaaaaaaaaaactcagactagttctcgtgccgaattc

SEQ ID NO: 153883 - DNA, 1853 bp, Homo sapiens
gaggccgggagggtttccctaaaagctgcggaaccgatgataacctcggacgaccccgcgtccgcccacgcgtccgcccacgcgtccggtcgttcgttgggcggtgctggtttttcgctcgttgactgggggtctttcttcggccacggaaaccggcccggcggccgaaaaagtggcctaaaactttcggcggtgggtgaaagaaaatggcccgaaccaagcagactgctcgtaagtccaccggtgggaaagccccccggcaaacagctggccagccacgaaagccgccaggaaaagcgctccttctaccggcggggtgaagaagcctcatcgctacaggcccggggaccgtggcgcttcgagagattcgtcgtttatcagaagtcgaccgaacctgctcatcccggaagctgcccttccagaggtttggtgagggagatcgcggcaggattttcaaaaaccgccctgagggtttcagagcgcacgcattcggtgcgcttgcaggaggctagcaaagcggtacctggtgggtctgttcgaagataaacaacctgtgttgccatccacgctaagagagtcaccattcatgccccaaagaccatccagtttggctcgccgggatacgggggagaagagagctttaagtgaaggcagtttttatggcgttttgttagtaaaattcttgttaaaatactttggtttaatttgttgaatttttttgttaagaaattgtttataatattgtttgcatttgtacttaaagtgcattccatctttccacttcagggatggaatgcaaaagtgacttgttcacagacctccagtgatgtgagcacttgttgctcaggagtgacaagttgctaatatgcagaagggatgggtgatacttcttgcttctcatgatgcatgtttctggtagggttaataacttgttgggtagctattaaggtactagagttgataaatgtgtacagggttccttttgcaataaaactcggttatgacttgatccaagtgtttaacaattggggctgttaagtctgaccatacatcactgtgatagaatgtgggctttttcaagggtgaagatacaagtcttaaccacagtgtaacttacagtttccctttaaaaaaaaaaaaaagtaaacctggcagctatagaatacactatgtgcatttataatagctattttatatattgtaggtatcaaacatttttaaaataaatggttttacattccacaagtgggtggggagtcttggtcattaaggtgtgtgtaatttaggagtccagttgggttttccttctgactgcacttggtcctcataggtagtaaaatgctatgcgccatttataccctggcataagtcctcattctacccaccatgttaacccctctagctgataatgccaaacactaaactggggggattttattttataggggctctagaaaaaaccgagttaattcacaccagcatcatcttaactaacattctgaactaagttagttgcagcttttcattgtgttgtgtgggttggtctccataactaggttgagtttttcctcctctgctgagggaaaccagtaccgaagttcctttttccttggtggcatttggtattataaaaacttgggtgtgggggagggagccaccaaactcccagcccactggaccctctgccaaattaagatgggtgttgggttaggttacatctggttactgtcctgggaaaaatcatttttatagagatggccttccaagtggttttaaaatttactgaagtttttaggtcaattatgtatgttgactaaatttacaaataaacttgtttatccaactaaaaaaaa

SEQ ID NO: 153884 - DNA, 1188 bp, Homo sapiens
  misc_feature (1)...(1188): n = a,t,c or g
aattcgctggcaatctcccanaaagtccagcaatttgaaagtcaaatccacagaaagaccatcttccataacaaaaggaagcactttttttaggttgacacttgcaagcaggagttccaattattttcgcggttatcaatttcatgtaattgcaatgttacccaaaagtttcttgatttgttttaaacgggctgaataacaatttcttttcaagaagaaaaacctaaacagaaatattcacaggggatgctgaaaagggtcaataatgctagtcatttcaattctcacacataaaggaaacgctgatggtctttggctactcctccagaacttttcctgtggaagtcaccaaccccctatcttaggcttcttcatcttccaacaaatttcctgccgaactagtgggccgctctcgcttctctgctttgctcctccggaaagggacacggggtcacccagatttcagcgagtttgccctcgactctgacgaaaaggaatgcattgccagcaacttttaagtccgctttttaaaaggcctgtggaaccaatccagacttttcctttgcattaaagtttttggctgagctgagactaagggggccgtaggtgacattggaagaagtcagggcattagaggctcgcgggagccaccttgggggaaggggagaccccttgacagcaagggagggatttgaatgggaggctccgtggccaaagttggggccgggatccggaataaggggcggcttggggctgagggaagctgtcggggcgcggcacgggcagcttactccggggcgacgctcttccacgccttcagaaaacggggtgtcccaaagctgggggaaacagaccacccgcagtgtcccaaagccggggcggggctgtaagggacgaaggacttctcgcggcccagacagcggaaggcgggccccgtgtagaggaggcccggccgcctcagctgccccaagcccgggggtctctgcccgagacaccccctcccccggccccggacgctgacaccaccaccgccctcaggcagtcacatctcgccgagctccgccgagggacccagccgccccccgccggtaggggccgtggacagcggaggggctcctcagccgcaggacccgggaaccggctccggctccagcgctgctcaggcacagacaccaaaccccgcggccg

SEQ ID NO: 153885 - DNA, 476 bp, Homo sapiens
tgcctgtgtccccaagacttgcccttcatcatatttccactgtgacaacggaaactgcatccacagggcatggctctgtgatcgggacaatgactgcggggatatgagtgatgagaaggactgccctactcagccctttcgctgtcctagttggcaatggcagtgtcttggccataacatctgtgtgaatctgagtgtagtgtgtgatggcatctttgactgccccaatgggacagatgagtccccactttgcagtaagtttcctgaccacagtttactggccataaactcattctgaacagtagcctggtgtgcatcaccattgtcacagtcactgtgtagctttgtaggaaggatttcagttcctctatgagttcacatctgtgtagggggtaaccataattgaattcaaatacatcaccattggataattttctgattaaatcctttgtacttggtaaaaaaaaaaaaaaaaa

SEQ ID NO: 153886 - DNA, 1131 bp, Homo sapiens
atgccaatagaaaatgtgagtggtacagaaattggctggagggcccagagagggactatcccactgcagtgtggtggcagagatgatagtgtaaatgagggtgagtggccagctgacacgtggacgagaggtattgagaggatgcctaggctctgctgtcacctggcagagccacttccagttgctgggtattcaggttattcattctgtcaggacctaactgctgttctcacccgctttccagtgcccaacctttgcaaacagatctgcagccacctctgccttctgagacctggaggatacagctgtgcctgtccccaaggctccagctttatagaggggagcaccactgagtgtgatgcagccatcgaactgcctatcaacctgccccccccatgcaggtgcatgcacggaggaaattgctattttgatgagactgacctccccaaatgcaagtgtcctagcggctacaccggaaaatattgtgaaatggcgttttcaaaaggcatctctccaggaacaaccgcagtagctgtgctgttgacaatcctcttgatcgtcgtaattggagctctggcaattgcaggattcttccactatagaaggaccggctcccttttgcctgctctgcccaagctgccaagcttaagcagtctcgtcaagccctctgaaaatgggaatggggtgaccttcagatcaggggcagatcttaacatggatattggagtgtctggttttggacctgagactgctattgacaggtcaatggcaatgagtgaagactttgtcatggaaatggggaagcagcccataatatttgaaaacccaatgtactcagccagagacagtgctgtcaaagtggttcagccaatccagggaaggaagcatagtgagtggtccatgctgcagctgccctatctgcaggaacaggaccaacccaaggacataagacctgaaaacaatcagaatcctgttctgttgcacagtggtggaggtttggcagccatgccgggctgctggccaagaacctttcattttgagtggtgtcagagcaagagaggtctgagtcccttcaggggcctgggaaacacagtgcctgaagcaccacagcttctctacaaatacttgtga

SEQ ID NO: 153887 - DNA, 1305 bp, Homo sapiens; identical to SEQ ID NO: 118617

SEQ ID NO: 153888 - DNA, 2277 bp, Homo sapiens
atgggcaaggttcctatgaggtctgaaaagccagctcatgaagtcagggccagtacaatttcaaccacccctgacctttctagcattgaatccttcttttccagggggcctgaaagcaccaaccacacatccatcaaaggtcgtcctctgacagctgagctcaagaataaaactaacagagcagaggaaaagataaagaaagaagaattggcgattagtggggtagacgaagatgatgggggaaaggggatcaaggacactggtgatcttgtcgaaatggttgacctggcatttaggtgtgaccggcacaatgactgtggtgactatagcgacgagaggggctgcttataccagacttgccaacagaatcagtttacctgtcagaacgggcgctgcattagtaaaaccttcgtctgtgatgaggataatgactgtggagacggatctgatgagctgatgcacctgtgccacaccccagaacccacgtgtccacctcacgagttcaagtgtgacaatgggcgctgcatcgagatgatgaaactctgcaaccacctagatgactgtttggacaacagcgatgagaaaggctgtggtgaattcattttcagagcaagttctcctggtgcaattctgattctcatcgtagccgtcagtacaatccacatcgccatcacagacccaagactggggaatgcacttcctgtccggagaattgtacagccccagtacagttggactcccctaaccctaaaactgtgggcaagtcgtgtcagcaattgtcagggcctactctctgcagccaaaactcaccacacagtccagttctccatcctgatggctcttcctaaaggtcatcttttctctgcaagactcactggcaaatgtgttgctcaagtcattgttgaagggtttttcgcgggccgagacaaatttgtctgcgtattgaacgtcgccttcgtaccgtaccagtttgtactgtcgcttgttaggaccggaacagcttccaaatctacagtcggtttttaccgaaataacatctcagtcataaccggatttctaatcggctttctttgccagtcttctgcgctggatttagagacttttacagtagtctctcacttttacttcggcattaatgaatgccatgacccttcaatcagtggctgcgatcacaactgcacagacaccttaaccagtttctattgttcctgtcgtcctggttacaagctcatgtctgacaagcggacttgtgttgatattgatgaatgcacagagatgccttttgtctgtagccagaagtgtgagaatgtaataggctcctacatctgtaagtgtgccccaggctacctccgagaaccagatggaaagacctgccggcaaaacagtaacatcgaaccctatctcatttttagcaaccgttactatttgagaaatttaactatagatggctatttttactccctcatcttggaaggactggacaatgttgtggcattagattttgaccgagtagagaagagattgtattggattgatacacagaggcaagtcattgagagaatgtttctgaataagacaaacaaggagacaatcataaaccacagactaccagctgcagaaagtctggctgtagactgggtttccagtgctctgaaaggtgggtttgttcatccctatgaatggaggttcccagcacttcactttgctggtggactgagtgatcaagtggttatacttgatttcaaattccgtcccttgttgaaagaggcggtggggtttgccagtattctggtttggtggaaagagggagatgagttgggagatgatggggcattgattggtggaggggctctgtggctgttgccattgatggtagatgcgctggttttggtgaccagtgagcatggctgtgtttgggtggagtggtcaactaaaaaaagagtattgaacatccctctagccatgatgcttctgagagatgtctgtcccccttttcaggtatatacatatagtcaaaatgataagaaaatttatatatttatgtatgcagtgggtaaaactcaaaaacttaaccatacagttaagtttagaaaggctactgtggctgaccaagcaaagcaacctatgttcacttataaagatggaggtcacattgttaccctagagctggctcgagccaaagaacaagattccataagtctctgtggaactagcctaacaccagcaactgccacccatgatgcagggtcatctggctctcgtcgagacctgcattaa

SEQ ID NO: 153889 - DNA, 2973 bp, Homo sapiens
atggagaaacaaagcatcaatcagcagcttccgtatcctgatcagctccccacacagtgctctccactaacaggtcttaatgaatatccgctgagcggtgtcagcattccagatgaaagctgggacaggaagtccaagcattcagcagccatgaccctgaggcaggttcatcagaggcatcaaaacaatctgtttcttgatcacaataccaatgttgaggaatacagcgcccagatgcgcattggaactcactgctgctgcacgtcatctgagagtctgctgttacttgtggcaagtcagaacaaaattattgccgacagtgtcacctcccaggtccacaatatctattcattggtcgagaatggttcttacattgtagctgttgattttgattcaattagtggtcgtatcttttggtctgatgcaactcagggtaaaacctggagtgcgtttcaaaatggaacggacagaagagtggtatttgacagtagcatcatcttgactgaaactattgcaatagattgggtaggtcgtaatctttactggacagactatgctctggaaacaattgaagtctccaaaattgatgggagccacaggactgtgctgattagtaaaaacctaacaaatccaagaggactagcattagatcccagaatgaaactgctctacttcatggactcctatcttgattacatggacttttgtgattataatggacaccatcggagacaggtgatagccagtgatttgggatttgaggttggacctaaactcctggcactaccacctcagctggtgctaacagagagttccacatgcaggcctggagactggcctgccagtccattggagccaccaccaacatcaatgcatactgcctgtgacccagagaatcaccttacctctgctactgctatcacctatgccatgtcagctgtccaaggacgaaacgcactgcatgtggatgtggatgtgtcctctggctttatttattggtgtgattttagcagctcagtggcatctgataatgcgatccgtagaattaaaccagatggatcttctctgatgaacattgtgacacatggaataggagaaaatggagtccggggtattgcagtggattgggtagcagagacaaagattgagcgttctttccttgactgtaccaatcgaacagtgcttgtgtcagagggcattgtcacaccacggggcttggcagtggaccgaagtgatggctacgtttattgggttgatgattctttagatataattgcaaggattcgtatcaatggagagaactctgaagtgattcgttatggcagtcgttacccaactccttatggcatcactgtttttgaaaattctatcatatgggtagataggaatttgaaaaagatcttccaagccagcaaggaaccagagaacacagagccacccacagtgataagagacaatatcaactggctaagagatgtgaccatctttgacaagcaagtccagccccggtcaccagcagaggtcaacaacaacccttgcttggaaaacaatggtgggtgctctcatctctgctttgctctgcctggattgcacaccccaaaatgtgactgtgcctttgggaccctgcaaagtgatggcaagaattgtgccatttcaacagaaaatttcctcatctttgccttgtctaattccttgagaagcttacacttggaccctgaaaaccatagcccacctttccaaacaataaatgtggaaagaactgtcatgtctctagactatgacagtgtaagtgatagaatctacttcacacaaaatttagcctctggagttggacagatttcctatgccaccctgtcttcaggcatccatactccaactgtcattgcttcagaattacaaatgaaattactcaacttacattctgcaggccctaggcagaggattgaacgcagcactctgacgggcgtggatcgtgaagtcattgtcaatgcagccgttcatgcttttggcttgactctctatggccagtatatttactggactgacttgtacacacaaagaatttaccgagctaacaaatatgacgggtcaggtcagattgcaatgaccacaaatttgctctcccagcccaggggaatcaacactgttgtgaagaaccagaaacaacagtgtaacaatccttgtgaacagtttaatgggggctgcagcatatctgtgcaccagaagtggaagaacttcctgtctgtgaggtttagcaaacatgggtggtttattagtgtaagtaaggacttaatgaagaatgatcaacctttcttaataactgtaaggcaacatataatttttggaatctcccttaatcctgaggtgaagagcaatgatgctatggtccccatagcagggatacagaatggtttagatgttgaatttgatgatgctgagcaatacatctattgggttgaaaatccaggtgaaattcacagagtgaagacagatggcaccaacaggacagtatttgcttctatatctatggtggggccttctatgaacctggccttagattggatttcaagaaacctttattctaccaatcctagaactcagtcaatcgaggttttgacactccacggagatatcagatacagaaaaacattgattgccaatgatgggacagctcttggagttggctttccaattggcataactgttgatcctgctcgtgggatatgcatatcaactgtgacaacaaattcttgtaaagcggagacaaattttgagacaacagaagctgttatggaaggtgaagggacacaacacgttggtggcaatggcaatgctgggtgcgttggagtaggtggaggagacgctgcttctcaaaccaaaagcacgaacacctacattgttatcttagattctggttactgcctaaataacccccttggactcctatctcggaaaaactatttgttgtcataa

SEQ ID NO: 153890 - DNA, 3564 bp, Homo sapiens
atgaaggcagaaatcaagatgttctttgaaaccaacgagaacaaagacaccacataccagaatctctgggacgcattcaaagcagtgtgtagagggaaatttatagcactaaatgcctacaagagaaagcaggaaagatccaaaattgacaccctaacatcacaattaaaagaactagaaaagcaagagcaaacacattcaaaagctagcagaaggcaagaaataactaaaatcagagcagaactgaaggaaatagaggcacaaaaaacccttcaaaaaatcaatgaatccaggagctggaagctgtactggtcagaccaaggaactgacagtggggttcctgccaagatcgccagtgctaacatggatggcacatctgtgaaaactctctttactgggaacctcgaacacctggagtgtgtcactcttgacatcgaagagcagaaactctactgggcagtcactggaagaggagtgattgaaagaggaaacgtggatggaacagatcgaatgatcctggtacaccagctttcccacccctggggaattgcagtccatgattctttcctttattatactgatgaacagtatgaggtcattgaaagagttgataaggccactggggccaacaaaatagtcttgagagataatgttccaaatctgaggggtcttcaagtttatcacagacgcataacagagccatccccaactagcctaagactattaagattgggcactatatcaaggacaagcccacatgtagcagcgaaccaagtggtatttgccacatccaggacagatgtagatagcaataagccagaggctcaacgaggatctaggaggctcactgatttagaaggaggaaataatgagattgattggtcaattagttgtgattgtatttatccttccagccaagtttttgacctgtctgcgaagatagaggggaaggtggacaagaggacctgctgcccctcaagttttcccaagggttatgggcccatagccaagaacagccaagtgtatgaatctagttctgccaacacggattctgtggctgttgttggtggagtttgttttgccctgtggtcttcccgggtagcaggtttaaggcgggtccaacgcgaagaaacacaactcgaggaacctttttacaccaacccttgcaaaggaacaaaccaagattcccgggagcgcattggccttaacgaagaaacaagtactcttatccttagaagtggttatctgcgccctgtagcgctaaggttcactcagcagcagctcgagagtgaggcagctgccacacgctttcctgatggtcatactgccaggctactatgttcgaatgcaaaaaccatgtttgtatcccgccatattggaaatgtgatggcgatgatgactgtggcgatggttcagatgaagaacttcacctgtgcttggatgttccctgtaattcaccaaaccgtttccggtgtgacaacaatcgctgcatttatagtcatgaggtgtgcaatggtgtggatgactgtggagatggaactgatgagacagaggagcactcactgcagaaataccaaaggaagttatgagtgtgtctgtgctgatggcttcacgtctatgagtgaccgccctggaaaacgatgtgcagctgagggtagctctcctttgttgctactgcctgacaatgtccgaattcgaaaatataatctctcatctgagaggttctcagagtatcttcaagatgaggaatatatccaagctgttgattatgattgggatcccaaggacataggcctcaattctaataacaacaaaaggtctcagatctcctctcatcattctgagtgttctgctgaggatctcttctcgttacacctaacttatacaatagggaagaacaaaagtcagagtgttgctcttgtccttgtcttcgaccttggccaatccattcaaataacagatcaagatgctgcgttccttgaggataaagcctctacctgtaaaagagaactaagtatcggggatgatgattcctacttacgcccaatcgatggccaagccattgggccatccaagagtagtgtttattacaggcaagagtgtgatgggcaaaatgactgtggagataactcagatgaggaaaactgtgctccccgggagtgcacagagagcgagtttcgatgtgtcaatcagcagtgcattccctcgcgatggatctgtgaccattacaacgactgtggggacaactcagatgaacgggactgtgagatgaggacctgccatcctgaatattttcagtgtacaagtggacattgtgtacacagtgaactgaaatgcgatggatccgctgactgtttggatgcgtctgatgaagctgattgtcgcaatccatacaccttcacctggtatcggctctctgccctgggaccaggggtttgtccagccggcttttctgattctacgttcccatacactaaaaatgcttcccgaaattccaaattaaaagtccgcttctcctcaacacatctccaaattatgcttcagggcataaaaatcacccactacaaggtgacaaaatggaatctcttcaaacgaaaatctaaacaaactaccaactttgaaaatccaatctatgcacagatggagaacgagcaaaaggaaagtgttgctgcgacaccacctccatcaccttcgctccctgctaagcctaagcctccttcgagaagagacccaactccaacctattctgcaacagaagacacttttaaagacaccgcaaatcttgttaaagaagactctgaaggccacgagagagctcatgcatgtcatttcttggaattcagtgttgacttcttctctccagataactgttgcccctggtgctttgctaaagaagtgctgtatgttctctgtgcaggtgcattcctatctggtggaaatgtgatggacagaaagactgctcagatggctctgatgaactggccctttgcccgcagcgcttctgccgactgggacagttccagtgcagtgacggcaactgcaccagcccgcagactttatgcaatgctcaccaaaattgccctgatgggtctgatgaagaccgtcttctttgtgtgcgccaacaaacgttgcatcccagaatcctggcagtgtgacacatttaacgactgtgaggataactcagatgaagacagttcccactgtgccagcaggacctgccggccgggccagtttcggtgtgctaatggccgctgcatcccgcaggcctggaagtgtgatgtggataatgattgtggagaccactcggatgagcccattgaagaatgcatgagctctgcccatctctgtgacaacttcacagaattcagctgcaaaacaaattaccgctgcatcccaaagtgggccgtgtgcaatggtgtagatgactgcagggacaacagtgatgagcaaggctgtggtgccaaggggtctggctctgcagataccacctggacactgttggctgtggaggcagctgtacagaaagctttggaagggctcaggtttgcgggagtgttctgctga

SEQ ID NO: 153891 - DNA, 10728 bp, Homo sapiens
atggcgggcgcccctcccccagcctcgttgccgccttgcagtttgatctcagactgctgtgctagcaatcagcgagattccgtgggcgtaggaccctccgagccaggtgtgggatatagtctcgtggtgcgccgtttcttaagccggtctgaaaagcgcaatattcgggtgggagtgacccgattttccagggaactccctgaccccttgcgcttcccagagcatttattttttactgactggagactgggtgccattattcgagtcaggaaagcagatggtggagaaatgacagttatccgaagtggcattgcttacatactgcatttgaaatcgtatgatgtcaacatccagactggttctaacgcctgtaatcaacccacgcatcctaacggtgactgcagccacttctgcttcccggtgccaaatttccagcgagtgtgtgggtgcccttatggaatgaggctggcttccaatcacttgacatgcgagggggacccaaccaatgaaccacccacagagcagtgtggcttattttccttcccctgtaaaaatggcagatgtgtgcccaattactatctctgtgatggagtcgatgattgtcatgataacagtgatgagcaactatgtggcacacttaataatacctgttcatcttcggcgttcacctgtggccatggggagtgcattcctgcacactggcgctgtgacaaacgcaacgactgtgtggatggcagtgatgagcacaactgccccaacccaacgcaacctgcttcctgccttgacacccaatacacctgtgataatcaccagtgtatctcaaagaactgggtctgtgacacagacaatgattgtggggatggatctgatgaaaagaactgcatattaaactgtactgcttctcaattcaagtgtgccagtggggataaatgtattggcgtcacaaatcgttgtgatggtgtttttgattgcagtgacaactcggatgaagcaggctgtccaaccaggcctcctggtatgtgccactcagatgaatttcagtgccaagaagatggtatctgcatcccgaacttctgggaatgtgatgggcatccagactgcctctatggatctgatgagcacaatgcctgtgtccccaagacttgcccttcatcatatttccactgtgacaacggaaactgcatccacagggcatggctctgtgatcgggacaatgactgcggggatatgagtgatgagaaggactgccctactcagccctttcgctgtcctagttggcaatggcagtgtcttggccataacatctgtgtgaatctgagtgtagtgtgtgatggcatctttgactgccccaatgggacagatgagtccccactttgcaatgggaacagctgctcagatttcaatggtggttgtactcacgagtgtgttcaagagccctttggggctaaatgcctatgtccattgggattcttacttgccaatgattctaagacctgtgaagacatagatgaatgtgatattctaggctcttgtagccagcactgttacaatatgagaggttctttccggtgctcgtgtgatacaggctacatgttagaaagtgatgggaggacttgcaaagttacagcatctgagagtctgctgttacttgtggcaagtcagaacaaaattattgccgacagtgtcacctcccaggtccacaatatctattcattggtcgagaatggttcttacattgtagctgttgattttgattcaattagtggtcgtatcttttggtctgatgcaactcagggtaaaacctggagtgcgtttcaaaatggaacggacagaagagtggtatttgacagtagcatcatcttgactgaaactattgcaatagattgggtaggtcgtaatctttactggacagactatgctctggaaacaattgaagtctccaaaattgatgggagccacaggactgtgctgattagtaaaaacctaacaaatccaagaggactagcattagatcccagaatgaatgagcatctactgttctggtctgactggggccaccaccctcgcatcgagcgagccagcatggacggcagcatgcgcactgtcattgtccaggacaagatcttctggccctgcggcttaactattgactaccccaacagactgctctacttcatggactcctatcttgattacatggacttttgtgattataatggacaccatcggagacaggtgatagccagtgatttgattatacggcacccctatgccctaactctctttgaagactctgtgtactggactgaccgtgctactcgtcgggttatgcgagccaacaagtggcatggagggaaccagtcagttgtaatgtataatattcaatggccccttgggattgttgcggttcatccttcgaaacaaccaaattatgatcaacctttcttaataactgtaaggcaacatataatttttggaatctcccttaatcctgaggtgaagagcaatgatgctatggtccccatagcagggatacagaatggtttagatgttgaatttgatgatgctgagcaatacatctattgggttgaaaatccaggtgaaattcacagagtgaagacagatggcaccaacaggacagtatttgcttctatatctatggtggggccttctatgaacctggccttagattggatttcaagaaacctttattctaccaatcctagaactcagtcaatcgaggttttgacactccacggagatatcagatacagaaaaacattgattgccaatgatgggacagctcttggagttggctttccaattggcataactgttgatcctgctcgtgggaagctgtactggtcagaccaaggaactgacagtggggttcctgccaagatcgccagtgctaacatggatggcacatctgtgaaaactctctttactgggaacctcgaacacctggagtgtgtcactcttgacatcgaagagcagaaactctactgggcagtcactggaagaggagtgattgaaagaggaaacgtggatggaacagatcgaatgatcctggtacaccagctttcccacccctggggaattgcagtccatgattctttcctttattatactgatgaacagtatgaggtcattgaaagagttgataaggccactggggccaacaaaatagtcttgagagataatgttccaaatctgaggggtcttcaagtttatcacagacgcaatgccgccgaatcctcaaatggctgtagcaacaacatgaatgcctgtcagcagatttgcctgcctgtaccaggaggattgttttcctgcgcctgtgccactggatttaaactcaatcctgataatcggtcctgctctccatataactctttcattgttgtttcaatgctgtctgcaatcagaggctttagcttggaattgtcagatcattcagaaaccatggtgccggtggcaggccaaggacgaaacgcactgcatgtggatgtggatgtgtcctctggctttatttattggtgtgattttagcagctcagtggcatctgataatgcgatccgtagaattaaaccagatggatcttctctgatgaacattgtgacacatggaataggagaaaatggagtccggggtattgcagtggattgggtagcaggaaatctttatttcaccaatgcctttgtttctgaaacactgatagaagttctgcggatcaatactacttaccgccgtgttcttcttaaagtcacagtggacatgcctaggcatattgttgtagatcccaagaacagatacctcttctgggctgactatgggcagagaccaaagattgagcgttctttccttgactgtaccaatcgaacagtgcttgtgtcagagggcattgtcacaccacggggcttggcagtggaccgaagtgatggctacgtttattgggttgatgattctttagatataattgcaaggattcgtatcaatggagagaactctgaagtgattcgttatggcagtcgttacccaactccttatggcatcactgtttttgaaaattctatcatatgggtagataggaatttgaaaaagatcttccaagccagcaaggaaccagagaacacagagccacccacagtgataagagacaatatcaactggctaagagatgtgaccatctttgacaagcaagtccagccccggtcaccagcagaggtcaacaacaacccttgcttggaaaacaatggtgggtgctctcatctctgctttgctctgcctggattgcacaccccaaaatgtgactgtgcctttgggaccctgcaaagtgatggcaagaattgtgccatttcaacagaaaatttcctcatctttgccttgtctaattccttgagaagcttacacttggaccctgaaaaccatagcccacctttccaaacaataaatgtggaaagaactgtcatgtctctagactatgacagtgtaagtgatagaatctacttcacacaaaatttagcctctggagttggacagatttcctatgccaccctgtcttcagggatccatactccaactgtcattgcttcaggtatagggactgctgatggcattgcctttgactggattactagaagaatttattacagtgactacctcaaccagatgattaattccatggctgaagatgggtctaaccgcactgtgatagcccgcgttccaaaaccaagagcaattgtgttagatccctgccaagggtacctgtactgggctgactgggatacacatgccaaaatcgagagagccacattgggaggaaacttccgcgtacccattgtgaacagcagtctggtcatgcccagtgggctgactctggactatgaagaggaccttctctactgggtggatgctagtctgcagaggattgaacgcagcactctgacgggcgtggatcgtgaagtcattgtcaatgcagccgttcatgcttttggcttgactctctatggccagtatatttactggactgacttgtacacacaaagaatttaccgagctaacaaatatgacgggtcaggtcagattgcaatgaccacaaatttgctctcccagcccaggggaatcaacactgttgtgaagaaccagaaacaacagtgtaacaatccttgtgaacagtttaatgggggctgcagccatatctgtgcaccaggtccaaatggtgccgagtgccagtgtccacatgagggcaactggtatttggccaacaacaggaagcactgcattgtggacaatggtgaacgatgtggtgcatcttccttcacctgctccaatgggcgctgcatctcggaagagtggaagtgtgataatgacaacgactgtggggatggcagtgatgagatggaaagtgtctgtgcacttcacacctgctcaccgacagccttcacctgtgccaatgggcgatgtgtccaatactcttaccgctgtgattactacaatgactgtggtgatggcagtgatgaggcagggtgcctgttcagggactgcaatgccaccacggagtttatgtgcaataacagaaggtgcatacctcgtgagtttatctgcaatggtgtagacaactgccatgataataacacttcagatgagaaaaattgccccactcacacgtgcagcagcagtgagttccaatgcgcatctgggcgctgtattcctcaacattggtattgtgatcaagaaacagattgttttgatgcctctgatgaacctgcctcttgtggtcactctgagcgaacatgcctagctgatgagttcaagtgtgatggtgggaggtgcatcccaagcgaatggatctgtgacggtgataatgactgtggggatatgagtgacgaggataaaaggcaccagtgtcagaatcaaaactgctcggattccgagtttctctgtgtaaatgacagacctccggacaggaggtgcattccccagtcttgggtctgtgatggcgatgtggattgtactgacggctacgatgagaatcagaattgcaccaggagaacttgctctgaaaatgaattcacctgtggttacggactgtgtatcccaaagatattcaggtgtgaccggcacaatgactgtggtgactatagcgacgagaggggctgcttataccagacttgccaacagaatcagtttacctgtcagaacgggcgctgcattagtaaaaccttcgtctgtgatgaggataatgactgtggagacggatctgatgagctgatgcacctgtgccacaccccagaacccacgtgtccacctcacgagttcaagtgtgacaatgggcgctgcatcgagatgatgaaactctgcaaccacctagatgactgtttggacaacagcgatgagaaaggctgtggcattaatgaatgccatgacccttcaatcagtggctgcgatcacaactgcacagacaccttaaccagtttctattgttcctgtcgtcctggttacaagctcatgtctgacaagcggacttgtgttgatattgatgaatgcacagagatgccttttgtctgtagccagaagtgtgagaatgtaataggctcctacatctgtaagtgtgccccaggctacctccgagaaccagatggaaagacctgccggcaaaacagtaacatcgaaccctatctcatttttagcaaccgttactatttgagaaatttaactatagatggctatttttactccctcatcttggaaggactggacaatgttgtggcattagattttgaccgagtagagaagagattgtattggattgatacacagaggcaagtcattgagagaatgtttctgaataagacaaacaaggagacaatcataaaccacagactaccagctgcagaaagtctggctgtagactgggtttccaggtacctctactgggcagactggggtcaccgcgcatacattgggagagtaggcatggatggaaccaacaagtctgtgataatctccaccaagttagagtggcctaatggcatcaccattgattacaccaatgatctactctactgggcagatgcccacctgggttacatagagtactctgatttggagggccaccatcgacacacggtgtatgatggggcactgcctcaccctttcgctattaccatttttgaagacactatttattggacagattggaatacaaggacagtggaaaagggaaacaaatatgatggatcaaatagacagacactggtgaacacaacacacagaccatttgacatccatgtgtaccatccatataggcagcccattgtgagcaatccctgtggtaccaacaatggtggctgttctcatctctgcctcatcaagccaggaggaaaagggttcacttgcgagtgtccagatgacttccgcacccttcagctgagtggcagcacctactgcatgcccatgtgctccagcacccagttcctgtgcgctaacaatgaaaatgcctctctagcccgtggacagacattgaccttcaaggctccaagggatgggagttttctaggccacgagagagctcatgcatgtcatttcttggaattcagtgttgacttcttctctccagataactgttgcccctggtgctttgctaaagaagtgctgtatgttctctgtgcaggtgcattcctatctggtggaaatgtgatggacagaaagactgctcagatggctctgatgaactggccctttgcccgcagcgcttctgccgactgggacagttccagtgcagtgacggcaactgcaccagcccgcagactttatgcaatgctcaccaaaattgccctgatgggtctgatgaagaccgtcttctttgtgtgcgccaacaaacgttgcatcccagaatcctggcagtgtgacacatttaacgactgtgaggataactcagatgaagacagttcccactgtgccagcaggacctgccggccgggccagtttcggtgtgctaatggccgctgcatcccgcaggcctggaagtgtgatgtggataatgattgtggagaccactcggatgagcccattgaagaatgcatgagctctgcccatctctgtgacaacttcacagaattcagctgcaaaacaaattaccgctgcatcccaaagtgggccgtgtgcaatggtgtagatgactgcagggacaacagtgatgagcaaggctgtgaggagaggacatgccatcctgtgggggatttccgctgtaaaaatcaccactgcatccctcttcgttggcagtgtgatgggcaaaatgactgtggagataactcagatgaggaaaactgtgctccccgggagtgcacagagagcgagtttcgatgtgtcaatcagcagtgcattccctcgcgatggatctgtgaccattacaacgactgtggggacaactcagatgaacgggactgtgagatgaggacctgccatcctgaatattttcagtgtacaagtggacattgtgtacacagtgaactgaaatgcgatggatccgctgactgtttggatgcgtctgatgaagctgattgtcccacacgctttcctgatggtgcatactgccaggctactatgttcgaatgcaaaaaccatgtttgtatcccgccatattggaaatgtgatggcgatgatgactgtggcgatggttcagatgaagaacttcacctgtgcttggatgttccctgtaattcaccaaaccgtttccggtgtgacaacaatcgctgcatttatagtcatgaggtgtgcaatggtgtggatgactgtggagatggaactgatgagacagaggagcactgtagaaaaccgacccctaaaccttgtacagaatatgaatataagtgtggcaatgggcattgcattccacatgacaatgtgtgtgatgatgccgatgactgtggtgactggtccgatgaactgggttgcaatatcaatgaatgtgaacaatttgggacttgtccccagcactgcagaaataccaaaggaagttatgagtgtgtctgtgctgatggcttcacgtctatgagtgaccgccctggaaaacgatgtgcagctgagggtagctctcctttgttgctactgcctgacaatgtccgaattcgaaaatataatctctcatctgagaggttctcagagtatcttcaagatgaggaatatatccaagctgttgattatgattgggatcccaaggacataggcctcagtgttgtgtattacactgtgcgaggggagggctctaggtttggtgctatcaaacgtgcctacatccccaactttgaatccggccgcaataatcttgtgcaggaagttgacctgaaactgaaatacgtaatgcagccagatggaatagcagtggactgggttggaaggcatatttactggtcagatgtcaagaataaacgcattgaggtggctaaacttgatggaaggtacagaaagtggctgatttccactgacctggaccaaccagctgctattgctgtgaatcccaaactagggcttatgttctggactgactggggaaaggaacctaaaatcgagtctgcctggatgaatggagaggaccgcaacatcctggttttcgaggaccttggttggccaactggcctttctatcgattatttgaacaatgaccgaatctactggagtgacttcaaggaggacgttattgaaaccataaaatatgatgggactgataggagagtcattgcaaaggaagtgcccaacctttgcaaacagatctgcagccacctctgccttctgagacctggaggatacagctgtgcctgtccccaaggctccagctttatagaggggagcaccactgagtgtgatgcagccatcgaactgcctatcaacctgccccccccatgcaggtgcatgcacggaggaaattgctattttgatgagactgacctccccaaatgcaagtgtcctagcggctacaccggaaaatattgtgaaatggcgttttcaaaaggcatctctccaggaacaaccgcagtagctgtgctgttgacaatcctcttgatcgtcgtaattggagctctggcaattgcaggattcttccactatagaaggaccggctcccttttgcctgctctgcccaagctgccaagcttaagcagtctcgtcaagccctctgaaaatgggaatggggtgaccttcagatcaggggcagatcttaacatggatattggagtgtctggttttggacctgagactgctattgacaggtcaatggcaatgagtgaagactttgtcatggaaatggggaagcagcccataatatttgaaaacccaatgtactcagccagagacagtgctgtcaaagtggttcagccaatccaggtgactgtatctgaaaatgtggataataagaattatggaagtcccataaacccttctgagatagttccagagacaaacccaacttcaccagctgctgatggaactcaggtgacaaaatggaatctcttcaaacgaaaatctaaacaaactaccaactttgaaaatccaatctatgcacagatggagaacgagcaaaaggaaagtgttgctgcgacaccacctccatcaccttcgctccctgctaagcctaagcctccttcgagaagagacccaactccaacctattctgcaacagaagacacttttaaagacaccgcaaatcttgttaaagaagactctgaagtatag

SEQ ID NO: 153892 - DNA, 14738 bp, Homo sapiens
tttcgtggcggaggtgcagacctaaaggagcgttcgctagcagaggcgctgccggtgcggtgtgctacgcgcgcccacctcccggggaaggaacggcgaggccggggaccatcgcggagatggatcgcgggccggcagcagtggcgtgcacgctgctcctggctctcgtcgcctgcctagccccggccagtggccaagaatgtgacagtgcgcattttcgctgtggaagtgggcattgcatccctgcagactggaggtgtgatgggaccaaagactgttcagatgacgcggatgaaattggctgcgctgttgtgacctgccagcagggctatttcaagtgccagagtgagggacaatgcatccccagctcctgggtgtgtgaccaagatcaagactgtgatgatggctcagatgaacgtcaagattgctcacaaagtacatgctcaagtcatcagataacatgctccaatggtcagtgtatcccaagtgaatacaggtgcgaccacgtcagagactgccccgatggagctgatgagaatgactgccagtacccaacatgtgagcagcttacttgtgacaatggggcctgctataacaccagtcagaagtgtgattggaaagttgattgcagggactcctcagatgaaatcaactgcactgagatatgcttgcacaatgagttttcatgtggcaatggagagtgtatccctcgtgcttatgtctgtgaccatgacaatgattgccaagacggcagtgatgaacatgcttgcaactatccgacctgcggtggttaccagttcacttgccccagtggccgatgcatttatcaaaactgggtttgtgatggagaagatgactgtaaagataatggagatgaagatggatgtgaaagcggtcctcatgatgttcataaatgttccccaagagaatggtcttgcccagagtcgggacgatgcatctccatttataaagtttgtgatgggattttagattgcccaggaagagaagatgaaaacaacactagtaccggaaaatactgtagtatgactctgtgctctgccttgaactgccagtaccagtgccatgagacgccgtatggaggagcgtgtttttgtcccccaggttatatcatcaaccacaatgacagccgtacctgtgttgagtttgatgattgccagatatggggaatttgtgaccagaagtgtgaaagccgacctggccgtcacctgtgccactgtgaagaagggtatatcttggagcgtggacagtattgcaaagctaatgattcctttggcgaggcctccattatcttctccaatggtcgggatttgttaattggtgatattcatggaaggagcttccggatcctagtggagtctcagaatcgtggagtggccgtgggtgtggctttccactatcacctgcaaagagttttttggacagacaccgtgcaaaataaggttttttcagttgacattaatggtttaaatatccaagaggttctcaatgtttctgttgaaaccccagagaacctggctgtggactgggttaataataaaatctatctagtggaaaccaaggtcaaccgcatagatatggtaaatttggatggaagctatcgggttacccttataactgaaaacttggggcatcctagaggaattgccgtggacccaactgttggttatttatttttctcagattgggagagcctttctggggaacctaagctggaaagggcattcatggatggcagcaaccgtaaagacttggtgaaaacaaagctgggatggcctgctggggtaactctggatatgatatcgaagcgtgtttactgggttgactctcggtttgattacattgaaactgtaacttatgatggaattcaaaggaagactgtagttcatggaggctccctcattcctcatccctttggagtaagcttatttgaaggtcaggtgttctttacagattggacaaagatggccgtgctgaaggcaaacaagttcacagagaccaacccacaagtgtactaccaggcttccctgaggccctatggagtgactgtttaccattccctcagacagccctatgctaccaatccgtgtaaagataacaatgggggctgtgagcaggtctgtgttctcagccacagaacagataatgatggtttgggtttccgttgcaagtgcacattcggcttccaactggatacagatgagcgccactgcattgctgttcagaatttcctcattttttcatcccaagttgctattcgtgggatcccgttcaccttgtctacccaggaagatgtcatggttccagtttcggggaatccttctttctttgtcgggattgattttgacgcccaggacagcactatctttttttcagatatgtcaaaacacatgatttttaagcaaaagattgatggcacaggaagagaaattctcgcagctaacagggtggaaaatgttgaaagtttggcttttgattggatttcaaagaatctctattggacagactctcattacaagagtatcagtgtcatgaggctagctgataaaacgagacgcacagtagttcagtatttaaataacccacggtcggtggtagttcatccttttgccgggtatctattcttcactgattggttccgtcctgctaaaattatgagagcatggagtgacggatctcacctcttgcctgtaataaacactactcttggatggcccaatggcttggccatcgattgggctgcttcacgattgtactgggtagatgcctattttgataaaattgagcacagcacctttgatggtttagacagaagaagactgggccatatagagcagatgacacatccgtttggacttgccatctttggagagcatttattttttactgactggagactgggtgccattattcgagtcaggaaagcagatggtggagaaatgacagttatccgaagtggcattgcttacatactgcatttgaaatcgtatgatgtcaacatccagactggttctaacgcctgtaatcaacccacgcatcctaacggtgactgcagccacttctgcttcccggtgccaaatttccagcgagtgtgtgggtgcccttatggaatgaggctggcttccaatcacttgacatgcgagggggacccaaccaatgaaccacccacggagcagtgtggcttattttccttcccctgtaaaaatggcagatgtgtgcccaattactatctctgtgatggagtcgatgattgtcatgataacagtgatgagcaactatgtggcacacttaataatacctgttcatcttcggcgttcacctgtggccatggggagtgcattcctgcacactggcgctgtgacaaacgcaacgactgtgtggatggcagtgatgagcacaactgccccacccacgcacctgcttcctgccttgacacccaatacacctgtgataatcaccagtgtatctcaaagaactgggtctgtgacacagacaatgattgtggggatggatctgatgaaaagaactgcaattcgacagagacatgccaacctagtcagtttaattgccccaatcatcgatgtattgacctatcgtttgtctgtgatggtgacaaggattgtgttgatggatctgatgaggttggttgtgtattaaactgtactgcttctcaattcaagtgtgccagtggggataaatgtattggcgtcacaaatcgttgtgatggtgtttttgattgcagtgacaactcggatgaagcgggctgtccaaccaggcctcctggtatgtgccactcagatgaatttcagtgccaagaagatggtatctgcatcccgaacttctgggaatgtgatgggcatccagactgcctctatggatctgatgagcacaatgcctgtgtccccaagacttgcccttcatcatatttccactgtgacaacggaaactgcatccacagggcatggctctgtgatcgggacaatgactgcggggatatgagtgatgagaaggactgccctactcagccctttcgctgtcctagttggcaatggcagtgtcttggccataacatctgtgtgaatctgagtgtagtgtgtgatggcatctttgactgccccaatgggacagatgagtccccactttgcaatgggaacagctgctcagatttcaatggtggttgtactcacgagtgtgttcaagagccctttggggctaaatgcctatgtccattgggattcttacttgccaatgattctaagacctgtgaagacatagatgaatgtgatattctaggctcttgtagccagcactgttacaatatgagaggttctttccggtgctcgtgtgatacaggctacatgttagaaagtgatgggaggacttgcaaagttacagcatctgagagtctgctgttacttgtggcaagtcagaacaaaattattgccgacagtgtcacctcccaggtccacaatatctattcattggtcgagaatggttcttacattgtagctgttgattttgattcaattagtggtcgtatcttttggtctgatgcaactcagggtaaaacctggagtgcgtttcaaaatggaacggacagaagagtggtatttgacagtagcatcatcttgactgaaactattgcaatagattgggtaggtcgtaatctttactggacagactatgctctggaaacaattgaagtctccaaaattgatgggagccacaggactgtgctgattagtaaaaacctaacaaatccaagaggactagcattagatcccagaatgaatgagcatctactgttctggtctgactggggccaccaccctcgcatcgagcgagccagcatggacggcagcatgcgcactgtcattgtccaggacaagatcttctggccctgcggcttaactattgactaccccaacagactgctctacttcatggactcctatcttgattacatggacttttgcgattataatggacaccatcggagacaggtgatagccagtgatttgattatacggcacccctatgccctaactctctttgaagactctgtgtactggactgaccgtgctactcgtcgggttatgcgagccaacaagtggcatggagggaaccagtcagttgtaatgtataatattcaatggccccttgggattgttgcggttcatccttcgaaacaaccaaattccgtgaatccatgtgccttttcccgctgcagccatctctgcctgctttcctcacaggggcctcatttttactcctgtgtttgtccttcaggatggagtctgtctcctgatctcctgaattgcttgagagatgatcaacctttcttaataactgtaaggcaacatataatttttggaatctcccttaatcctgaggtgaagagcaatgatgctatggtccccatagcagggatacagaatggtttagatgttgaatttgatgatgctgagcaatacatctattgggttgaaaatccaggtgaaattcacagagtgaagacagatggcaccaacaggacagtatttgcttctatatctatggtggggccttctatgaacctggccttagattggatttcaagaaacctttattctaccaatcctagaactcagtcaatcgaggttttgacactccacggagatatcagatacagaaaaacattgattgccaatgatgggacagctcttggagttggctttccaattggcataactgttgatcctgctcgtgggaagctgtactggtcagaccaaggaactgacagtggggttcctgccaagatcgccagtgctaacatggatggcacatctgtgaaaactctctttactgggaacctcgaacacctggagtgtgtcactcttgacatcgaagagcagaaactctactgggcagtcactggaagaggagtgattgaaagaggaaacgtggatggaacagatcggatgatcctggtacaccagctttcccacccctggggaattgcagtccatgattctttcctttattatactgatgaacagtatgaggtcattgaaagagttgataaggccactggggccaacaaaatagtcttgagagataatgttccaaatctgaggggtcttcaagtttatcacagacgcaatgccgccgaatcctcaaatggctgtagcaacaacatgaatgcctgtcagcagatttgcctgcctgtaccaggaggattgttttcctgcgcctgtgccactggatttaaactcaatcctgataatcggtcctgctctccatataactctttcattgttgtttcaatgctgtctgcaatcagaggctttagcttggaattgtcagatcattcagaaaccatggtgccggtggcaggccaaggacgaaacgcactgcatgtggatgtggatgtgtcctctggctttatttattggtgtgattttagcagctcagtggcatctgataatgcgatccgtagaattaaaccagatggatcttctctgatgaacattgtgacacatggaataggagaaaatggagtccggggtattgcagtggattgggtagcaggaaatctttatttcaccaatgcctttgtttctgaaacactgatagaagttctgcggatcaatactacttaccgccgtgttcttcttaaagtcacagtggacatgcctaggcatattgttgtagatcccaagaacagatacctcttctgggctgactatgggcagagaccaaagattgagcgttctttccttgactgtaccaatcgaacagtgcttgtgtcagagggcattgtcacaccacggggcttggcagtggaccgaagtgatggctacgtttattgggttgatgattctttagatataattgcaaggattcgtatcaatggagagaactctgaagtgattcgttatggcagtcgttacccaactccttatggcatcactgtttttgaaaattctatcatatgggtagataggaatttgaaaaagatcttccaagccagcaaggaaccagagaacacagagccacccacagtgataagagacaatatcaactggctaagagatgtgaccatctttgacaagcaagtccagccccggtcaccagcagaggtcaacaacaacccttgcttggaaaacaatggtgggtgctctcatctctgctttgctctgcctggattgcacaccccaaaatgtgactgtgcctttgggaccctgcaaagtgatggcaagaattgtgccatttcaacagaaaatttcctcatctttgccttgtctaattccttgagaagcttacacttggaccctgaaaaccatagcccacctttccaaacaataaatgtggaaagaactgtcatgtctctagactatgacagtgtaagtgatagaatctacttcacacaaaatttagcctctggagttggacagatttcctatgccaccctgtcttcagggatccatactccaactgtcattgcttcaggtatagggactgctgatggcattgcctttgactggattactagaagaatttattacagtgactacctcaaccagatgattaattccatggctgaagatgggtctaaccgcactgtgatagcccgcgttccaaaaccaagagcaattgtgttagatccctgccaagggtacctgtactgggctgactgggatacacatgccaaaatcgagagagccacattgggaggaaacttccgggtacccattgtgaacagcagtctggtcatgcccagtgggctgactctggactatgaagaggaccttctctactgggtggatgctagtctgcagaggattgaacgcagcactctgacgggcgtggatcgtgaagtcattgtcaatgcagccgttcatgcttttggcttgactctctatggccagtatatttactggactgacttgtacacacaaagaatttaccgagctaacaaatatgacgggtcaggtcagattgcaatgaccacaaatttgctctcccagcccaggggaatcaacactgttgtgaagaaccagaaacaacagtgtaacaatccttgtgaacagtttaatgggggctgcagccatatctgtgcaccaggtccaaatggtgccgagtgccagtgtccacatgagggcaactggtatttggccaacaacaggaagcactgcattgtggacaatggtgaacgatgtggtgcatcttccttcacctgctccaatgggcgctgcatctcggaagagtggaagtgtgataatgacaacgactgtggggatggcagtgatgagatggaaagtgtctgtgcacttcacacctgctcaccgacagccttcacctgtgccaatgggcgatgtgtccaatactcttaccgctgtgattactacaatgactgtggtgatggcagtgatgaggcagggtgcctgttcagggactgcaatgccaccacggagtttatgtgcaataacagaaggtgcatacctcgtgagtttatctgcaatggtgtagacaactgccatgataataacacttcagatgagaaaaattgccctgatcgcacttgccagtctggatacacaaaatgtcataattcaaatatttgtattcctcgcgtttatttgtgtgacggagacaatgactgtggagataacagtgatgaaaaccctacttattgcaccactcacacatgcagcagcagtgagttccaatgcgcatctgggcgctgtattccccaaacatttggtatttgtgatcaagaaacagattgttttgatgcctctgatgaaccctcctcttgtggtcactctgagcgaacatgcctatctgatgagttcaagtgtgatggtgggaggtgcatcccaaacgaatggatctgtgacggtgataatgactgtggggatatgagtgacgaggataaaaggcaccagtgtcagaatcaaaactgctcggattccgagtttccctgtgtaaatgacagacctccggacaggaggtgcattccccagtcttggccccctgatggcgatgtggattgtactgacggccacgatgagattcagaattgcaccaggagaacttgctctgaaaatgaattcacctgtggttacggactgtgtatcccaaagatattcaggtgtgaccggcacaatgactgtggtgactatagcgacgagaggggctgcttataccagacttgccaacagaatcagtttacctgtcagaacgggcgctgcattagtaaaaccttcgtctgtgatgaggataatgactgtggagacggatctgatgagctgatgcacctgtgccacaccccagaacccacgtgtccacctcacgagttcaagtgtgacaatgggcgctgcatcgagatgatgaaactctgcaaccacctagatgactgtttggacaacagcgatgagaaaggctgtggcattaatgaatgccatgacccttcaatcagtggctgcgatcacaactgcacagacaccttaaccagtttctattgttcctgtcgtcctggttacaagctcatgtctgacaagcggacttgtgttgatattgatgaatgcacagagatgccttttgtctgtagccagaagtgtgagaatgtaataggctcctacatctgtaagtgtgccccaggctacctccgagaaccagatggaaagacctgccggcaaaacagtaacatcgaaccctatctcatttttagcaaccgttactatttgcgaaatttaactatagatggctatttttactccctcatcttggaaggactggacaatgttgtggcattagattttgaccgagtagagaagagattgtattggattgatacacagaggcaagtcattgagagaatgtttctgaataagacaaacaaggagacaatcataaaccacagactaccagctgcagaaagtctggctgtagactgggtttccagaaagctctactggttggatgcccgcctggatggcctctttgtctctgacctcaatggtggacaccgccgcatgctggcccagcactgtgtggatgccaacaacaccttctgctttgataatcccagaggacttgcccttcaccctcaatatgggtacctctactgggcagactggggtcaccgcgcatacattgggagagtaggcatggatggaaccaacaagtctgtgataatctccaccaagttagagtggcctaatggcatcaccattgattacaccaatgatctactctactgggcagatgcccacctgggttacatagagtactctgatttggagggccaccatcgacacacggtgtatgatggggcactgcctcaccctttcgctattaccatttttgaagacactatttattggacagattggaatacaaggacagtggaaaagggaaacaaatatgatggatcaaatagacagacactggtgaacacaacccacagaccatttgacatccatgtgtaccatccatataggcagcccattgtgagcaatccctgtggtaccaacaatggtggctgttctcatctctgcctcatcaagccaggaggaaaagggttcacttgcgagtgtccagatgacttccgcacccttcaactgagtggcagcacctactgcatgcccatgtgctccagcacccagttcctgtgcgctaacaatgaaaagtgcattcctatctggtggaaatgtgatggacagaaagactgctcagatggctctgatgaactggccctttgcccgcagcgcttctgccgactgggacagttccagtgcagtgacggcaactgcaccagcccgcagactttatgcaatgctcaccaaaattgccctgatgggtctgatgaagaccgtcttctttgtgagaatcaccactgtgactccaatgaatggcagtgcgccaacaaacgttgcatcccagaatcctggcagtgtgacagttttaacgactgtgaggataactcagatgaagacagttcccactgtgccagcaggacctgccggccgggccagtttcggtgtgctaatggccgctgcatcccgcaggcctggaagtgtgatgtggataatgattgtggagaccactcggatgagcccattgaagaatgcatgagctctgcccatctctgtgacaacttcacagaattcagctgcaaaacaaattaccgctgcatcccaaagtgggccgtgtgcaatggtgtagatgactgcagggacaacagtgatgagcaaggctgtgaggagaggacatgccatcctgtgggggatttccgctgtaaaaatcaccactgcatccctcttcgttggaagtgtgatgggcaaaatgactgtggagataactcagatgaggaaaactgcgctccccgggagtgcacagagagcgagtttcgatgtgtcaatcagcagtgcattccctcgcgatggatctgtgaccattacaacgacttgtggggggacaactcagatgaacgggactgtgagatgaggacctgccatcctgaatattttcagtgtacaagtggacatcgtgtacacagtgaactgaaatgcgatggatccgctgactgtttggatgcgtctgatgaagctgattgtcccacacgctttcctgatggtgcatactgccaggctactatgttcgaatgcaaaaaccatgtttgtatcccgccatattggaaatgtgatggcgatgatgactgtggcgatggttcagatgaagaacttcacctgtgcttggatgttccctgtaattcaccaaaccgtttccggtgtgacaacaatcgctgcatttatagtcatgaggtgtgcaatggtgtggatgactgtggagatggaactgatgagacagaggagcactgtagaaaaccgacccctaaaccttgtacagaatatgaatataagtgtggcaatgggcattgcattccacatgacaatgtgtgtgatgatgccgatgactgtggtgactggtccgatgaactgggttgcaataaaggaaaagaaagaacatgtgctgaaaatatatgcgagcaaaattgtacccaattaaatgaaggaggatttatctgctcctgtacagctgggttcgaaaccaatgtttttgacagaacctcctgtctagatatcaatgaatgtgaacaatttgggacttgtccccagcactgcagaaataccaaaggaagttatgagtgtgtctgtgctgatggcttcacgtctatgagtgaccgccctggaaaacgatgtgcagctgagggtagctctcctttgttgctactgcctgacaatgtccgaattcgaaaatataatctctcatctgagaggttctcagagtatcttcaagatgaggaatatatccaagctgttgattatgattgggatcccgaggacataggcctcagtgttgtgtattacactgtgcgaggggagggctctaggtttggtgctatcaaacgtgcctacatccccaactttgaatccggccgcaataatcttgtgcaggaagttgacctgaaactgaaatacgtaatgcagccagatggaatagcagtggactgggttggaaggcatatttactggtcagatgtcaagaataaacgcattgaggtggctaaacttgatggaaggtacagaaagtggctgatttccactgacctggaccaaccagctgctattgctgtgaatcccaaactagggcttatgttctggactgactggggaaaggaacctaaactcgagtctgcctggatgaatggagaggaccccaacatcctggttttcgaggaccttggttggccaactggcctttctatcgattatttgaacaatgaccgaatctactggagtgacttcaaggaggacgttattgaaaccataaaatatgatgggactgataggagagtcattgcaaaggaagcaatgaacccttacagcctggacatctttgaagaccagttatactggatatctaaggaaaagggagaagtatggaaacaaaataaatttgggcaaggaaagaaagagaaaacgctggtagtgaacccttggctcactcaagttcgaatctttcatcaactcagatacaataagtcagtgcccaacctttgcaaacagatctgcagccacctctgccttctgagacctggaggatacagctgtgcctgtccccaaggctccagctttatagaggggagcaccactgagtgtgatgcagccatcgaactgcctatcaacctgccccccccatgcaggtgcatgcacggaggaaattgctattttgatgagactgacctccccaaatgcaagtgtcctagcggctacaccggaaaatattgtgaaatggcgttttcaaaaggcatctctccaggaacaaccgcagtagctgtgctgttgacaatcctcttgatcgtcgtaattggagctctggcaattgcaggattcttccactatagaaggaccggctcccttttgcctgctctgcccaagctgccaagcttaagcagtctcgtcaagccctctgaaaatgggaatggggtgaccttcagatcaggggcagatcttaacatggatattggagtgtctggttttggacctgagactgctattgacaggtcaatggcaatgagtgaagactttgtcatggaaatggggaagcagcccataatatttgaaaacccaatgtactcagccagagacagtgctgtcaaagtggttcagccaatccaggtgactgtatctgaaaatgtggataataagaattatggaagtcccataaacccttctgaggatagttccagagacaaacccaacttcaccagctgctgatggacctcaggtgccaaaatgggaatctcttcaaacgaaaatctaaacaaactgaccaactttggaaaatccattctatggcacagatgggagaacgagtcaaaagggaaagtgttgctggcgacaccaccctccatcaaccttcgctccctgctaagccctaagcctccttcgagaagagacccaaactccaacctattctgcaacagaagacacttttaaagacaccgcaaatcttgttaaagaagactctgaagtatagctataccagctatttagggaataattagaaacacacttttgcacatatattttttacaaacagatgaaaaaagttaacattcagtactttatgaaaaaaatatatttttccctgtttgcctatagttggaggtatcctgtgtgtcttttttttacttatgccgtctcatatttttacaaataattatcacaatgtactatatgtatatctttgcactgaagttgtctgaaggtaatactataaatatattgtatatttgtaaattttggaaagattatcctgttactgaatttgctaataaagctgtctgctgatttggttggtgatcattatagtaaatgatccaacaagaaaaggaattgactggggacctttagccgtgtctaaagaagaggcaccactcatatttcctataaaattatctaggaaaggaatccaggccccgctcttgggtccatttttacacattagcacttaattaatgttcaatattacatgtccaatttgattaatggctatgttgataggggccactatgtgttgtataggacatctgggacttgactgtaggactcctcagataatacagaggtagggaaaaggcatttcagtttgggcccttctgtgtgtta

SEQ ID NO: 153893 - DNA, 380 bp, Homo sapiens
ccgattcgccgtgtggcgggtacgatttccgccttttgactctggcctctaggccctgagccccgggcgggctgcatttgtcggggaaacctttcctcgaccaggggcacctctactcgaccaggggcgacggcggactttgggcttcatcatggaggactacctgcagggttgtcgagctgctctgcaggagtcccgacctctacatgttgtgctgggaaatgaaacctgtgatttggactacccaggggctgctcttgccctggctttttacctagcaaaggaaccatcatcctggactgtgtcaacaaggaccttaaaaatggaaaggcaaccccaaaggacagtaaatatgtggagaaactaaaagcccttttttc

SEQ ID NO: 153894 - DNA, 490 bp, Homo sapiens
acctacccaagagaaatgatatatttgattccctacaaaaggcaaagtttgatgtatcaggactgaccactgagcagatgctgagaaaagaccagaagactatctatagacaaggcgtcaaggtggccattagtgcaatatatatggatttggagatctgtgaagtcctggaacgctcccactctccacccctgaagctgacccctgcctcaagtacccaccctaacctccatgcctatcttcaaggcaacacccaggtctctcgaaagaaacttctgcccctgctccaggaagccctgtcagcatattttgactccatgaagatcccttcaggacagcctgagacagcagatgtgtccagggagcaagtggacaaggaattggacagggcaagtaactccctgatttctggactgagtcaagatgaggaggaccctccgccaaagtgacgaattcggcacgaggaccattctgatgttggagcggccgc

SEQ ID NO: 153895 - DNA, 428 bp, Homo sapiens
tatgattacattttcaattatctcccccattcattgccccaaagagaggctgtttttccttccttgacccatctggctgtccttgccttcttggtcttgggaccctggcctaccctgtttgacccctagtctctcatctgctttctaggactgaccactgagcagatgctgagaaaagaccagaagactatctatagacaaggcgtcaaggtggccattagtgcaatatatatggatttggaggcctttctgcagaggtctaacctccttgcagatctccatgctttctgccaggctcacagctaatgatgtcctggttgccatgactatctttttcaacactcacaatgagccagtgcggcagttggctattttctgtccccatgtggcactccaaacaacgatctgtgaagtcctggaacgctccc

SEQ ID NO: 153896 - DNA, 586 bp, Homo sapiens
  misc_feature (1)...(586): n = a,t,c or g
ccccacgcgtccggcagttcctcccggtgtcggaggccgattcgccgtgtggcgggttcgagtcccgcctcctgactctggcctctagtccctgagtcccgggcgggctgcattcgtcggggaaacctctcctcgaccaggggcagcttctactcgaccaggggcggtcggcgtacttttgggcttcatcatggaggacttacctgcagggttgtgcgagcctgctctgcaggnagatcccgaccctctacactgttgtgcttgggaaatgaagccatgtgattttggactccacaagtgtgctgctcttgccgctggcgtgttttacctatgcaaagaagtgacacacgccctagaggaggcagttagcagaggtgctagaccatcgacccatcgagccgaaacactgccctccctgccatgtttcagttgagctggtggggtcctgtgctaccctggtgaccgagagaatcctgcagggggcaccagagatcttggacaggcaaactgcagcccttctgatggaaccatcatcctggactgtgtcaacatggacctttaaattgggatggcaacccccaaggat

SEQ ID NO: 153897 - DNA, 2219 bp, Homo sapiens
cgggcgggctgcattcgtcggggaaacctctcctcgaccaggggcacctctactcgaccaggggcgacggcgtactttgggcttcatcatggaggactacctgcagggttgtcgagctgctctgcaggagtcccgacctctacatgttgtgctgggaaatgaagcctgtgatttggactccacagtgtctgctcttgccctggctttttacctagcaaagacaactgaggctgaggaagtctttgtgccagttttaaatataaaacgttctgaactacctctgcgaggtgacattgtcttctttcttcagaaggttcatattccagagagtatcttgatttttcgggatgagattgacctccatgcattataccagggctggccaactcaccctcatccttgtcgaccatcatatcttatccaaaagtgacacagccctaggaggagggcagtagcagaggtgctaggaccatcgacccatcgagccgaaacactgccctccctggccatgtttcagttgagctggtgggggtcctgtgctaccctggtgaccgagagaattcctgcaggggggcaccagagatcttggacaggcaaactgcagcccttctgcatggaaccatcatcctggactgtgtcaacatggaccttaaaattggaaaggcaaccccaaaggacagcaaatatgtggagaaactagaggcccttttcccagacctacccaagagaaatgatatatttgattcccttacaaaaggcaaagtttgatgtatcaggactgaccactgagcagatgctgagaaaagaccagaagactatctatagacaaggcgtcaaggtggccattagtgcaatatatatggatttggaggcctttctgcagaggtctaacctccttgcagatctccatgctttctgccaggctcacagctatgatgtcctggttgccatgactatctttttcaacactcacaatgagccagtgcggcagttggctattttctgtccccatgtggcactccaaacaacgatctgtgaagtcctggaacgctcccactctccacccctgaagctgacccctgcctcaagtacccaccctaacctccatgcctatcttcaaggcaacacccaggtctctcgaaagaaacttctgcccctgctccaggaagccctgtcagcatattttgactccatgaagatcccttcaggacagcctgagaccagcagatgtgtcccagggagcaagtggacaaggaattggacagggcaagtaactccctgatttctggactgagtcaagatgaggaggaccctccgctgcccccgacgcccatgaacagcttggtggatgagtgccctctagatcaggggctgcctaaactctctgctgaggccgtcttcgagaagtgcagtcagatctcactgtcacagtctaccacagcctccctgtccaagaagtgactgttgagaggcgaggaggtagtgggtgaggctacctgactcacttcaaatgcatgttttgagatgtttggagattcagcaattctgtcttcattgctccaggatctggtatactgttctcataaaactgagaggagaaaaaaagtgaaagaaagcagctgctttaagaatggttttccaccttttccccctaatctctaccaatcagacacattttattatttaaatctgcacctctctctattttatttgccaggggcacgatgtgacatatctgcagtcccagcacagtgggacaaaaagaatttagaccccaaaagtgtcctcggcatggatcttgaacagaacacattatctgtcatggaactgaacattcatcgatggtctccatgtattcatttattcacttgttcattcaagtatttattgaatacctgcctcaagctagagagaaaagagagtgcgctttggaaatttattccagatttcagcctacagcagattatcagctcggtgacttttctttctgccaccatttaggtgatggcgattgattcaaaaatgggtgaatttctatttcttagcttattgtggactgtttcagatctagtttggggaacagattaggaggccattgtcttcttgtcctgatcaggtggcccgggctgatttcttttggatccctctgttcccagagccacccagaaccctgactcttgagaatcaagaaaacacccagaaaggccttaaatgacctc

SEQ ID NO: 153898 - DNA, 475 bp, Homo sapiens
gtggcaggatttttattgccaataacatatttttggggctgccttttttacacatccagatggtccctctaactgggctttctctaattttgtgatgttctgtcattgtctcccaaagtgctgggattacaggggtgagtccccgcgcccggctcattttaaaatttttgtagatcagtgtactgttgtaaaaaaaaaaaaaataagaaaaataaaaaataaatttttgtagtgataggatcccactgaggccagagaatggggtctggagacaaaggagcattcacttcagcctctgactggtggcaggccaagtctttatttacatagggtgtaaccaaataggaaacctctaaaggggtacttaaaccccagattttctacacagggcacttgcttgagcctcatcccgctttctggaatgtacttttgcttcaataaatctgtgcttttgttccttcaaaaaaaaaaaaaa

SEQ ID NO: 153899 - DNA, 6844 bp, Homo sapiens
cggccccagaaaacccgagcgagtagggggcggcgcgcaggagggaggagaactgggggcgcgggaggctggtgggtgtcgggggtggagatgtagaagatgtgacgccgcggcccggcgggtgccagattagcggacggctgcccgcggttgcaacgggatcccgggcgctgcagcttgggaggcggctctccccaggcggcgtccgcggagacacccatccgtgaaccccaggtcccgggccgccggctcgccgcgcaccaggggccggcggacagaagagcggccgagcggctcgaggctgggggaccgcgggcgcggccgcgcgctgccgggcgggaggctggggggccggggccggggccgtgccccggagcgggtcggaggccggggccggggccgggggacggcggctccccgcgcggctccagcggctcggggatcccggccgggccccgcagggaccatggcagccgggagcatcaccacgctgcccgccttgcccgaggatggcggcagcggcgccttcccgcccggccacttcaaggaccccaagcggctgtactgcaaaaacgggggcttcttcctgcgcatccaccccgacggccgagttgacggggtccgggagaagagcgaccctcacatcaagctacaacttcaagcagaagagagaggagttgtgtctatcaaaggagttgtgtgcttaaccgttacctggctatgaaaggaagatggaagattactggcttctaaatgtgttacggatgagtgtttcttttttgaacgattggaatctaataactacaatacttaccggtcaaggaaatacaccagttggtatgtggcattgaaacgaactgggcagtataaacttggatccaaaacaggacctgggcagaaagctatactttttcttccaatgtctggctaagagctgattttaatgggccacatctaatctcatttcacatgaaagaagaagtatattttagaaatttgttaatgagagtaaaagacaataaatgtgtatagctcagtttggataattggtcaaacaattttttatccagtagtaaaatatgtaaccattgtcccagtaaagaaaaataacaaaagttgtaaaatgtatattctcccttttatattgcatctgctgttacccagtgaagcttacctagagcaatgatctttttcacgcatttgctttattcgaaaagaggcttttaaaatgtgtattgtttagaaacaaaatttcttctatggaaatcatcatatacattagaaaatcacagtcgagatgtttaatcaactccaaaatgtccactatttcttatgtcattcgttagtctacatgtttctaaacatataaatgtgaatttaatcaattcctttcatagttttataattctctggcagttccttatgatagaggttataaaacaagccctgtgtaaaactgctggaaagtcttccacagtcaggtcaattttggtcaaaccctttctctgtacccatacagcatcagccttagcaactctgctggtgatgggagttgtattttccagtcttcgccaggacattgaagatccatccactcacatcttaagcattcttcctggcaaaaatttatggtgaatgaatatggctttaggcggcagatgatatacatatctgacttcccaaaagctacaggaaattgtgtgctgttgccgaatactcaggacggacctgaattctgattttataccagtctcttcaaaaccttctcgaaccgctgtgtctcctacgtaaaaaaagagatgtacaaatcaataataattacacttttagaaactgtatcatcaaagattttcagttaaagtagcattatgtaaaggctcaaaacattaccctaacaaagtaaagttttcaatacaaattctttgccttgtggatatcaagaaatcccaaaatattttcttaccactgtaaattcaagaagcttttgaaatgctgaatatttctttggctgctacttggaggcttatctacctgtacatttttggggtcagctctttttaacttcttgctgctgtttttcccaaaaggtaaaaatatagattgaaaagttaaaacattttgcatggctgcagttcctttgtttcttgagataagattccaaagaacttagatttatttcttcaacaccgaaatgctggaggtgtttgatcagttttcaagaaacttggaatataaataattttataattcaacaaaggttttcacattttataaggttgatttttcaattaaatgcaaatttatgtggcaggatttttattgccattaacatatttttgtggctgctttttctacacatccagatggtccctctaactgggctttctctaattttgtgatgttctgtcattgtctcccaaagtatttaggagaagccctttaaaaagctgccttcctctaccactttgctggaaagcttcacaattgtcacagacaaagatttttgttccaatactcgttttgcctctatttttcttgtttgtcaaatagtaaatgatatttgcccttgcagtaattctactggtgaaaaacatgcaaagaagaggaagtcacagaaacatgtctcaattcccatgtgctgtgactgtagactgtcttaccatagactgtcttacccatcccctggatatgctcttgttttttccctctaatagctatggaaagatgcatagaaagagtataatgttttaaaacataaggcattcatctgccatttttcaaattacatggtgagcttcccttccaattgagatttgcccataggttaaacatggttagaaacaactgaaagcataaaagaaaaatctaggccgggtgcagtggctcatgcccatattccctgcactttgggaggccaaagcaggaggatcgcttgagcccaggagttcaagaccaacctggtgaaaccccgtctctacaaaaaaacacaaaaaatagccaggcatggtggcgtgtacatgtggtctcagatacttgggaggctgaggtgggagggttgatcacttgaggctgagaggtcaaggttacagtgagccataatcgtgccactgcagtccagcctaggcaacagagtgagactttgtctcaagaaaaagagaaattttccttaataagaaaagtaatttttactctgatgtgcaatacatttgttattaaatttattatttaagatggtagcactagtcttaaattgtataaaatatcccctaacatgtttaaatgtccatttttattcattatgctttgaaaaataattatggggaaatacatgtttgttattaaatttattattaaagatagtagcactagtcttaaatttgatataacatctcctaacttgtttaaatgtccatttttattctttatgtttgaaaataaattatggggatcctatttagctcttagtaccactaatcaaaagttccggcatgtagctcatgatctatgctgtttctatgtcgtggaagcaccggatgggggtagtgagcaaatctgccctgctcagcagtcaccatagcagctgactgaaaatcagcactgcctgagtagttttggatcagtttaactggaatcccctaactgactgaaaattgaatggccaaataagtgcttttgtcccccagagtatgcgggagacccttccaacctcaagatggatatttcttccgcaaggatttccaagatgaattgaaatttttaatcaagatagtgtgctttattctgttgtattttttattattttaatatactgtaagccaaactgaaataacatttgctgttttataggtttgaagaacataggaaaaactaagaggttttgtttttatttttgctgatgaagagatatgtttaaatactgttgtattgttttgtttagttacaggacaataatgaaatggagtttatatttgttatttctattttgttatatttaataatagaattagattgaaataaaatataatgggaaataatctgcagaatgtgggtttcctggtgtttcctctgactctagtgcactgatgatctctgataaggctcagctgctttatagttctctggctaatgcagcagatactcttcctgccagtggtaatacgattttttaagaaggcagtttgtcaattttaatcttgtggatacctttatactcttagggtattattttatacaaaagccttgaggattgcattctattttctatatgaccctcttgatatttaaaaaacactatggataacaattcttcatttacctagtattatgaaagaatgaaggagttcaaacaaatgtgtttcccagttaactagggtttactgtttgagccaatataaatgtttaactgtttgtgatggcagtattcctaaagtacattgcatgttttcctaaatacagagtttaaataatttcagtaattcttagatgattcagcttcatcattaagaatatcttttgttttatggttgagttagaaatgccttcatatagacatagtctttcagacctctactgtcagttttcatttctagctgctttcagggttttatgaattttcaggcaaagctttaatttatactaagcttagggaagtatggctaatgccaacggcagtttttttcttcttaattccacatgactgaggcatatatgatctctgggtaggtgagttgttgtgacaaccacaagcactttttttttttttaaagaaaaaaaggtagtgaatttttaatcatctggactttaagaaggattctggagtatacttaggcctgaaattatatatatttggcttggaaatgtgtttttcttcaattacatctacaagtaagtacagctgaaattcagaggacccataagagttcacatgaaaaaaatcaattcatttgaaaaggcaagatgcaggagagaggaagccttgcaaacctgcagactgctttttgcccaatatagattgggtaaggctgcaaaacataagcttaattagctcacatgctctgctctcacgtggcaccagtggatagtgtgagagaattaggctgtagaacaaatggccttctctttcagcattcacaccactacaaaatcatcttttatatcaacagaagaataagcataaactaagcaaaaggtcaataagtacctgaaaccaagattggctagagatatatcttaatgcaatccattttctgatggattgttaccgagttggctatataatgtatgtatgggtattttgatttgtgtaaaagttttaaaaatcaagctttaaggtacatgggacatttttaaataaaatattttaaagacattttaggaaaattgccttaaatatcattggttggccaaaatagaataggggacatgcatattaagggaaaaggtcatggagaaataatattggtatcaaacaaatacattgatttgtcatgatacacactgaatttgatccaatagtttaaggaataggtaggaaaatttggtttctatttttcgatttcctgtaaatcagtgacataaataattcttagcttattttatatttccttgtcttaaatactgagctcagtaagttgtgttaggggattatttctcagttgagactttcttatatgacattttacgtatgttttgacttcctgactattaaaaataaatagtagatacaattttcataaagtgaagaattatataatcactgctttataactgactttattatatttatttcaaagttcatttaaaggctactattcatcctctgtgatggaatggtcaggaatttgttttctcatagtttaattccaacaacaatattagtccgtatccaaaataacctttaaatggctaaactttactggatgtatatccaaagcttctcattctcagacagattaatccagaagcagtcataaacagaagaataggtggtatgttcctaatgatattatttctactaatggaataaactggtaatattagaaattatgctgctaattatatcagctctgagggtaatttctgaaatgttcggactccagtcggaaccaaattggaaaatttaaatttttattcttagctataaagcaagaaagtaaacacattaatttcctcaacatttttaagccaattaaaaatataaaagatacacaccaatatctttcttcaggctctgacaggcctcctggaaacttccacatatttttcaacgccagtataaagtcagaaaataaagttaacataactttcactaacacacacatatgtagatttcacaaaatccacctataattggtcaaagtggttgagaatatattttttagtaattgcatgcaaaatttttctagcttcccatcccttctcccctcgtttccttctttttttgggggggagctggtaactgatggaaaatcttttccccaccttttctcttcaggaaatataagtggttttgtttggttaacgtgataccattctgtatggaatgaaacattggaggggaaacatctacttgaattttcttgtaattctaaaatattttgctgctagttaactatgaacagatagaagaatcttacagatgctgctataaataagtagaaaatataaatttcatcactaaaatatgctattttaaaatctatttcctatattgtatttctaatcagatgtattactctttattatttctattgtatgtgttaatgattttatgtaaaaatgtaattgcgttttcatgagtagtatgaataaaattgattagtttgtgttttcttgtcaaaaaaaa

SEQ ID NO: 153900 - DNA, 2607 bp, Homo sapiens
atggcgacattcatctcggtgcagctgaaaaagacctcagaggtggacctggccaagccgctggtgaagttcatccagcagacttacccaagcggcggggaagagcaggcccagtactgccgcgcggcggaggagctcagcaagctgcgccgcgccgcagtcggtcgtccgctggacaagcacgagggcgcgctcgagacgctcctgagatattatgatcagatttgttctattgaacccaaattcccattttctgaaaatcagatctgcttgacatttacctggaaggatgctttcgataaaggttcactttttggaggctctgtaaaactggctcttgcaagcttaggatatgaaaagagctgtgtgttgttcaattgtgcagccttagctagccaaattgcagcagaacagaacctggataatgatgaaggattgaaaatcgctgctaaacattaccagtttgctagtggtgcctttttacatattaaagagacggttttatctgccttaagtcgagagccgaccgtggacatatctccagatactgttgggaccctcagtcttattatgctggcacaggctcaagaagtattttttttaaaagccacaagagataaaatgaaagatgccatcatagctaaattggctaatcaggctgcagattattttggtgatgctttcaaacagtgtcaatacaaagatactctccccaaggaggtgttccctgtcttggctgcaaagcactgtatcatgcaggccaatgctgagtaccatcagtctatcctggcaaaacagcagaagaaatttggagaagaaattgcaaggttacagcatgcagcagaactgattaaaacagtggcatctcgctatgatgaatatgttaatgtgaaggatttttctgacaaaatcaatcgtgcccttactgcagcaaagaaggataatgacttcatttatcatgatcgagttccagaccttaaagatctagatcctattggcaaagccacacttgtgaaatctaccccggtcaatgtacccatcagtcagaaatttactgatctgtttgagaagatggttcccgtgtcagtacagcagtctttggctgcctataatcagaggaaagccgatttggttaacagatcaattgctcagatgagagaagccaccactttggcaaatggggtgctagcttcccttaatcttccagcagcaattgaagatgtgtctggagacactgtacctcagtctatattgactaaatccagatctgtgattgaacagggaggcatccagactgttgatcagttgattaaagaactgcctgaattactgcaacgaaatagagaaatcctagatgagtcattaaggttgttggatgaagaagaagcaaccgataatgatttaagagcaaaatttaaggaacgttggcaaaggacaccatccaatgaactgtataagcctttaagagcagagggaaccaacttcagaacagttttagataaagctgtgcaggcagatggacaagtgaaagaatgttaccagtctcatcgtgacaccatcgtgcttttgtgtaagccagagcctgagctgaatgctgccatcccttctgctaatccagcaaagaccatgcagggcagtgaggttgtaaatgtcttaaaatccttattgtcaaatcttgatgaagtaaagaaggaaagagagggtctggagaatgacttgaaatctgtgaattttgacatgacaagcaagtttttgacagccctggctcaagatggtgtgataaatgaagaagctctttctgttactgaactagatcgagtctatggaggtcttacaactaaagtccaagaatctctaaagaaacaggaggggcttcttaaaaatattcaggtctcacatcaggaattttcgaaaatgaaacaatctaataatgaagctaacttaagagaagaagttttgaagaatttagctactgcatatgacaactttgttgaacttgtagctaatttgaaggaaggcacaaagttttacaatgagttgactgaaatcctggtcaggttccagaacaaatgcagtgatatagtttttgcacggaagacagaaagagatgaactcttaaaggacttgcaacaaagcattgccagagaacctagtgctccttcaattcctacacctgcgtatcagtccttaccagcaggaggacatgcaccaactcctccaactccagcgccaagaaccatgccgcctactaagccccagcccccagccaggcctccaccacctgtgcttccagcaaatcgagctccttctgctactgctccatctccagtgggggctgggactgctgcgccagctccatcacaaacgcctggctcagctcctcctccacaggcgcagggaccaccctatcccacctatccaggatatcctgggtattgccaaatgcccatgcccatgggctataatccttatgcgtatggccagtataatatgccatatccaccagtgtatcaccagagtcctggacaggctccatacccgggaccccagcagccttcataccccttccctcagcccccacagcagtcttactatccacagcagtaa

SEQ ID NO: 153901 - DNA, 1606 bp, Homo sapiens
  misc_feature (1)...(1606): n = a,t,c or g
attatgggttgcactttcttaaaggttaatctctgtggtaatttcttaattttaaaaatccaaacatttgactaccttttaagatgtgctctaaattttacttagtaagtacatgttgtctgccaaatattagaactttataagttgtaaatttatgtatatcacagtgaatattgaatattnnnnnnnnnnnnnnnnnnnngatgactagttttgccacgttaaaatgaagggtctccattttttttctttctttaatactcgaatatttattcttattttcttcagtatttatttttggatagtattaaacacttggtactcttttgttttaattaataacaggataggaatgcttttctctgacaagtgccttgaaacagtttttttcactccactgttctttaatagactaaaaaatagaaatgactttcatgaaaaacgtagttctagaatgattattgttttattttttagtatttgatttaccaatcaagattttttctgttttcttctatcaggtattgccaaatgcccatgcccatgggctatgtaatccttatgcgtatggccagtataatatgccatatccaccagtgtatcaccagagtcctggacaggctccatacccggggacccagcagccttcataccccttcccctcagcccccacagcagtcttactatccacagcagtaatatgtctgctcagcagctcagctgattcagatcagagggaaagaaataccaaccctgcaataagtgtacctaaactctacgcctctggttaatgtaatgtactctcctggactggaatgccagtgtataatttctgtcttaccagctaggaagctgtggccccagttccacatttggattacacatgtgagatttgctgctgttgcagtgataaacactaaggtataataggatttgaaattggcattacagttccataaaaattgaaaatggagaaatttaaacctggcaagtggaaacatttggaaaacgattatactttctacataagacatggttgggacgatcgagatacttacaaaagatgggttaagtatgggatactagagaaaattaagttttctttctctttggtttattgatttggtttaatttccattatgctatttttgcataatcaaggcactgtaaatcttataattttaaaataaattacttaagaacagttgtcattgttatgttttgttattgattctcattactgtctaattttttttctggtattagtctcattttgtatgtatataagttaaacagatactgtttttaagtgcatgaatagtacaagttattatcaaggatgttttacagggaaatcaaaagaatattatcatactttatctttcgtatgctgattagtaaacgatttttgacatttattttagaaagtcctataatgtggaagaaacaaacagttgctaccaaagattcttcaaataaacatacaaataaatgtgtatatttaatgttttattgttagcttctccagaaaattgatgcaaattctggtaataattcttgcattttttccccataacctggttaaaataaatacgccattggcaat

SEQ ID NO: 153902 - DNA, 429 bp, Homo sapiens
acagaggacacatcagctgacacgtttcttcccgcctcagggagttcctctttaaacacccgaagcgcacggccaccctcagcatgaggaacacgagcgtcatgaagaaagggggcatattctctgcagaatttctgaaagttttccttccatctctgctgctctctcatttgctggccatcggattggggtaggtgatgtgactgtgtgactcctgtcatggcatgtcgtggggcgattctgggttgcagtgatttattcgtaacctgtttcctgaagtccagatcatcagttacagcttggtgcattttcacaaacacccacgtagtcactgttcaggtccagaaaccaccagcctgcagcccccaaaggccccagcacattctcccatgtcccgtccggccagggaaggcgtaatcatggtcaagc

SEQ ID NO: 153903 - DNA, 1939 bp, Homo sapiens
  misc_feature (1)...(1939): n = a,t,c or g
ggctccgctcagtccgggagcgcagctgggccgcggcgctccgacctccgctttcccaccgcccgcagctgaagcacatcccgcagcccggcgcggactccgatcgccgcagttgccctctggcgccatgtcgcaaaacggagcgcccgggatgcaggaggagagcctgcagggctcctgggtagaactgcacttcagcaataatgggaacgggggcagcgttccagcctcggtttctatttataatggagacatggaaaaaatactgctggacgcacagcatgagtctggacggagtagctccaagagcttctcactgtgacagcccaccttgcttcgcagacaccacaagataccaacagagctttttgaaacagatacccataggcattgggagagaaaaacagctcacagttttgagggaagatgatattgaaagaaggaaagaagttgaaagcatcttgaggaaaaactcagattggatatgggattggtcaagttcggccggaaaaatattccccccaaaggagttcctctttaaaacacccggaagccgcacggccaccctcagcatgaggaaacacgagcgttctgaagaaagggggcatattctctgcagaattttctgaaagttttccttccattctctgctgccctctcaattgcgtggcccatcggattggggatctatattgggaaggcgtccgaccaaccttccaccagcacctttggatggaaggaacctgggagtcttgacttggttcgttagttggatttacttcttgagcttgcaaccatagcttcactggaaggagctgttagatccctgggggtggccaccgtcacttgtgtttatttgttctgttaaatgctgcgttcctaatttagtaaaataaaagaatagacactaaaatcatgttgatctataattacacctatgggattcaataagcatgtcagactggattaatgtctactgtgaaaatttgggtagtaaatttttcatttgaaattagaaataaaatatctgaatataaataattttaatatactagtccatgatgtgtgttgtattttaaaaattatctgcaaccttaattcaggctgaagtactttatatttcaaaagaatgaataaccattgataataaaatcgctacctttaaagggggttggtcccaaaataaatattgggggccttatatatccacacctattggtagaaaaggtattatttaaatttaaaagggatgccaggttgtcctacctaaagaaagatttatatataactatgcctaattgttccataatcaacagaaacccaagatagagcctacaaactcagcctgtacagttccgtacactaaactcttccttgcttttgcattataaggaattaagtctccgattattaggtgatcaccctggatgatcagttttcctgctgaaggcacctactcgagtatcttttcctctttatcactctgcattggtgaatttaatcctctcctttgtggttccacttttgtgtgcctttaaaatcagctttattctaagcaaatctgtgtctactttaaaaaactggaaatggaaaaaaaaataaatctttgccaaatccttcaggnnnnnnnnnnnnnnggggcggccgctttaaaggatccctgggggggcccaaatttaacccgggcttgcaacgtaaaaacttttttccttatagggggccgaataaaaagctacctgggaatttttgggaaagaacccttcttttgggggggggacatattgggccaacctccttacagaaattaaaggctttagggaaaatataaacttttaaagggaaaagggggtaaaacaacctgcataggctggctgctggaaagtttggcttacggagtttgatttaggaaaattttatccccgggggcttgggtttaact

SEQ ID NO: 153904 - DNA, 4222 bp, Homo sapiens
atgttaaatattgttcaagattcagcacttttggaagccattggttgccagatggagatgggtggtggagaaaataacctgaagagtcatagtcgcaccaatagtggtattagttcagcaagtggtggaagcacggagcccacgactcccgatagtgagagacctgctcaagctctcttaagagattatgctcttaatacagattcagctgctgggctcctgattcgcagcattcatctcgtcacccaaagactcaactcccagtggcgccaagacatgagcatatcactggcagctctagagctcctctctggccttgcaaaggtaaaagtgatggttgactcaggagaccggaagcgagccatcagttctgtgtgcacctacattgtttatcagtgtagtcggccagctcctttacactccagggatctgcactccatgatagtggcagcttttcagtgtctctgtgtctggctgacagagcaccctgatatgcttgatgaaaaggactgccttaaggaagtactggagattgtggaactgggtatctcaggaagtaagtccaagaacaatgagcaagaggtcaagtacaaaggagataaggagccaaaccctgcatctatgagggtaaaggatgctgctgaagccaccctaacatgtcttgtgaatgagaccactttgattaaatactccaggctgccaaccataaacaagcatagtttccggtactttgtcttggataacagtgtcatcctggcaatgctggaacaacctcttggaaatgagcagattataagccatctcacaatatgtgattatcactgcgacccaaactatccacaagtacattttttttttctgatggtaattggcatcagccagtatgtaaaagaagcatgttctcagacccttattgctgggaaggggaaggaaagtgaaggttacagaatctgtgggtataaactttttgtacctgaacctcgcccagttcctaaaaatgacgttggatttaaatattctgtgaaacatcggccatttcctgaagaggtggacaagattccttttgtgaaagcagatctcagcattccagatttgcatgaaatagtcactgaagaattagaagagagacacgaaaaattaaggagtggcatggcccagcagattgcttatgaaatacaccttgagcaacagagtgaggaggaattgcagaagagaagttttcctgacccagttacggattgcaagcccccgcctcctgcccaggaattccaaacagcccgcctttttctctcacactttggatttttgtccttagaagcactgaaggaacctgcaaatagtcgtctacctcctcaccttattgcacttgattccacgatacctggattttttgatgacattgggtatctggatctcttgccatgtcgtccttttgacacagtttttattttctatatgaagccaggtcagaaaacgaaccaagagattttaaagaatgtggagtcttccagaactgttcagccacatttcctagaatttttgctttcccttggctggtcagtagatgtgggcagacaccctggttggactgggcatgtttctaccagttggtctattaattgttgtgatgatgggtgaaggatctcaacaagaagaagtgatttcctctgaagatattggagctagcattttcaatggacagaagaaggtgctgtattatgctgatgcccttacagaaattgcttttgtggttccttctcctgtggagtccttaactgattcattggaaagtaacatctcggaccaagatagtgattcaaatatggatcttatgccaggaattctgaaacagccatccctgacacttgagcttttccccaatcatacagacaatcttaattcctcacagaggaacgagcatgctttcctatccatttccagaaaacaatggaaatgccttccctgtgagtcctcctggatggcaaagccccctgcccaggcccacacttgcatcctagtgaggaccaaagcaggccctgggccaggggaggcagctgtcctggtggattccaggcagtgggaagcagaggacagggagagatcctcccagcgattgctacgctttacatatggtccttcatttcctgcatttaaagttcccgatgaagatgccagtctgatccctccagaaatggataatgagtgtgttgcacagacatggtttcgctttttacacatgttaaggaacgcgttccctgtggtagatgccgcacttgttctcttgcctgttactgcagccaggctgatgatctttctcttgggattttgtcacattctgtggggactggaggttgccttgctcctctctgtgcccagcactgactgtaatcctgtggatttgagtaacccagctattataagctctactcccaaatttcaggaacagttcttgaatgtgagcggaatgccgcaagaattgaatcagtatccctgccttaaacatctgcctcaaatattttttcgtgccatgcgtggaatcagctgtctggtggatgcattcttaggtatttctagaccccgatcagacagtgctcccccaacacccgtgaatagattaagtatgcctcaaagtgctgctgtcagtaccacccccccacataaccggaggcaccgggctgttactgtgaataaggccaccatgaagacaagcacagtaagagtttacatcaccattgttatgctatataaggttagtactgctcatgcctctaaagttcagcaccagacgtcctccacctctcctctgtcaagtccaaatcagactagttcagaaccccggccactgcctgcccctcggagaccaaaggttaacagcatcttgaatctctttggatcatggttatttgatgcagcatttgttcactgtaaacttcataatgggataaacagagacagcagcatgactgccattacaacacaagctagcatggagtttcgacggaaagggtcacaaatgtccacagacaccatggtttccaatcctatgtttgatgcaagtgaatttcctgataactatgaagcaggaagagctgaggcttgtgggacactgtgtaggattttttgtagcaagaagactggagaagagattctgccagcttatttatccagattttacatgcttttaattcaaggtttgcagataaatgattatgtgtgccatcctgtcttggccagcgttattctaaactctcctcctttgttctgctgtgacttgaaagggattgatgttgtggttccttactttatttcagctcttgaaaccattttgcctgacagagaactctcaaaattcaaaagctatgtaaatccaacagaattgcgaagatcctccattaatatcctgctttctttgttgcccctccctcatcattttggcacagtcaaatctgaggtggtcctggaaggaaagtttagtaacgatgacagctcttcttatgataaaccaataacttttctgtccctgaagttgagacttgtgaatatattaataggtgccttgcaaactgaaacggaccccaacaacacccaaatgatattagaaaactttcccctctcagagctgatgacagagatcagtactggtgtggaaactactgcaaatagtagcacttcactgagatctacaactcttgaaaaagaagttcctgtcatcttcatccaccctttaaacactggattattccggataaaaattcaaggagccactggaaaatttaatatggtcatccctcttgtggatgggatgattgtcagcaggcgagctcttggctttctggtgaggcagactgtaattaacatttgtagaagaaagagactggaaagtgactcctacagtcccccccatgtccgccggaaacagaaaatcaccgacattgtcaacaagtaccggaacaagcagctggagccagagttttatacttcacttttccaggagggcatcttggagccagatgagtgccttcaggcctggatcacacatagtggagtgaatggaccacttgaaacaatcatgagaaccattgtggccatgcctctgccaagagctgctgacgtgtgccctctgaactgtgcctgggagctgcctaccttgcactgtgtgttctgcctgctctgcccacgcacaacaggacctccagctgggcctagtggccagagacgctga

SEQ ID NO: 153905 - DNA, 2759 bp, Homo sapiens
cccacgcgtccgatagtttccggtactttgtcttggataacagtgtcatcctggcaatgctggaacaacctcttggaaatgagcagaatgattttttcccctctgtcactgtgctggtccggggaatgtctggaagacttgcttgggcacaacagctttgtcttttacccagaggagcaaaagcaaatcagaagctttttgtacctgaacctcgcccagttcctaaaaatgacgttggatttaaatattctgtgaaacatcggccatttcctgaagaggtggacaagattccttttgtgaaagcagatctcagcattccagatttgcatgaaatagtcactgaagaattagaagagagacaccgaaaatataaggaagtggcatggcccagcagattgcttatgaaatacaccttgagcaacagagtgaggaggaattgcagaagagaagttttcctgacccagttacggattgcaagcccccgcctcctgcccaggaattccaaacagcccgcctttttctctcacactttggatttttgtccttagaagcactgaaggaacctgcaaatagtcgtctacctcctcaccttattgcacttgattccacgatacctggattttttgatgacattgggtatctggatctcttgccatgtcgtccttttgacacagtttttattttctatatgaagccaggtcagaaaacgaaccaagagattttaaagaatgtggagtcttccagaactgttcagccacatttcctagaatttttgctttcccttggctggtcagtagatgtgggcagacaccctggttggactgggcatgtttctaccagttggtctattaattgttgtgatgatggtgaaggatctcaacaagaagaagtgatttcctctgaagatattggagctagcattttcaatggacagaagaaggtgctgtattatgctgatgcccttacagaaattgcttttgtggttccttctcctgtggagtccttaactgattcattggaaagtaacatctcggaccaagatagtgattcaaatatggatcttatgccaggaattctgaaacagccatccctgacacttgagcttttccccaatcatacagacaatcttaattcctcacagaggctcagtcccagttccagaatgaggaagctgcctcagggtcgccctgttcctccccttggacctgagacaaggagtttctggtagtctgggtggaacgctatgatgatatagaaaactttcccctctcagagctgatgacagagatcagtactggtgtggaaactactgcaaatagtagcacttcactgagatctacaactcttgaaaaagaagttcttgtcatcttcatccaccctttaaacactggattattccggataaaaattcaaggagccactggaaaatttaatatggtcatccctcttgtggatgggatgattgtcagcaggcgagctcttggctttctggtgaggcagactgtaattaacatttgtagaagaaagagactggaaagtgactcctacagtcccccccatgtccgccggaaacagaaaatcaccgacattgtcaacaagtaccggaacaagcagctggagccagagttttatacttcacttttccaggaggttggactcaagaactgcagttcttagaccactgaatttctaagactgttgaactccagtttgggaactataacacagcagaacagtttgataggtgatcactgtaaaaataaaagcaaatcactcccaagagcttactgtttaatcaccagaatagaagaaacacattataacccatttgatagaagactttgggctatctagtgaaatgggctcccagacacaatcatactccgtgctgataatgatgatatacattttagccataaactttcttttaaaagtgacaattttagttaaacataagccttttgaggagaaaggcttttatgcatctcagttaaacaccgtgcattgggtagtatcaacaaatttgcaatatagaagttgaagatagttttttacctcactttttaggaggttgtattcaaaattaaaatctcagaatcctaccaggacatttaaaggactcatgttgatagcatggaggagaaggaaagaagtcacagccttctactcagttgtaggtcttcttgtcatccagctgtcacactgacaaaaagaaaagatgatacatgtttttttgctcagataagaagcctgacattaaaagatgtcatatttttttctccacatttcaaaaaagtggtccttctcatcactgcacagatctgtttgaaagcctcagtttttgagtgacccaggaacagatcagaaatggagcatggccttgtcctttaatggggatgcaaataaagtttgtggggttaaaagttataagacagcagtgataccccactctttccattattgtccagcggggtgacataatgacaggttaaatatttgtgattcattgattaaatattatttaaagaaatgtaaattcacaataagggttgaaaattatttggtttcatccattgtctcttatttcaggaccaagcagcaaactgcagtagtttgtgaaggattctaatatggggttcaggaatagcctctcaacgctactaattcagatctctcccagagaactactggatttcctcataattgacaacagccatttctaacagtacccacgcgtccggactagttctagatcgcga

SEQ ID NO: 153906 - DNA, 807 bp, Homo sapiens; identical to SEQ ID NO: 142280

SEQ ID NO: 153907 - DNA, 2423 bp, Homo sapiens
gatcttttggttaactggctgcacatataccttaataaccaggattcgggaacaaaggcattctgcgatgttgctctccatggaccattttactcagcctgccaagctgtgttctacacctttgtttttagacacaagcagcttttgagcggaaacctgaaagaaggtttgcagtatcttcagagtctgaattttgagtggatagtgatgagccagctaaatcccctgaagatatggcttgccctcagtggttaacttttttgctgcaatcacaaataagtaccagctcgtcttctgctacaccatcatcgagaggaacaatcgccagatgctgccagtcattaggagtaccactggaggagactcagtgcagacctgcacaaacccactggacaccttcttcccctttggatccctgtgtgctgaagaggtcaaagaaattccattgatcctattttatccaggtatggggaagacatgagtgctgaagagctacaggagttcaagaaacccatgaaaaaggacatagtggaagatgaagatgatgactttctgaaaggcgaagtgccccagaatgataccgtgattgggatcacaccaagctcctttgacacgcatttccgaagtccttcaagtagtgtgggctccccacccgtgttgtacactgcaacccagtcccctctgacggcagaaatttgcgactgagatgtgacatttgggattccccatcacttgtcatgccctcagcacccagcttgtgccattgggcattgatggcattgaactaaagcgagtgcctgcctcggctgtggcaacttccaggttcgactgaatcaagcatctgaagactgggtttttttgttgatgttgctccccttaccgaccaaatgaagactatcatgtgcaatcttttacagaggggttgatgatacatttggaaggatttgcttggtcaatatgaacattttttggggtaacagctttttgacacaattactgggcaaattctaatataggcagcagactgttttacgggttgctgttttaacatgggtttttgtcagatccatggtcttaggacttgactgatgagctttcagtgaagaatcctctaagataaaacttctatttaaagactttaactaggaaagtgtttattttgggctacattgttcaccttctgctgtattggtatttgtctgttggggatttcaaggggagtgtaggagaagacagaagggaaagctgaggagctgggcccgacatggtctgggacacagagttggagctggcactgaagatctccaagggacttcagagaccaataaaagcccatagggaagagagagaggatatagggaaacacgaatcccgatgtgtaatatactttggcacagcgaaaaaatggattttaaaagacaaaaatgggaggtcccgggtagatgttatttcacacagactgaaagtgagttcgggcttgtgtaaaacacatgagattggatttgaccccttggctctcaagtgtccccttagatctagaactgctccttggtggccattagatcgagtcagttttgatctgcatcacttagttattgggaatttctttgttggaaacaggaaaatttttttagattatttggtgtacggttttgctcacaacaataggtggaagttgctagtgcagtcttggtcagatggctgtgtgcatcgcacattcggcttggtgaaatccttctctaaagcctctttttgtatttttataactaaacagaggaagtcttcagaagacctcgctttaaaaccaaatttgtgcaaacactgctagagtcattttgaagctcaagcattttcactttgtttcttacatgtgtacttttttgtttacttgtgaaaatggccatctttaagcatatttattttctgccactttatttaaaggcaagcaatattttcctggatcataaatattttgtaatgaaaatacttcctcttttcccagggctttgtatgcacttgtataattaccattgatggcaatgtagagtttgaatttccagtctgtaaataccttttttggaaaatagaaatttttattgcctttaaagtttttggatatgggtggttttccttttccgggtttggtggaaagtaatttgagaacttttaaggttgtctttttaactgctgggcaaaatgttgattttttaatattagataaaacgagtaaacgaaattccccagaaattagtagtaagtggggtctttgtgggttgggaagtagttttaatgtagaaagacatttacatataagtctgtttaatttcaaaggagtttgtgaaaaaaaaatccatggtgaaaatgaaacaatgacatggttaatctggaacttacgttcttataccaataaaaggtacctcaat

SEQ ID NO: 153908 - DNA, 416 bp, Homo sapiens
ctgctgcagccatgtcggccctcagcctcctcattctgggcctgctcacggcagtgccacctgccagctgtcagcaagggagcctgcacacatgatcctgaccgtcggaaacaaggcagatggagtcctggtgggaacagatggaaggtactcttcgatggcggccagtttcaggtccagtgagcatgagaatgcctatgagaatgtgcccgaggaggaaggcaaggtccgcagcaccccgatgtaaccttctctgtggctccaaccccaagactcccaggcacatgggatggatgtccagtgctaccacccaagccccctccttctttgtgtggaatctgcaatagtgggctgactccctccagccccatgccggccctacccgcccttgaagtatagccagccaaggttggagc

SEQ ID NO: 153909 - DNA, 930 bp, Homo sapiens
tgcgtggaattcttcttcgagactcctccctccctcgccttgctccttcctagctcctctcctttagggttatactgagcccaggctgatttcaggcggacacggatagactccacagcagctccaggagcccagacaccggcggccagaagcaaggctaggagctgctgcagccaatgtcggccctcagcctcctcattctgggcctgctcacggcagtgccacctgccagctgtcagcaaggcctggggaaccttcagccctggatgcagggccttatcgcggcggccgcgttcctggtcctcgttgcaatcgcctttgcagtcaaccacttctggggtgccaaggaggagccggaagccctgcacacatgatcctgaccgtcggaaacaaaggcagatggagtcctggtgggaacacgatggaaaggtactcttcgatggcggccagtttcaggtccagtgagcatgagaatgcctattgagaatgtgcccgaggaggaaggcaaggtccgcagcaccccgatgtaaccttctctgtggctccaaccccaagactcccaggcacatgggatggatgtccagtgctacccccccaagccccctccttctttgtgtggaatctgcaatagtgggctgactcccctccagccccattgccggccctacccgcaccttgaagtatatccagccaaggttgaagctcataccgtgtctaggttggggctcggctgcggacctggagtcgcctgctcagctgacaatagccttatggagaggacagacagctgagcacctccgatcctgctcacacgtccttccccataactatggaaatggccctaatttctgggaactaaagactttccgtatttctggggctgaggctcagcaacagcccctcaggcttccagtgagtccccatcttaaa

SEQ ID NO: 153910 - DNA, 409 bp, Homo sapiens
  misc_feature (1)...(409): n = a,t,c or g
ngcaatgcagccacttctctgacagcaaacccagatgccaccacagtaaacattgaggatcctggtgaaaccccaaaacatcagccaggatccccaagaggctcaggaagagaagaagatgatgagttactgggaaatgatgactctgacaaaactgaggtacagtgtcaggcaatgacagctcagaggtaaatgacacatggcctcttccttggtgggggaaacaggcaaacagaccattactttccttacttgctggacagaagaaaagctcccccttctggacatttgaatactaccaaacattctttgatgtggacacctaccaggtctttgacagaattaaaggatctcttttgccaatacccgggaaaaactttgtgaggttatatatccgcagcattgtatt

SEQ ID NO: 153911 - DNA, 518 bp, Homo sapiens
attgattcccagtcgacccacgcgaacgaccgaaaccggcgcggagcaactgaggcccgagccttctcgggacccggttgacgcctaaccccgcgagaaccctgcaaattttcttcctcataattgggagaagactcactggccgaatggcagcagtagatgacttgcaatttgaagttacttgctggacagaagaaaagctcccccttctggacatttgaatactaccaaacattctttgatgtggacacctaccaggtctttgacagaattaaaggatctcttttgccaatacccgggaaaaactttgtgaggttatatatccgcagcaatccagatctctatggccccttttggatatgtgccacgttggtctttgccatagcaattagtgggaatctttccaacttcttgatccatctgggagagaagacgtaccattatgtgcccgaattccgaaaagtgtccatagcagctaccatcatctatgcctatgcctggctggttcctcttgcacg

SEQ ID NO: 153912 - DNA, 393 bp, Homo sapiens
aaactttttaaagcatcatctttcttccaacactaagctctacttttagcatcaaaattagactcaagcctcaagatttagggaattggtggcagcagactgctctggtgttgggagttatatctctaaacatacatgaatatccttttctacaatgtagctctttcctgtcggggtgggggcgtgctttatcttgaaagtttcccgttttgtttttcagttctcttttgttttttggagcatggttctttgggaagtggcatccactgcaggaaagcagaatgagcagagccagcagaactgatggagtggcacaaattcccagtgtctggatggtgccacactggcgcctaatcaccccgttaacaagcagaattaaattgtgctcagccg

SEQ ID NO: 153913 - DNA, 537 bp, Homo sapiens
ggcacgaggtgtctatggatattccctcttcatttatatccccaccgcaatactgtggattatcccccacaaagctgttcgttggaattctagtccagaattgccctgggcatctcaggatctctcttggcaatgacattttggccagctgttcgtgaggataaccgacgcgttgcattggccacaattgtgacaattgtgttgctccatatgctgctttctgtgggctgcttggcatgcttttttgatgcgccagagatggaccatctcccaacaactacaggtactccaaaccaaacagttgctgcagccaagtccagctaatgaggaaattctcttttgttttttggagcatggttctttgggaagtggcgtccactgcagcaaagcagaatgagcagagccagcagaactgatggagtggcacaaattctcagtgtctggatggtgccactctggcgcctaatcacccgtttaacaagcagaaattaaatgttgctcagcaaaaaaaaaaataaaaaaaaaaaaaagtcgacg

SEQ ID NO: 153914 - DNA, 1908 bp, Homo sapiens
  misc_feature (1)...(1908): n = a,t,c or g
ggcacgagctgggctggaccgaaaccggcgcggagcaactgaggcccgagccttgtcgggacccgggggacgcctaaccccgcgagatgaggaaactgaggccgcgaggagcgcgcacacagcagagaagcagcagaatcgggaatcaaacccagctctgtctgaccccagagcctgtgcctttaaccactggctaggctgaactgcctttgttcttcactgtccccatcacctctttcaaacctcagcctgtccttcctcatcggtacatctctaggctgcacctgctctcttaaacattcacacaaaccctgccaaattttcttcctcataattgggagaagactcactggccgaatggcagcagtagatgacttgcaatttgaagaatttggcaatgcagccacttctctgacagcaaacccagatgccaccacagtaaacattggaggatcctggtgaaaccccaaaacatcagccaggatccccaagaggctcaggaagagaagaagatgatgagttactgggaaatgatgactctgacaaaactgagttacttgctggacagaagaaaagctcccccttctggacatttgaatactaccaaacattctttgatgtggacacctaccaggtctttgacagaattaaaggatctcttttgccaatacccgggaaaaactttgtgaggttatatatccgcagcaatccagatctctatggccccttttggatatgtgccacgttggtctttgccatagcaattagtgggaatctttccaacttcttgatccatctgggagagaagacgtaccattatgtgcccgaattccgaaaagtgtccatagcagctaccatcatctatgcctatgcctggctggttcctcttgcactctggggtttcctcatgtggagaaacagcaaagttatgaacatcgtctcctattcatttctggagattgtgtgtgtctatggatattccctcttcatttatatccccaccgcaatactgtggattatcccccagaaagctgttcgttggattctagtcatgattgccctgggcatctcaggatctctcttggcaatgacattttggccagctgttcgtgaggataaccgacgcgttgcattggcccttaattgtgacaattgtgttgctccatatgctgctttctgtgggctgcttggcatacttttttgatgcaccagagatggaccatctcccaacaactacagctactccaaaccaaacagttgctgcagccaagtccagctaatgaggaaagactcacttggaggataccctctccttggctggaagtttttccttgacttctccagttctcttttgttttttggagcatggttctttgggaagtggcatccactgcaggaaagcagaatgagcagagccagcagaactgatggagtggcacaaattcccagtgtctgggatggtgcccanactggcgcctaatcacccgtttaacaagccagaaattaaatgttgctcagcaccatgtgtctttcagctcttcccttttcaccccatggatgatccattgcgagcaatgcgctgaattggactgaaatgcccggggaataggttaggcatgcctcagtgccgtcccttgcccaccacagtcaaatgacatgcttcactgtgggacctttaaaccctgaaatagaaccatggaaaattttgatgtcctctctttgaattatgtacagactacctgggggatcctcttctctccaaatgttagccatcctgaagtagccgaacagtagaaactttggtggggattaaccgggagcttgaaaatttgtctttggtaacctgatactggacagctgaactgaatggctgcaaaataaatacctcacatgaaaaaaaaaaaaaaa

SEQ ID NO: 153915 - DNA, 1936 bp, Homo sapiens
gcagcgcttagagagctcggtggaagctgctaaaggcggaggcggggctctggcgagttctccttccaccttcccccacccttctctgccaaccgctgtttcagcccctagctggattccagccattgctgcagctgctccacagcccttttcaggacccaaacaaccgcagccgctgttcccaggatggtgatccgtgtatatattgcatcttccctctggctctacagcgattgagggaagagacaacaagatgtgcttggtttcctagaagccaacaaaataggatttggaagaaaagatattgcagccaatggagagaatcggaagtggatgagagaaaatgtacctgaaaatagtcgaccaggcacaggtttaccccctgccacctcagattttcaatgaaagccagtatcgcgggggactatggatgccttctttggaaggccagaggaaaataattgcagtgtattgccttcttaggggtttgacagccccacctggggtttcaaaggggaggcaggaaggtgccaagccaaaggcaggccaagccttgaccctttaagcactgtggttttaagcttcctgaaaaatgagtctccattgctttttataaaatagcagaattagctttgcttcaaaaagaaataggcttaaatgttgaaaataatagaattagttgggttttcacatgcaaacattcaaaatgaatacaaaattaaaatttggaacatttatgggtggatttatgggtggaggagaatgggggatattaacataaaattatattaataagtagatatccgtagaaatagtgttgttacctgccaagccatcctggtatacaccaaatgattttacaaagaaaacacccttccctccttctgccattactatggcaacttaagtgtatctgcagctctacattaaaaaggagaaagagaaataacctgtctctcattcctaagttgcctcattaattttcatgaacaagaatatgtacctttttgatgctatattactgcgattaaaaacgttcttgcaggtaatgtttatgatatggtaaacggtctaattgcttatcgcaattatcacattcccattcatttgtacatgaaacttctacatattgaaccacagatcttatgagcttactagatgtatcctttcattgcacatttcagtgatcagaatacatattcttttacacgcacaaaagcaatacattcattcacatggacaagttccttgattaactacacagctatgatggaatgatatatccaagttcccttgcctcagtgaaatatggcatatgtatatcatgaaagtgggatgccaagtaagcttaaaatggcattctctagcaaagagattagacttttaaataactcttataaaacaggttggcgatcatttcccaagattggtttcccttgagtttttgctaaaaccaaatccttagtagttttgcccgtttaaaaaacctcacaatccgtaaatgctactatctcctaagatatcttacctttttatttcagtttagccatgtattggtatggagtgtattaggtcttaagccaggtggagaatctttttcttatgcctctaattccagcaaaaagtagaagtatccaaataaaaagggcaacttttaaaatattaagccctgaagacttcctaaaaagacaagaaacatggccctaaataacccaacatagatttacatagtaagtttcacactaccttattaccaaaagcaaacacctcttactttaaactacattatcatgtatatctattgtatgctggtctttactttttgccaaaatcaacatataatgaagagatgcctttgtttcatgagattcaaacttgatgctatgctttaaaataaacttagtacttttagaaacataaaaaaaaaaaaaaaaaa

SEQ ID NO: 153916 - DNA, 390 bp, Homo sapiens
  misc_feature (1)...(390): n = a,t,c or g
tttttttttttttttttccacgaatactatcaattttattgataacacatactactttcagcacacagaagcatattttctagttattgttaaatagtagataaggcaggttgttccctaaagtgctcagttatcattcagtgggttatttgccgttgatccttttctgccatttcttgttggcgaattgtattctgtgctgcttgatgcattttctctagtttttccagagtcanagattttaagggtaaaagtttgggtttacacagcaccattgtcattatatcttccacaaacagtggcccttgctttggaagaacttcccggaacattgacttcacttctgccatatagatgcatcccttcccagacggctcagctgttgccccc

SEQ ID NO: 153917 - DNA, 2825 bp, Homo sapiens
  misc_feature (1)...(2825): n = a,t,c or g
aagggatgcatcttttcttctgtatgcttgagtcaagaactctaagtcatcttggtaataccgggttggatgcttaaagctgcagcaaaaagaccagaactttcaggaaaaaacactatatcccacaactcagatatggcaggagttgaggccatggtcccggaaagttcttccaaagcaagagaagggatctcaatgtgttgcctaggctggtctcaaacccctgggctcaaacaaacaatccaacccctttggcatcccaaagtgctgggataacagggccactgtttgtggaagatataatgacaatggtgctgtgtaaacccaaacttttacccttaaaatctctgactcctggaaaaacctagagaaaatgcatcaagcagcacagaatacaattcggccaacaagaaatggcagaaaaggatcaacggcaaataacccacttgaatgataactgagcactttagggaacaaccctgccttatcctactatttaacaataacttagaaaatatgccttcctgtggtgctgaaagatagtatgtggttatccataaaattgatagtattcatagaaattccaaaatatccaagattgatgaaatttgtattgtgaatgtaaacactctgggtttgtttgaacattaaccagtttaaactatggancccaagttttatggggtttaagtcatgtttttagaattgcaaattaaattatttgttcaccattcctattgctatcttttatagataacattcttgggatcttttatagcattcttgggcacaagggattaaatacaacttttatatacagaggatctttacatgtttattaaatctggaatttgaagatacattccaatcttgcataaagtgtttgttgggcttttacattacggtaattaaaaaacaaaattttttaaccaattttatgtgccatgtcacgtttaatgctatcttgtgtgaccagatcccaccagtaatgacaaaactgtcttaaacctcattttttttttttttttgagacaagagtttcactcttgttgcccaaacgagaggcaatgggcaccatctcgactcactgcaacctctgcctcccagggtttcaaggcaattctcctgcctcagcctcccaaggtaggctgggggattacacggcatggggccaccatgccggggggtacttttgtatttttaataggggacaggggttttcttcatgttgggtcaagctggtcatggaactcccaacctcaagtgatccggcccacctcggccctccccaaagtgctgggggttacagggcatggaggccaccgtgcccagcccttaaatcctcatttttaagaaaccctcacctattctgtagtcagctaagcttttaattacattaattttaaggcacttgagaataaaatgactgcatttattcatccaagtgttcaaacaatttaaaaacctaaaaagggtaacccatataataaagccggagggtaaatatgggccctggataaagccccatgaggtaaaatatggaacacctaaactttggttttaattcctaacagacctatatcctaaaccctgtaagccagtatacctccctaacagtacccctcataaattcctgaatataattccttgtttgcctgcagtcaatatttggccagtttaaattagcacagacgttgaaggccctgcctgagttattaggctatgtaaaagaggttaaaaatatgatcattctttattgttaattggtaatatttatctcatacattaggtaaatgtcaagctttgggtctctggagtataactttttgtaacattagccattatttggtaacagaatttaaggatgatggaatgatggaaggtattacatatttctaaaacttaattaagctctaggtcagataacaatgggagtaaaggggtccctgcattttttttccccagtgtaatcttaatttactattgtatttttcacttaaaattttgtagggaaaaaaagttttcaagggaacactaagattaaattgactaggttcaaatatgcttccttatgagattcaaaatttactgtgtgaaattaaagtttaagagacctaaaaaaatgtactcccaataaagaatcaatactcgcttcacatgttttattttggtgtacattcttctagaaccaggttcatttttccagttttgtagaaaaatagatgttccagccaccttttacttaactgtcctagtcttttaaagacccaatcagtatgttccccggaaagatgaataagtctcatgactaattttttaaaaattctttaagacaaagaaataactttcttttttttactccaaaagcacagtatctcaacagcagcagcccaacatggggttttagccagccttaactttccccccctaaataaagcctttgtataaacccagtgattttcctacaaaaaacactgtccttgaaagaaaggagtggcagtccagacatcaatgcaaaacttgggaatggattaggataataaaccatgggcactttacaaaagggtagcttattagaatattccactttagaagaggggtacttttctggtccctcccttgccccctcggaaaaacccaaaaaaaaggaaaaacatttccctttaaaaattccccttaaatgtaggtttataaaatgtcagaaatgccttgtacccaaaacaagtgcttaaaaaaaaaaaaaaaaaaacttgtggctaacaactcttanaattcngatatatatttttataacatctaagacggcagagttcttanattccgta

SEQ ID NO: 153918 - DNA, 629 bp, Homo sapiens
ccccctactgccaccagcccttcccggctgccacgccctggcccccagctcttatatccctgtggccattcgtgccctcgaacccccatctccataccacggtcaactaaaaatgcagagcataccaggccactccccaacctagaagcttctttctcagcagccctttggacgtggattctccccaggccccccgtcattgcactgggctcccagccccctccctgagttcacctccatggtcctgccccactctcttctcttggttctttgaggcatcaggtgtttgccaccactggacttctgtcatcgctgcctccaactcttcccccatctttccggagctcccccacccccatccccttcgaatctcagcttggctgtttcctccttggagagatcactcccaggaccccctctgcaggggtgccacatcacctgttctgaattcttaagagcacccctgctctcagaactccttatttatttgacttgtttgtatccctgaactagaatgtaagctccatgagggcaaggccttcctctgtctcgtttccctgctgtatccccagtgcctggaatagtgcttggtgtgtagcaggcactcaataaactgtggaaagaataaa

SEQ ID NO: 153919 - DNA, 2271 bp, Homo sapiens
cggttctccaagcacccagcatcctgctagacgcgccgcgcaccgacggaggggacatgggcagagcaatggtggccaggctggggctggggctgctgctgctggcactgctcctacccacgcagatttattccagtgaaacaacaactggaacttcaagtaactcctcccagagtacttccaactctgggttggccccaaatccaactaatgccaccaccaaggcggctggtggtgccctgcagtcaacagccagtctcttcgtggtctcactctctcttctgcatctctactcttaagagactcaggccaagaaacgtcttctaaatttccccatcttctaaacccaatccaaatggcgtctggaagtccaatgtggcaaggaaaaacaggtcttcatcgaatctactaattccacaccttttattgacacagaaaatgttgagaatcccaaatttgattgatttgaagaacatgtgagaggtttgactagatgatgaatgccaatattaaatctgctggagtttcatgtacaagatgaaggagaggcaacatccaaaatagttaagacatgatttccttgaatgtggcttgagaaatatggacacttaatactaccttgaaaataagaatagaaataaaggatgggattgtggaatggagattcagttttcattggttcattaattctataaggccataaaacaggtaatataaaaagcttccatgattctatttatatgtacatgagaaggaacttccaggtgttactgtaattcctcaacgtattgtttcgacagcactaatttaatgccgatatactctagatgaagttttacattgttgagctattgctgttctcttgggaactgaactcactttcctcctgaggctttggatttgacattgcatttgaccttttatgtagtaattgacatgtgccagggcaatgatgaatgagaatctacccccagatccaagcatcctgagcaactcttgattatccatattgagtcaaatggtaggcatttcctatcacctgtttccattcaacaagagcactacattcatttagctaaacggattccaaagagtagaattgcattgaccacgactaatttcaaaatgctttttattattattattttttagacagtctcactttgtcgcccaggccggagtgcagtggtgcgatctcagatcagtgtaccatttgcctcccgggctcaagcgattctcctgcctcagcctcccaagtagctgggattacaggcacctgccaccatgcccggctaatttttgtaattttagtagagacagggtttcaccatgttgcccaggctggtttcgaactcctgacctcaggtgatccacccgcctcggcctccccaaagtggtgggagtacacgctgtagcccccgggccccgaccatccaaaagcgttttaatcctgccaatggtgtgaaactctttcaaaattcacaaaaaaggcctggtttggaggccaaaatttcaaatctttgagaattaagaagggcaaaaaagtaaaaggagtccaaaactataaatcaagtatttggggaagtgaagactggaagctaatttgcattaaattcacaaacttttatactctttctggtatatacattttttttctttaaaaaacaactatggatcagaatagtccacatttggaacacttttttggttatcagtcaatatttttaggatagttagaacccctggtcctaaagccctaaaaagtggggcttggattctgcagttaaatctttttacaaactgccctcgacacaccataaaccttttttaaaaataggacactcccccgaaagtcttttgttcggcatggtcaacacactggatggcttagatgttcccagtaatcctaatatggcccacagtagtccttgatgacccaaagtccttttttttccatctttaggaaaacctccatgggaacaaacagatcgaacagttttgaagcctactgtgtgtgtgaatgaacactcttttgctttattccagaatgctgtacatcctattttggattgtatattgtgtttgtgtatttaccgctttgattccatagtaacttcttatggaattgatttgcattgaacaccaactggtaaataaaaagaaatgggctgaaagagaacccttctttaaatatatcaaagggggcgcccttataaagatacttaaggggcccacgtttatcccgcaagccaatcatagttttctccttaa

SEQ ID NO: 153920 - DNA, 408 bp, Homo sapiens
ggaagatcgatgagttctgagtgtcgggctgcccactggtgacaccgggatcgggctgagcaggaaaacatcaccggctccagttgccctgatccattctcacagcctgaaacaagctcacccgtagcttacgcttggaagcaggactgggaacatccacgctatttattatcgaggagttttaaagtactgtaactttatatgcttaggattcatgctgagatatcaattggtttccccttctttttaaaatacgtccagttcttacccagttaacatgaagaaaccactgtctctagaagaaagcttgttttgcagtattagtgaatcactgaatagcttaagtatgactatctaagttataagttaggctttagtggggtgtaaatagattttctgacccttctg

SEQ ID NO: 153921 - DNA, 1068 bp, Homo sapiens
atgggatctgtgcccttaataaagaggcccaagagagcttctttgtcccttccaccacatgaggtttccaatgctaatgatgatgacccactggagagtgagaaatttaacccaaacaagttgacgtacattcttgccgtccactccactgctctgggaaattctcccctggcccttccattaaagccacccatcctaccggctgtgaagtgtacccgcattgtggttgtgatgtgcatttccccgatggctaatgatgttgagcgtctttccgtgtgctttactggtcatttgtgtatcttcttcggagaaatgtctattcaggttgaaaggattgttgacaaaaggaaaaataaaaaagggaagacagagtatttggttcggtggaaaggctatgacagcgaggacgacacttgggagccggaacagcacctcgtgaactgtgaggaatacatccacgacttcaacagacgccacacggagaagcagaaggagagcacattgaccagaacaaacaggacctctcccaacaatgctaggaaacaaatctccagatccaccaacagcaacttttctaagacctctcctaaggcactcgtgattgggaaagaccacgaatccaaaaacagccagctgtttgctgccagccagaagttcaggaagaacacagctccatctctctccagccggaagaacatggacctagcgaagtcaggtatcaagatcctcgtgcctaaaagccccgttaagagcaggaccgcagtggacggctttcagagcgagagccctgagaaactggaccccgtcgagcagggtcaggaggacacagtggcacccgaagtggcagcggaaaagccggtcggagctttattgggccccggtgccgagagggccaggatggggagcaggcccaggatacacccactagtgcctcaggtgcccggccctgtgactgcagccatggccacaggcttagctgttaacgggaaaggtgagtgtctagggagctgctcaggctccgtggtgatcccagagggctcgggtccttctctagagatcaggccttga

SEQ ID NO: 153922 - DNA, 3502 bp, Homo sapiens
  misc_feature (1)...(3502): n = a,t,c or g
ggagagaggacctatttctacctaaggacattcccggaaggcaatgggtttcaaacaatatcctgaagagactcatctcggggaactaagcaggtggtaatcagagaacacagagcccccggaagaattttatggcatttcaggcaagccacaggccagcctggggaaaaagcaggaagaaaaactggcaatacgagggcccaacccaaaagttattcctgaagagaaacaacgtgtcagcaccagatgggccttcagaccccagcatctccgcgagcagtgagcaaagcggggcacagcagcctcccggtttacaggttgaaaggattgttgacaaaaggaaaaataaaaaagggaagacagagtatttggttcggtggaaaggctatgacagcgaggacgacacttgggagccggaacagcacctcgtgaactgtgaggaatacatccacgacttcaacagacgccacacggagaagcagaaggagagcacattgaccagaacaaacaggacctctcccaacaatgctaggaaacaaatctccagatccaccaacagcaacttttctaagacctctcctaaggcactcgtgattgggaaagaccacgaatccaaaaacagccagctgtttgctgccagccagaagttcaggaagaacacagctccatctctctccagccggaagaacatggacctagcgaagtcaggtatcaagatcctcgtgcctaaaagccccgttaagagcaggaccgcagtggacggctttcagagcgagagccctgagaaactggaccccgtcgagcagggtcaggaggacacagtggcacccgaagtggcagcggaaaagccggtcggagctttattgggccccggtgccgagagggccaggatggggagcaggcccaggatacacccactagtgcctcaggtgcccggccctgtgactgcagccatggccacaggcttagctgttaacgggaaaggtacatctccgttcatggatgcattaacagccaatgggacaaccaacatacagacatctgttacaggagtgactgccagcaaaaggaaatttattgacgacagaagagaccagccttttgacaagcgattgcgtttcagcgtgaggcaaacagaaagtgcctacagatacagagatattgtggtcaggaagcaggatggcttcacccacatcttgttatccacaaagtcctcagagaataactcactaaatccaagaggtattgagagaagtccaaagtgctctgagcacggccgctgccaatgacagcaaagtgggtactgccaagggcggtgggaagcgtcttttggttgtggacttaactttaattattttaaaccacgttctgccaaatgccaggaaaagagaaagcattaaaatggcagaagctatcagaaacttcgtgaatactttcattcaatttaagaagcccattattgtagcagtcaatggcccagccattggatctaggagcatctatattgcctctttgcgatgtggtttgggctaatgaaaaggcttggtttcaaacaccctataccaccttcggaacagagtcaagagggttgttctcccgttatgtttcccaagataatgggaggaagcatctgcatactagatgccgtgttaggtgaccggaacttgacagcgcaaggaggcgtgtggcaagggcctggtctccagggtgttttggcccgggacgtcacccaggaaagtgatggttcgcattaaggagcttgcctcgtgcaatccagttgtgcttgaggaatccaaagccctcgtgcgctgcaacatgaagatggagctggagcaggccaacgagagggagtgtgaggtgctgaagaaaatctgggggctcggcccagggggatgggactcgcatgttaaaagtactttgcagagggaagatcgaatgagttctgagttttcgggctgcccactggtgacaccgggatcgggctgagcaggagaacatcaccggctccagttcccctgatccattctcacagcctgaaacaaagctcaccccgtagctttacgcttggaagcaggactgggaacatccacgcctatttattatcgaggagttttaaagtactgtaactttaaaataaataactacaaaaggcttctttgtccaaaacgtcattattttatacttatatacacgcaggtgtaaaagtataaaggtgagcactagactgctcttagaagctctaatttttgttttctttggctagtactgtataaaaaacagaattgtgttttattggttttgggatgacagaaaagtctgggaataaatgtttgttttcctcatttcttccttctaggaacacaggaatctaaagggggtattagccagcctcgcctccctggccccacgtagagacaacagagtgatgtgagggcgttggctttttctccaagaaggtacagatacctcagattcggggaaactcaaaatccaaaagacttaggcttctagggataaatacttctgatgaaaaatccgctgaggagcataccccaaaccagacatatgcttaggattcatgctgagatatcaattggtttccccttctttttaaaatacgtccagttcttacccagttaacatgaagaaaccactgtctctagaagaaagcttgttttgcagtattagtgaatcactgaatagcttaagtatgactatctaagttataagttagtctttagtgggttttaaatagtttttctgacccttctgaaaaataactacataagtgcttcttgttgctgggtgagaaatactactttatagacagttttggttttctgtttgcaggtatggattgatgtatttcaccaaaataaaatatttttatgtttataaagtgtaatttttaggttcacttagaatatattttatttaataagttaaaattcttttggcacactattaaatgcaaaaactcctttcaaaacaaaaaagaactaccttatattccaaccatttaatgttcttggccctctgcttttatgtctataccaatattactgagttcagtatgggtgtcccaagagtgccctgtgtggggataggacatgtgccactccttcccaggagtgggtacctnattcccagactcccagatgccctattattagttaggcttctgagcttgcaatcatattgaatgtatgaagagcgaaaatcaaattcttatttttgtacaggttttgaaggtttataccttagaactgacccaccctccccgggccacgcggagagctgtacagtgtgtaaatctgccctttatcttggattgattggtacgagtattttgctattttgtgggacctaccttttcgttcaagtaagttttgaacctatatataaactgtacaatcctgtaaaagtttttatagaataaatattcagctgtgaaaactggttaaataaaactaatatttcttaacaaaaaaaaaaaaaaaaa

SEQ ID NO: 153923 - DNA, 572 bp, Homo sapiens
ctggtgtctgcagcatgacctggccatgcctccatcttcaagaagtcctggtggaaccacgtggcccagaagttcgtgatggggcagctaaaggcttctccgcccactggtggaacttccgccacttccagcaccacgccaagcccaacatcttccacaaagacccagacgtgacggtggcgcccgtcttcctcctgggggagtcatccgtcgagtatggcaagaagaaacgcagatacctaccctacaaccagcagcacctgtacttcttcctgatcggcccgccgctgctcaccctggtgaactttgaagtggaaaatctggcgtacatgctggtgtgcatgcagtgggcggtgagtggggttgcccaggaccccgggcatacggctgccgtggcaggaggtggtgcctcgggggacagtacctgcccatgaaggcaaacagggtgcacatgatttgctctgggccgccagcttctatgcccgcttcttcttatcctacctccccttctacggcgtccctggggtgctgctcttctttgttgctgtcaggtatggcagggagtggcgagg

SEQ ID NO: 153924 - DNA, 502 bp, Homo sapiens
tttttacatctgaatgtattttaatataaaaataacagctttcccccaattctcgctctaggaaaatgtgctatgctcaccttccctctacccctgtcccatcaggcccagagccaaggccatagggctgctgaatacacatgtgaggggagatccccattccctgtgggttcccttccctgggggcaggcagcgatgcgggctggagggtgggttgggagaacagctgaatgctcattctctggaatggaatctagaccgggttgacgggtgtcgggtaggggagctggagggcagccaaggccaagtccaggcatgagcctgggtgggcctgtccctcctgcacccagttctccattgctgcctcctgctgggcgctgcaacccaaggacagagaggacgtggaacctgcccacccgatcttgggcctgatattgggcagtggagccagaaatgtcaacaatctgctaggaagccctgtgccaggcgctctaaagggctg

SEQ ID NO: 153925 - DNA, 1516 bp, Homo sapiens
agacccctagtccagtgtggcggaattcgtgagggtgtcttcccaggaggagatgctgggtctactctgtcaggcatctgtgtccctggcagggtctttcccaacacaccctgcatgacaccttcgtcactaaaatcagcctcgtgagctggcagggcaaggaccctgttcctttactcagctgagaaaaccagagagggtggtggcctgtcctgggctctgaggcaaatcaggcagaagggttggatgcctgaggtcctcctcccacccaccaggcctccagacctccgggcacctggagacctctcggtatcgcctctgccctcctctgcaggatttgctctgggccgccagcttctatgcccgcttcttcttatcctacctccccttttatcggcgtttcctggggtgctgctcttctttgttgctgtcaggtatggcagggagtggcgaggtcacacacaggcgacaggtgacccccactgcagccccccaccagagcttcccttttcccgtctgcagaatggggccagtggtactgcctccctggcttgctggtggaatcacataaacacaagcgtggcaggagcccagggtcggtgggtttagggagcgtggcctggcttgtaagtggcccggtgggtgtcggagctgctctggactcagcctcacagtggacactgctccattcagattctttaaacactggcaagggggcgatggccacaatcctattgtacagataaggaagtcaaggccacttggggacagctgctctccagcctccactcagggtgcctaagtggtgagctggacctagggcagtgcccgagcctccccacagggtcctggaaagccactggttcgtgtggatcacacagatgaaccacatccccaaggagatcggccacgagaagcaccgggactgggtcagctctcagctggcagccacctgcaacgtggagccctcacgttttcaccaactggttcagcgggcacctcaacttccagatcgagcaccacctcttccccaggatgccgagacacaacctacagcccggttgccccgcttgttcaagtcgctgtgtgccaaagcacggcctcagctacgaaagtgaagcccttccttcaccgcgctggtggacatcgtcaggtccctgaagaaagtctggtgacatcgtgctggacgcctacctccatcagtgaaggcaacacccaggcgggcagagaagggctcagggcaccagcaaccaagccgagcccccggcgggatcgaataccccccacccctccactgaccagcctgggggtgccctgcctgccctcctggtactgttgtcttcccctcggccccctcacatgtgtattcagcagccctatggccttggctctgggcctgatgggacaggggtagagggaaggtgagcatagacacattttcctagagcgagaattgggggaaagctgttatttttatattaaaatacattcagatgtaaaaaaaaaaaaaaaaaaa

SEQ ID NO: 153926 - DNA, 2071 bp, Homo sapiens
tcctccgttccttgggtcccgtcgtctgtgagtactgcagtgcagccatggctgtttctcgcagccttcgtccggcggccgtcacggacgaggccgcgtcgagttgctgctccgacgcggaccccagtaccaaggattttctattgcagcagaccatgcgtacgagtgaaggatcctaagaagtcactggatttttatacgtagagttcttggaatgaccgctaatccaaaaatgtgattttcccattatggaagttttcactctacttcttggcttatgaggataaaaatgacatccctaaaggaaaaagatgaaaaaaatagcctgggcggttttccagaaaagctacacttgagctgacacaacaatttggggcactgaaggatgatgcgacccagagttaccacaatggcaattcagaccctcgaggattcggtcatattggaattgctgttcctggatgtatacagtgcttgtaaaaaggtttgaagaactgggagtcaaatttgtgaagaaacctgatgatggtaaaatgaaaggcctgggcatttattcaagatcctgatggctactggattgaaattttgaatcctaacaaaatggcaaccttaatgtagtgctgtgagaattctcctttgagatttcagaagaaaggaaacaatgtgattcaagatatttacataccagaagcatctaggactgatggattcactgtcccgattcaaattaatctcaagtccatttccccttcctatttcagctgttccttttcacctaacggttcaggtcattctggttttcaagcaggtgctttatctcatgtccttgaaatatagttgtgtaactttattttttaggtaataattagaacagttcccttcagaggctgcatttgccttcttctgccacctaaatattacttcccttcaaatctgcctttgaatcatcatttttaaaaaaaaattaacatgtttttgttgtagttatcttctggggtttcaattcctcagaaacaacttttttcacaacggaaaggaaagaacactagtgttctttcagtaaagtacaaagtgtttattttacaaaagagtaggtactcttgagagcaattcaaaatcatgcctgacaaggatactgatagaaaaagtgatttcttcttaattaataaaagtacatttaaaaggtcaaaggacctaaccttattttatttgggaaagggggaggaggaaggaaatggatatgggtaccccagaccactgggctaaggctgcaactttattctcatttaaaactcccagcttgtcatgtgagaaagaaagcaaggctagggcatgtgaaatcactttcatggaccccctcctggatccccagagggcatcaatccagctcaactcaaagatttccataatcattttttagtaatttagattgtgcctcaaagttgtaggtacctcaccaatacccccactgggtttccctgttgtaaaaaccttgcagtgaggttgaccaattgtgcttcttggcctctggggctggaggtaccgtggtgaggggagtaaacacatagaagtctttagtaccaaaactgctctaggggacacctgggtgattccttacgccaagctgatgttttaatatttctcaataaagagtcttcccctatcccaaaggtcttccatgatgcccagtagcccatataatggtaaattatgttccagtgataacttagttatcagaaatccagctcagtggtcttccccgcccatgattcacactttgatgagtttttcaaaaatcaaaggtgattttgaaaatctctaatggctcagaaaataaaaacatcccggtttgtggatgactatatttagatttccccagactcctagtggaagacctttggaaaaggccatgccaaccgtgcttggtactgctagaagcactttatgtatcctttttagagagtgaaatggattttatgtgagtgctttaaacaaatagcaatacttatagacatgaaataaaatgaaacttcaaataagactatgtttaatttgaaaaaaaaaaaaaaaa

SEQ ID NO: 153927 - DNA, 522 bp, Homo sapiens
cagacactggatcagatgtgggtacaagcccagagctgaaaagctagtgatcaactcaggagcccccacttcctgatgcagcatccgatgctctttccaatgcccagcctgccgttggccctccctcagccatgcccaccctcttccccaactcaccctgtgtgtgtcctcattcccgcaggtcaacattgaccatgagacccgcgagctgacgaggatgaacctgcagactgccacagccacatgctttgatgcggctcaggggaagacacgtaccctgatggagagggactcctacccacgcttcctgaagtcgcctgcttaccgggacctggctgcccaagcctcagccgcctctgccactctgtccagctgcagcctggacgagccctcacacacctgagtctccatggcagtgaggaagccagccgggaagagaggttgagtcacccatccccgaggtggctgcccctgtgtgggaggcaggttctgcaaagcaagtgcaagaggacaaaaaaaaaa

SEQ ID NO: 153928 - DNA, 2447 bp, Homo sapiens
cgcttgcaggctgctaaacccaaccgcagttgactagcacctgctaccgcgcctttgcttcctggcgcacgcggagcctcctggagcctgccaccatcctgcctactacgtgctgccctgcgcccgcagccatgtgccgcaccctggccgccttccccaccacctgcctggagagagccaaagagttcaagacacttttgggaatctttcctcacaaatccagagctgggcttcgatactgggagtactggcaagttcgaatggggcagtaaacacagcaaaggggatttgaaaacttctcagaaagatgtgctggggtggagagagtcgttcggacctgctgctgagcagtaaaaatggaagtggctgccttccacgctttcctgaagacagagttcagtgaggagaacctggagttactggctgggcctgtgaggagttcaagaagatcccgatcagctaccaagctggcctccagggcacacccagatctttgaggagttcatttgcagtgaggcccctaaagaggtcaacattgaccatgagacccgcgagctgacgaggatgaacctgcagactgccacagccacatgctttgatgcggctcaggggaagacacgtaccctgatggagaaggactcccttacccacgcttcctgaagtcgcctgcttaccgggacctgggctgcccaagcctcagccgcctctgccactctgtccagctgcagccctggacgagccctcacacacctgagtctccacggcagtgagggaagccagccgggaagagaggttgagtcacccatccccgaggtggctgcccctgtgtgggaggcaggttctgcaaagcaagtagcaagaggacaaaaaaaaaaaaaaaaaaaaaaaaaatgcgctccagcagcctgttttgggaagcagcagtctctccttcagatactgtgggactcatgctggagaggagccgcccacttccaggacctgtgaataagggctaatgatgagggttggtggggctctctgtggggcaaaaaggtggtatgggggttagcactggctctcgttctcaccggagaaggaagtgttctagtgtggtttaagaaacatgtggataaagggaaccatgaaaatgagaggaggaaagacatccagatcagctgttttgcctgttgctcagttgactctgattgcatcctgttttcctaattcccagactgttctgggcacggaagggaccctggatgtggagtctttccctttggccctcctcactggcctctgggctagcccagagttccttagcttgtacctcgtaacactccttgtgtgtctgtccagccttgcagtcatgtcaaggccagcaagctgatgtgactcttgccccatgcgagatatttatacctcaaacactggcctgtgagccctttccaagtcagtggagagccctgaaaggaggctcacttgaatccagctcagtgctctgggtggccccctgcaggtggcccctgaccctgcgttgcagcagggtccacctgtgagcaggcccgccctggggcctcttcctggatgtgccctctctgagttctgtgctgtctcttggaggcagggcccaggagaacaaagtgtggaggcctcggggagtggcttttccagctctcatgccccgcagtgtggaacaaggcagaaaaggatcctaggaaataagtctcttggcggtccctgagagtcctgctgaaatccagccagtgttttttgtggtatgagaacaggcaaaaagagatgccccgagatagaaggggagccttgtgtttctttcctgcagacgtgagatgaacactggagtgggcagaggtggcccaggaccatggcacccttagagtgcagaagctggggggagaggctgcttcgaagggcaggactggggataatcagaacctgcctgtcacctcagggcatcactgaacaaacatttcctgatgggaactcctgcggcagagcccaggctggggaagtgaactacccagggcagcccctttgtggcccaggataatcaacactgttctctctgtaccatgagctcctccaggagattatttaagtgtattgtatcattggttttctgtgattgtcataacattgtttttgttattgttggtgctgttgttatttattattgtaatttcagtttgcctctactggagaatctcagcaggggtttcagcctgactgtctccctttctctaccagactctacctctgaatgtgctgggaacctcttggagcctgtcaggaactcctcactgtttaaatatttatttattgtgacaaatggagctggtttcctagatatgaatgatgtttgcaatccccattttcctgtttcagcatgttatattcttataaaataaaagcaaaagtcaaatatgaaaaaaaaaaaaaaaaaaaaa

SEQ ID NO: 153929 - DNA, 446 bp, Homo sapiens
  misc_feature (1)...(446): n = a,t,c or g
tacaccaatcgaaccgccctcgganaccccgggtcgacccacgcgtccgcggacgcgtgggttcaccccaagaacatttaagtgtgaacgcgttgtcccccggaccccactgcgcccaaaccgaagtcatgtaagtcccgccccgcgctgcctctgccaccggcggggtcccagaccctcctgctgccccaaccctgtccccagcctgacctcctgcctcacgagattcccttccctctgcagagccacactcaagaatgggcggaaagcttgcctcaatcctgcatcccccatagttaagaaaatcatcgaaaagatgctgaacagtgacaaatccaactgaccagaagggaggaggaagctcactggtggctgttcctgaaggaggccctgcccttataggaacagaagaggaaagagagacacagctgcagaggccacctgga

SEQ ID NO: 153930 - DNA, 1413 bp, Homo sapiens
atggcccgcgccacgctctccgccgcccccagcaatccccggctcctgcgggtggcgctgctgctcctgctcctggtggccgccagccggcgcgcagcaggagcgtccgtggtcactgaactgcgctgccagtgcttgcagacactgcagggaattcacctcaagaacatccaaagtgtgaatagccacactcaagaatgggaagaaagcttgtctcaaccccgcatcccccatggttcagaaaatcatcgaaaagatactgaacaatccctaatgggcttcagacctgaaaaatgcaatgtctggtttgggcactttgggcctgtaagccttcttggtgaagagcagaaactttgcagtaacaccttcattcaggaacccgcgaccgctcgcagcgctctcttgaccactatgagcctcctgtccagccgcgcggcccgtgtccccggtccttcgagctccttgtgcgcgctgttggtgctgctgctgctgctgacgcagccagggcccatcgccagcgctggtcctgccgctgctgtgttgagagagctgcgttgcgtttgtttacagaccacgcagggagttcatcccaaaatgatcagtaatctgcaagtgttcgccataggcccacagtgctccaaggtggaagtggtagcctccctgaagaacgggaaggaaatttgtcttgatccagaagccccttttctaaagaaagtcatccagaaaattttggacgggcctatccggggagtgaatcctctcagctgcaagtctgggacgggacttcatcctactagagccctagctgattgcttgatagttctttggtttacaccacagttgacatccataacaggaatgtctgacttaaagattcatttgttactggtcaatgcatctaacattgagttttacggaaaacccctgatacttaatgacagagagaagtattctctgacttttctgagtgagtcaaataccactatggaagtaggttatgaaatagatttagagagttatgagcagaacttttttaaaagggaaatagaatggaatagaaaattttcctcccacactgatttacctgctacacaaaattattcttactgggcttatgtgccttttcctccacttattcgacctctcacctggatagatgctcctgcagaaatctacactaacgatagtgtgtggatgcctggagccacagatgactgttgccctgctcaaccaggagaaggcactgcatttaatgttaccatgggttataaataccctcctctgtgccttggacatgcacctggttgtatccatctagaaactcaagtctgggctgcttatcttccggagatatcagctacagaggaaccgggatatttgatctctggcctctccctttctcctttaaaataa

SEQ ID NO: 153931 - DNA, 1007 bp, Homo sapiens
atgtcttccagagaagtaactccccccggtaaggatgtagcgcggtccctacgtgggtctaagggatctgacccacgacgcactgcactgggttcacgaagcgcctcctcgcaggcggttatctcggtatctctgagagcggcgggctctcgctcccgctccagggattcggggcagaaagagaacatcccacagttggcgggagttacgcaagacagtcagacccggacgtcactcgtgagtgccccgacccccctccaccccagaggcggggccatcgccttccttccgaactcgggatcgatctggagctccgggaatttccctggcccgggactccgggctttccagccccaaccatgcataaaaggggttcgccgttctcggagagccacagagcccgggccacaggcagctccttgccagctctcctcctcgcacagccgctcgaaccgcctgctgagccccatggcccgcgccacgctctccgccgcccccagcaatccccggctcctgcgggtggcgctgctgctcctgctcctggtggccgccagccggcgcgcagcaggagcgcccctggccactgaactgcgctgccagtgcttgcagaccctgcagggaattcacctcaagaacatccaaagtgtgaaggtgaagtcccccggaccccactgcgcccaaaccgaagtcatgtaagtctcgcccatcgctgccgctgccactgctggggtccccgactctcccgctgccccaaaccctgtcctcagcccgacctcctgtctcacgagattcccttctctctgcagagccacactcaagaatgggcagaaagcttgtctcaaccccgcatcgcccatggttaagaaaatcatcgaaaagatgctgaaaaagtaagttataatttccatgtacacaggcgactggagctgttggtcagaaatactggcgtctgccccctaaaaagtaaatcaggaaaacccagggttagctgcaggactgaaaaaatt

SEQ ID NO: 153932 - DNA, 1147 bp, Homo sapiens
gccacagagcccgggccgcaggcacctcctcgccagctcttccgctcctctcacagccgccagacccgcctgctgagccccatggcccgcgctgctctctccgccgcccccagcaatccccggctcctgcgagtggcactgctgctcctgctcctggtagccgctggccggcgcgcagcaggagcgtccgtggccactgaactgcgctgccagtgcttgcagaccctgcagggaattcaccccaagaacatccaaagtgtgaacgtgaagtcccccggaccccactgcgcccaaaacgaagttcataagcacactcaagaaatgggcggaaaggcttgcctcaatcctagcatcccccataattaagaaaatcatcgaaaagatgctgaacagtgacaaatccaactgaccagaagggaggaggaagctcactggtggctgatcctgaaggaggccctgcccttataggatctgaagaggaaagagagacacagcttgcagagggccaccctgatttgtgcctaattgtgtttgagcaccgcttaagagaagtcttctatttatttatttattcattaagtttttgaagattctatgttaatattttaggtgtaaaataattaagggtatgattaactctacctgcacactgtcctatttatattcattctttttgaaatgtcaacccccaagttagttcaatctggattcatatttaatttgaaggtagaatgttttccaaatgttctccagtcattatgttaatatttctgaggagcctgcaacatgcccagccactgtgatagaggctggcggatccaaagcaaatggccaatgagatcattgtgaaggcaggggaatgtatgtgcacatctgttttgtaactgtttagatggaatgtcagttgttatttattgaaatggatttcacagtgttgtggtcaacattttctcatgttgaaaccttttaagaacctaaaatggttctaaatatccccttggacattttatgtctttcttgtaaggcatactgccttgtttaaatggtagttttacagtgtttctggcttagaacaaaggggcttaattattgatgttttcatagagaatataaaaataaagcacttatagaaaagaggaaaaaaagg

SEQ ID NO: 153933 - DNA, 404 bp, Homo sapiens; identical to SEQ ID NO: 144791
  misc_feature (1)...(404): n = a,t,c or g

SEQ ID NO: 153934 - DNA, 724 bp, Homo sapiens
  misc_feature (1)...(724): n = a,t,c or g
ggctgcgcgcgtgtgccgccgctggcaggaggccgcttcccaacccgcgctctggcacaccgtgaccctgtcgtccccgctggtcggccggcctgccaagggcggggtcaaggcggagaagaagctccttgcttccctggagtggcttatgcccaatcggtgttgggtgggaaggactcgtgtgggaacattagtgcagctctgcctccgctgtcggcccaggttttcacagctccagaggctgaccctcatccactggaagtctcaggtacaccccgtgttgaaggtgagagctccaggctgtgactgcacatcacctgcgacactctgggactggtcagtactctaggaagtgggtcaggcaccttgggggcccaacgctgctccgtggggatgtctgcttgcctgcctggttctcttttcctgctgtttcctccagcagggaggtatcagaggcggggacacccaagtaggcctggcatgggcagaaaggaggtcacagctaaggcggttagagtggggttggcaccagccacttgtctgtttcccttgtggatcttagcctgtcgtctcccaaccccagctgcccctctgtctccccgcagctggtaggtgagtgctgtcctcggctcactttcctcaagctctccggctgccacggtgtgactgctgacgctctggtcatgctagccaaagcctgntgccagttccataagcctnggac

SEQ ID NO: 153935 - DNA, 1331 bp, Homo sapiens
ggtctataagcctcgcccgttccgctccctggggcttccccgagcgccgtcggtggtcatggctgccccagcctcccggcaggtccgacgcagagcccgggcagcgccgcggccccgctcggccgaggactggtggtgggaccggctggcgccgaggggctcggggtaccacctgctgcagtccgacagcatgctgctggtgctgtccgaacccggccccgcccggccccgcgcacagcggcgcgcttcccgccgcactccccggcagccgccccggggccccagcgccgcggccaagcccaaggccgggctcaggtccgaggcggcggccgcgcccgcacccgcaccggcacccacgcccacgcccgaggaagggcccgacgcgggctggggagaccgcattcccttggaaatcctggtgcagattttcgggttgttggtggcggcggacggccccatgcccttcctgggcagggctgcgcgcgtgtgccgccgctggcaggaggccgcttcccaacccgcgctctggcacaccgtgaccctgtcgtccccgctggtcggccggcctgccaagggcggaggtcaaggcggagaagaagctccttgcttccctggagtggcttatgcccaatcggttttcacagctccagaggctgaccctcatccactggaagtctcaggtacaccccgtgttgaagctggtaggtgagtgctgtcctcggctcactttcctcaagctctccggctgccacggtgtgactgctgacgctctggtcatgctagccaaagcctgctgccagctccatagcctggacctacagcactccatggtggagtccacagctgtggtgagcttcttggaggaggcagggtcccgaatgcgcaagttgtggctgacctacagctcccagacgacagccatcctgggcgatttgctgggcagctgctgcccccagctccaggtcctggaggtgagcaccggcatcaaccgtaatagcattccccttcagctgcctgtcgaggctctgcagaaaggctgccctcagctccagcctggaccttgcccccaggtgctgcggctgttgaacctgatgtggctgcccaagcctccgggacgaggggtggctcccggaccaggcttccctagcctagaggagctctgcctggcgagctcaacctgcaactttgtgagcaacgaggtcctgggccgcctactccacggctctcccaacctgcgcttactggatcttcgtggctgtgcgcgcatcacgccggctggccttcaggatctgccatgtcggggtcagcagtcctgggtggtggccgggcgg

SEQ ID NO: 153936 - DNA, 1479 bp, Homo sapiens
  misc_feature (1)...(1479): n = a,t,c or g
gcggcacgaggtgaagacgcgtcgttgggttttggaaggcccgtgaaaacagccgtttgaagtttggcctgcgggtggagaacgtttgtcaggggcccggcccaagaaggaggcccgcctgttacgatggtgtcccatgagtttcaagcggaaccgcagtgacccggttctacagcacccggtgctgcgggctgttgccatgtccgcaccgggacgatcatcctggggacctggtacatggtagtaaacctattgatggcaattttgctgactgtggaagtgactcatccaaactccatgccaagctgtcaacattcagtatgaaagtcatccggtaattactattccgtctgagagaatggctgataatgcctgtttttcttttttgccgtctctgttcttaaggtttataatccagttccaatgctggtttatgggagcaatttcctttatccaagtggggttggctggattccattcttctggttaccgactttttgacttcgtcctcagtttgcctggttgctattagttctctcacctatttgccaagaatcaaagaatatctgggatcaactacctgattttgcccgacaaagatgacctctgngcccttggactccaagctgcctcctgttcattgttcttgtgttctttgccttattcatcatttttaaggcttatctaattaactgtgtttggaactgctataaatacatcaacaaccgaaacggtgcccggagattgctgtgtaccctgcctttgaagcacctcctcaagtacgttttgccaacctatgaaatgggccgtgaaaaatggcctgaaaaagaaccacaccctcccttacttacctggcctgaaggaaattctggcctttggacaataaatccctgataccaggctttttggtttggtttatggttaacagaatggctggcaatttcagggggtctttcaaaacttggtttggatataaaatatggttgtcctttggttttaaagcaatttattttccaaaacactaagggagcctttttggacatctggttaaacggtctttttgttttttttgttaaagtcttttacattttaataggtttttggaagacaatctaggttaaagcaagagcaaagtggccattgtttggcctttgaattgggcgggtgggaaggggaaagagggtacttggccacatagtttccctttttaactgcactttctttatataatcggttggcattttggttacttgctacccctgagtactttcaggaagactgacttaaatattcggggtgagtaagtagttggggtataagatctgaacttttcatctgcaaaggcaagaaaaatatttgacattgtgacttgactgtggaagatgatgcgttgcatgtttgctagtttgtatatgtttccatctttgtgataagatgatttaataaatctctttaaatactaaaaaaaaaaaaaaaaaa

SEQ ID NO: 153937 - DNA, 559 bp, Homo sapiens; identical to SEQ ID NO: 129394
  misc_feature (1)...(559): n = a,t,c or g

SEQ ID NO: 153938 - DNA, 507 bp, Homo sapiens
aatcatcgccgatgattttgcagcctttgttggacttcctgtagaagaggctgtgaaaggcatattagaacaaggatggcaagctgattccaccacaagaatggttctgcccagaaagccagttgcaggggccctggatgtttcctttaacaagtttattcccttatcagagcctgctccagttcccccaatacccaatgaacagcagttagccagactgacggattatgtggctttccttgaaaactgatttatcactctgagttcaagattcatcttcagaatcctgtatactgacaaacgtagaaatttgaggaaatgggaattcaagaagtcagaggatcaggagagtgatcaagagaatgacagtgccagtttttttaacttccaggtattaagtacaaattgtatccatggttattttttaaaagcagattagagtcaatccaaatattcattaataggggattgtttgaataaccagcagtgtagactaaaaaaaaaaaa

SEQ ID NO: 153939 - DNA, 445 bp, Homo sapiens
tttgaagaattcagttaaatatttattgaacaaatgcagagtaaatgaactaagggctgttataaccttaagttacaacaaacaacttcaaatattcagagggctgtcacacagagaatgaaagacttgctcagtatttctccaaagggcagaacttgaattatatctcaataaagctgctgttaaaacaaaaacaaaacaaaacaaacaaacaaaaaaaaacaatgaagcagtggcagcataggctcaaagtccttgaaaaggcaagagagatggggacacaatcataagtgattttgcctttgacaggaaggacctttcctgtactataataggaagaatgggaaggtggatgaattttaggtgagtacagagtactgtcttggcaaacatgtgtttctcatctttcaccttcattaaagtgaacctttaatgcaaattcacc

SEQ ID NO: 153940 - DNA, 2094 bp, Homo sapiens
  misc_feature (1)...(2094): n = a,t,c or g
agcggccgcgcgctctgagtacagcttcccgcggagccggccaggtcctccagggcaccgagaaagccggccagaacggcggcgccctatcccggccgcagcgatgtctgacggcgccccggaactgacggtctggtacgcaggggcgctcggcggcaacggcggctttaaacgtcatcgcgggcgcgacgcctgagggacagtctggggtttggctgtccggacggtgcagcggcgaggcccggccgcgaagatgccagtggcggtgatggcggaaagcgccttttagtttcaaaaagttgctggatcagtgcgagaaccaggagctcgaggccccgtggaggaattgctcacccccaaggtgtatggtcagcttctagctttatatttgctccataatgacatgaataaatgcgagatatctttggaaaagaataccacctgctataaaatctgcaaattctgaacttggggggaatttggtcagtaggacaaagaatctggcaagagagatttccctgggatctatacaaccatcaaccgctcaccagtggtctgagaccggtccagccaatttatgggaagcactttagagatgcaaccagggagaccgcgcctttgcccctggtctcctccaagcggtatactttcaatccatccgcccgatgatttttgcagcctttgttgggacttcctgtaggaagaggctgtgaaaggcatattaggaacaaggatgggcaagcttgattccaccacaaggaatggttcttgcccaggaaagccagtttgcagggggccctgggatgttttcccttttaacaagtttatttccctttattcagagccttgctccagtttcccccaatacccaatgaacagcagttagccagactgacggattatgtggctttccttgaaaactgatttatcactctgagttcaagattcatcttcagaatcctgtatactggacaaacgtaggaaatgttaaagtttgttattttccaatttattgggatgggctttaagcacctncaggcattcctttactatggtggataaaaatacatatagaatataagatatactatatacattttgtccataaacggttatgctgaatagttgttgaaacagttctcattttgtagtatttaataatctggatggagcctgtcagtattacagttagttttctagtgactcgataaaataagatttcctgtttcatgtagaatagtgtttgtcaactgtcttttctctgtcccagcacatgccgtactcttatatgtaccattggttgataaattataatgattcatttggactggaagaaagattgtccccaggcaccagtatctgaatcactgggggattatgattcacccctctttgggagaacatgctctcttttcacccccccacctcctgagagccactaaatgtaagatacagaaacatagctgaggaacaaatagaccattttcccatactaaaacccagtttgttaaactttagattttttccccaataggtggggagtatatcccattggctggccaagtgggagggccttgcccatgaaaatgccaacttatttaaggccatttatgagacatattaacttgtgctgtcgccttttaagaaggagaaaacttaagtgtggaatgccattatatggggcaaagaagactatgaagatacatgatacacttttgtacaactatccctgcagcccgntgggttgccttatatttatcgcttggctcaagttctgccctttggagaaatactgagcaagtctctcattctctgtgtgacagccctctgaatatttgaagttgtttgttgtaacttaaggttataacagcccttagttcatttactctgcatttgttcaataaatatttaactgaattcttcaattatttcatctaagatagtttctggaaatttcactctcgatctttctgtggacacaatctattttgtcattgtgtctatatgaatctcttaagtagaaatgagttgtatggtgaatctgtgtagtgataattatataatttatttattttgaaaaaaaaaaaaaaaaaa

SEQ ID NO: 153941 - DNA, 354 bp, Homo sapiens
ggcacgaggtgtattcagggggcgacgatggccttctgaggggctgggacaccagggtacccggcaaatttctcttcaccagcaaaagctatgatgaacacatcctactgtgggacacacgaaacatgaagcagccgttggcagatacgcctgtgcagggtggggtatggagaatcaagtggcaccctttccaccaccacctgctcctggccgcctgcatgcacagtggctttaagatcctcaactgccaaaaggcaatggaggagaggcaggaggcgacggtcctgacatctcacacattgcccgactcgctggtgtatggagccgactggtcctggctgctcttccgttctc

SEQ ID NO: 153942 - DNA, 443 bp, Homo sapiens
tccagtgtggtggaattcggagcctgcacaggcatctcgacagcatctaggagcgcaaggatggcatgggggtgtgaaagggagggagaccatgccccaagatcaagcctgtgggaaagttgtcctgcaagtgtgaggagtgtgagctccagtgtccccaggtcttctcggggcccctagcaggggtttcagtgttaggtggaggtgtgactcagtgactgatgtacttcattcgcataggttgtaaatgagggaacgatgacttccctgcaggagaggaaaagtcttttgggggttctggggcggctacttccctttgatggagtttcttcttctccagtagaagagccacgtgctggagccattgtccagcctttgccctggaggagcagtgtctgggctttgtccctagattggtccactgggaaaactggaagggccgg

SEQ ID NO: 153943 - DNA, 537 bp, Homo sapiens
ccggggagcttcctcacagacagtcaccccggggagcttcctcacagacatcaacggcctaactgagaacactcatttcctgtcatctagtggtgttgatgcttctctttctccacacagggggcgacgatggccttctgaggggctgggacaccagggtacccggcaaatttctcttcaccagcaaaaggtaacctcccaagggccagcactcggtgcccacaccagcccccgcgttccctgggtcaccagccctcccgttccctgggtgggtctgtgtgctggacactggttcagaagccgcctctgcttgcagacacaccatgggtgtgtgcagcatccagagcagccctcatcgggagcacatcctggccacgggaaggtgagtccccaggaggctctcgggcccttctcgtctctttcgctgtccccggggggctcctgggcccttcttccctctttcgctgcctttcctcctggcaccattgcagcatttcgtctgccagtgcttcgccggagtgtaggtatatgggtttg

SEQ ID NO: 153944 - DNA, 387 bp, Homo sapiens
gggttggcaaatacgcctgggcagggcggggtatggagaatcaaggggcacccttttcaccaccacctgctcctggccgcctgcatgcacagtggctttaagatcctcaactgccaaaaggccatgggctgtggctctctgagggcttagactctggccttattaccttttcctaagctgtagaagaggtcctgctggcccgagtggacgtgttgagcgattgctggatgaaagactagcggaggtcctgcctgccctgtgacgctacctcccaagggacagtaacggcctccccaggggcttcctcccgagggtcgccccacacatgctgcttcgaggggcccctgtggctgtctctgaacattcagcatcttcactcctcctcgg

SEQ ID NO: 153945 - DNA, 1822 bp, Homo sapiens
tcagaacgcctgataaccgcttcgattcccggtcgaccacgcgtccgacaactgctccgcctggtggaatctgaggtcagtgacttgcacttgttctgtggggcagaagggacctgaatagagagggttggggaggaggctgtgctgatacagacatttttctaaaacgatctctcttcaatggtgagctatatataaacgttctaagataatgtggagtctatttttaagtcgtattgcgttctacatccaactccaagaggaagtcacctcatgtgtcaccagcagaagggctgaagtgacaggatgttcattgacctgtcagtggatctgaaagttctctaatgagagcctggacaagcattcttaggttgatgctggtgcccaaagtatctttgatcatcctgggtttagatgccatttcttactgattattggaaaagcactagaagagccacgtgctggagccattgtccagccttgccctggaggagcagtgtctggctttgtccctagattggtccactgggaaaactggaagggccggggaccagcccttgaagatcatcagcagtgactccacagggcagctccacctcctgatggtgaatgagacgaggcccaggctgcagaaagtggcctcatggcaggcacatcaattcgaggcctggattgctgctttcaattaccctggcwtccagaaattgtgtattcagggggcgacgatggccttctgaggggctgggacaccagggtacccggcacatttctcttcaccagcacaagacacaccatgggtgtgtggcaagcatccagagcaagccctcatcgggagcacatccttggccacgggaaagctatgatgagacacatcctactgtgggacacacgaaacatgaagcagccgttggcagatacgcctgtgcagggtggggtatggagaatcaagtggcaccctttccaccaccacctgctcctggccgcctgcatgcacagtggctttaagatcctcaactgccaaaaggcaatggaggagaggcaggaggcgacggtcctgacatctcacacattgcccgactcgctggtgtatggagccgactggtcctggctgctcttccgttctctgcagcgggcccccctcgtggtcctttcctagcaacctaggaaccaaagacggcagacctgaagggtgcaagcgagttgccaacaccctgtcatgaatgcagagaggataacgatggggagggccatgccagaccccagagtggaatgaagccactcacagagggcatgaggaagaatggcacctggctgcaggctacagcagccaccacacgtgactgtggcgtgaacccagaagaagcagactcagccttcagcctcctggccacctgctcccttcctatgacccatgcgctcccccctctgggaagtgggaggggaactgagcttgaaatccatgaagcccccttccccacaaggaaaacccaggagggagactgccgagtgagtgccccgggacccaccctcatccagagatgccttactgcagccctgcacggtgcctgtgccactgatggaatcccacagtgtagtcagaaaagctgttgacttcctcttaaatcagcttccctgctggggcccctgaaagtggactgggtgattctgtctggcagagagtggggaaaagacgcggtttccagcttgcagatttgttaagtttctcaggcagattttgactttcagcctttcatacttgttctaagcaactaattgtattaaaggaagttttttgaaaaaaaaaaagtcggacgcggccgga

SEQ ID NO: 153946 - DNA, 438 bp, Homo sapiens; identical to SEQ ID NO: 146912
  misc_feature (1)...(438): n = a,t,c or g

SEQ ID NO: 153947 - DNA, 671 bp, Homo sapiens; identical to SEQ ID NO: 146913

SEQ ID NO: 153948 - DNA, 3411 bp, Homo sapiens
  misc_feature (1)...(3411): n = a,t,c or g
ctgtgtccatttgaaggctaaagaaactgcagctcagaccagttcagcaactctcctacatcgtgtggctaaagctaagaattgtgacccatttttctgaatccaggtccccgcgatgccctgggttcagaccctaacaccctcccgtccctgagtgctggggatttaaggcagcagtgcctcctttcaggaaatcacacacacactggaaactcctgcatacttctcttactataatctgtcaccaaagactggatattcctgtgctggggctcgtgccagcgcctcgggctgccaggtgctgctttccaactcccacatgggctgccctccccctactgctacccacagggcccccactccacctgctcccagacgaggccaactcctggccaagcttaggggcacagcggaggcgctctgtttctgatttttctcgccttccttggagatgcctgtgcttggaagggaaggcagaacattgcatcttggaacaaatctgcttttgatcatgcaaatgaatgcctggataatgtaggcagactgtcaatttcaccagttagaaagaaagagaaaagggggagaaattccccatgacagcgactgatgaagaatttcaatagaaagctgctacttcagaaaataagatcatttgctgcgaatggagaacatctcaggcagccctgatgctccaccggctctgggcatcaccagcggccccagggaaaaagaaagaaatgggaaacagcatgaaatccacccctgcgcctgccgagaggcccctgcccaacccggagggactggatagcgacttccttgccgtgctaagtgactacccgtctcctgacatcagccccccgatattccgccgaggggagaaactgcgtgtgatttctgatgaagggggctggtggaaagctatttctctttagcactggtcgagagagttacatccctggggatatgtgtggccagagtttaaccatgggctgggctgtttgagggcctgggcagagacaaggccgaggagctgctgcagctgccagacacaaaggtcggctccttcatgattcagagagagtgagaccaagaaagggttttactcactgtcggtgagacacaggcaggtaaaggcnttaccgcattttccgtctgcccaacaactggtactacatttccccgaggctcaccttccagtgcctgggaggacctgggtgaaccactattctgaggtggctgatggcctgtgctgtgtgctcaccacgccctgccttgacacaaagcacggcttgccccagcagttgagggcctgcagctcacctgtcaccttgcgtcagaagactgtggactggaggagagtgtccagactgcaggaggaccccgagggaacagagaacccgcttggggtagtcgagtcccttttcagctatggccttcgagagagcattgcctcttacctgtccctgaccagtgaggacatctcctcctttgatcgaaagaagaaaagcatctccctgatgtatggtggcagcaagagaaagagctcattcttctcatcacccccttactttgaggactagccaagaacagacacaatggttcatgcccataaggaacagaagttccaactattgcctgggatcttgcgaaaagcgaggttccctgatccctgggagcctcacgtattttagaagccaagagaagccacatggagactcaaattcgcatcttctctatccacatcatgaccaaaggaacccctccctggtgactgatcacggctgaggcatcacgaaacattggatcatgacatgtccggcgaagcttgggaacagcccagcatgtatgtatgcacacattgtgtgtgtgggaaggacacagccactctcacaagaaagggcaccacgactgctctccaaggaactggacctgtccagacagttacactccaaggtcattggagagaacttctgtatgggcaagcctgagagggagaggaaacaaaagctgtgtcctggcagaaggtctgggtttgccaaaaagggtgccccctgaaatggaaactacttttaaactaaatcccattagggaccttcttggtaatgctttccctctcttttttaaaaggaacttcgtgaacacctaaaacatttagccccaaaggaccttccttagcccttcaattgggagaatacctttggtctgctccctgcacccaaagcccatatgggtggaagtcaagttggcctccctggttctgcagagggcccagaagaatgagagagaggaagactgctggcagggaaatcgaggaggcgagactagaactgcaccagcttccctgatgtctgcagccatggctttgcagcgcagacagagcttctctgggatgctgggattcttgcctgtatgaatgcatcaagtattcatttattgcccgaataggcattgcattaagtcctctgtaaggtgtccaggcaagccaaaaaaaaaaaaaaaagatgcgtaaatcctaacccccaacagaggtgttcacagtgtagacagggaaaaaatgtataaacaaatgtgtaaaaagagaaatcagctcatggcttaggatggaattagagacaggtgagggacactcaggagctcattttccagctgctcttcagagtggaagggctggctggatcgggtaggtaagaatagctggattttttagaaaagaaatggatacagtctaaagaattaactcacccggtactttattctaagaagggtctggcatccatatgaggaaaaatgctcagctccaggaaagatggggagtccaagtggattaatgatgtcatgcataattttaagagacaagggagaaaacacaatgtatagccagagaaggagaagctcccattccaaatcctactaggaagagagtgggctgcagatgaatctgtgactcatgtttccctgtttcaaagggatcctggggaaggaggggaacatgcttgcagtatctctccctgtctgtctgctcacataagcattccgtccatctgagctcatcgtgctactggtatgtgtatgtgcagttacacagttttctgtatcatagattctagtgtgtttatacaaggagacatctgtggtttccccaaccgttccaaaaggctatttcaaaggaaccagccaacgtatgagaaatgaatgtaacactgtggacattgacttcccgcataaggcagggtgaccccctgaactccagatgtttgcacagtatcttatgtgttgttttccgttgtgacgaatgtgattggaacatttggggagcacccagagggatttttcagtgggaagcattacactttgctaaatcatgtatttattcctgattaaaacaaacctaataaatatttaacccttggc

SEQ ID NO: 153949 - DNA, 688 bp, Homo sapiens
gcaggaaggcgccatcatggtgagtggaccatccgccatacaaaaggaccgaaaaggttcgggcgcaaaggagcccaaagagccaggatatctaccttggggctgttggtcaagttatacaggttttctggcccagaagaacccaactccaacattcaaaccagggttgtgttgaaggaggttgtttatgagtcgcaccaaaccggcccgcctctgtcccctttcccggatgatccgggaagatgaagctttcctggccgggaaaaaaaaaaacccggccgtggttgtgggaccccaaaaactaataatgtgcggggttcagaaggggaccccaaaactgaaagtatgtgccctgggcggtacacaagccgggccccacaaacgcatccctcagggcgagggggcaaagatccatcactttcgaccagctggccctggactccccctaaggggctgtggcactgtcctgcttttccggtccttccaaagggccgagaggtgtaccggcatttcggcaaggccccagggaacccggcacagccacaccaaaccctacgtccgctccaagggccggaagttcgaggcgtgccagaggcccgacgggccagccgaggctacaaaaaactaaccctggatcctactctcttatataaaaagatttttgctgacagtgaaaaaaaaaaaaaaa

SEQ ID NO: 153950 - DNA, 859 bp, Homo sapiens
cgactacagaaacgctatgtattagaggaagctgagcaactggagcctcgagttaatgctctggaagaggacatggatgatgtggagtccagtgaagaggaagaataggaggatgagaaggtggaaagagtgccatcacctgatcaccgccggagaagctaccgagacttggacaagccccgtcgctctcccacactgcgctacaggaggagtaggagccggtctcccataaggcggagtcgatctcccaaaaggagaagccccttccctcgccgagaaaggcatcggagcaagagtctcaagacgtcaccgcagcaggtcccgagatcggaggcacagatcccgttccaagtccccaggtcatcaccgtagtcacagacacaggagccactcaaagtctcccgaaaggtctaagaagagccacaagattagccggagtagggaatgagtaatggactcagtttggttttagtccacatggcctcctgtggatataaggatatctgtatgtggaaggattaagatctcccccaggcagctataagaatattttagtttttttcttatcaagtttctcaacctttatttttaatgaaggaggtgctgagttttgtatctttttaatcataatcaacatcagtttttgacccaactaaccttgactgtattcaaactttatggggagtataaaggatctggaggttggggatatgactgacaaggaaaggctgtggccacatgatgacaccttttctcatttttaaaaaaccggacacacatgttacccatttcgctgtagtttagtttttggtttgttgtggttggagctgctttgagaatcatgcgcgtggcgaaatcc

SEQ ID NO: 153951 - DNA, 463 bp, Homo sapiens
tattataaatcatttaatattcttgaagttaacaactgataaactcatttaggcaaacattttggatttaatgatctaaagctcacagatgcatgccacatctagctaaaagtacataaaaagcgcacctctggaaataacagccctccctctggctgaatgcagcggcagggcaggggtctgcacaggcctgacctggtgttgctggagcgcggcatcccctcctgggtgctgctccgaaaggcaggctgggaggtgcttgctggggtgttccatggcagcgctgccaaccaagtctgggtctctaaaagccaccctcagtttataccaactgatcaggaaataggtggtgacagggccttgaagggtacatgccggcttcccttaagttgattagatgggaaaccaaacaccgtctttcaagtgtgaggctgtgccatgctccctcagggaggaggggcgc

SEQ ID NO: 153952 - DNA, 2471 bp, Homo sapiens
  misc_feature (1)...(2471): n = a,t,c or g
gcggccgcgcccccgttaacggcagtggcactcacccggctcgcgcggccccggcgccccacgcgcgcgcgtcgttctcccgcccgctcgctccccggcgctcacacctgagctcactcgcgcacgcccgcccggcccgagaaccgcgccgccgcctcggccccgcggaagccccgccgcgccatgtcttcgcctcccgaagggaaactagagactaaagctggacacccgcccgccgtgaaagctggtggaatgcgaattgtgcagaaacacccacatacaggagacaccaaagaagagaaagacaaggatgaccaggaatgggaaagccccagtccacctaaacccactgtgttcatctctggggtcatcgcccggggtgacaaagatttccccccggcggctgcgcaggtgggctcaccagaagccgcatgcctccatggacaagcatccttccccaagaacccagcacatccagcagccacgcaagtgagcctggagtccaccagcctgccccatggccccggctctgctgcacttggtatttccctgacagagagaaccagcagtttcgcccaaatcctactctgctgggaaatctaaggcaaaaccaagtgctctgtcctttgccttacatttccatatttaaaactagaaacagctccagcccaaaccttgtttatggggagtctggttggatgtcatttgaggatcattgtgcccctagaggtgccattagcagaatttgccaagatccgagaaaaattttagctttagttctatttcagcagtcacctgacgtccttgtctatggtcttaaaaacaagaaggcacacatttgagaagatgagattaaggttaggagaaaacctcaggtcattgcatgctttttagtatgggccaataaaatcttaacaccctgtgggagagtaagaactaagggaatgagtttgggcggcccctcataaaggaccttagaggcagggaacagcaatgccaaatttccctctctcgtgagatgggggatcctgtgcaggctgatgaggcacccatgaagaaaagccgaaaaagcatgcatcttaggaaatagccccttcaattccagggagttcaacattgccaaagaatgaggctgggagacaggtagctccgagggaggacttctgggcatgagatcttcggcacggccaagccccagcattcgccttcagccccaggaccaggcttccacccgggagattccaagccaagggcttgccttttcagggagttcacctccttgaggccattttcaggagtttttgggaagttgacccacgggaccagggtgggaggaatagacttcttagtttcatttttggggacattttgaggccagaggatttgaaagctttggaaagaccagataagaaacctgccctttgtctccctagggacatgagacaccacattccatttgtgctagaaaaacctatccactgatgagtctaactgttccaaacggcttcccacctgggtgttgcacagctgcctgtgttccatttgttcacttggggtggcattcaggttgttcctccgatttttaggatgagtttcctgtctagagatgtcctagtctgctcacttggctggtggcagntatgtgtaccctgcgtctcttcgaaaagccagaggcgttcacgcgagtcatgacgaaactccagaacagtgcttgtggagggcctgactgtcctgctcacccacagccgatctgctgcaggtcagcaactgtgtcgtgagcagctgccaaccaccagcctttctgggtgctgttctccagttcacgtctgccagctgggagaagggcagaaggcagaccttggtcagaccccagcgccccctccctccctgagggagctatggcacagccttcacactttgaaagaacggtgtttggttttccatcttaattcaacttaaggggaagccgggcatgttaccctttcaaggccccttttcaaccaacctattttcctggattcagttgggtataaaacctgagggtggccttttaagaagaccccaagacttgggttggccaggggctgcccatggaaacaccccccagcaagcaccctccccagccctgccctttcgggagcagcacccaaggaagggaatgccggcgctcccagcaacaccccaggtcaggccctgtgcagacccccctgccccgccgcctgccagaaatcccagaagcatcccttaatgccttcctcagtccttcagccagaaggaaaggcttgttaatttccagaagttgcgctttttaaggtacttttaagctagatttggcatgcatcttgtgagctttagattcattaaatccaaaatgttttgcctaaatgagtttatcagttgttaacttcaagaataataaatgatttataataaagctcctgcatttctctccaaaaaaaaaaaaaaaaaaa

SEQ ID NO: 153953 - DNA, 2740 bp, Homo sapiens
  misc_feature (1)...(2740): n = a,t,c or g
tcggcacgagggtaggtgtagcgtggcgctcagtccgcctgctactcggtcccggcgctgggctgaggggaggggttgtcttaaaagtctctccttccccctgtaggggcggccggcgagtcccagtgagagcggagggtgccagaggtagggggccgagaaacaaagttcccggggcttcctccggggccgcggtcggggctgcgcgtttgaccgcccccctcctcgcgaaggcaatggcttccaaactcctgcgcgcggtcatcctttggcccgcccgggttgggcaaaggggcccctgtgtgccagaggatcgcccagaactttggtctccaagcatctctccaagcggccacttcttgcgggagaacatcaaggccaagcaccgaagttggtgagatggcaaatcaagtatatagagaaaaagtctttttggttccagaccatgtgatcacacgcctaatgatgtccgagttggagaacaggcgtggccagcactggctccttgaatggttttcctaggacattaggacaagccgaagccctggacaaaatctgtgaagttgatctagtgatcagtttgaatattccatttgaaacacttaaagatggtctcaatgcgccgttggattcacccctcctagcgggaagggtatataacctgggacttcaatccacctcatgtacatggtattgatgacgtcactggtgaaccattagtccagcaggaggatgataaaccccgaagcagttgctgcccaggctaagacagtacaaagacgtggcaaagccagtcattgaacttatacaagagcccgaggagtgctccaccaattttccggaaccgagaccgaacaaaatgtggcccatacgtttacgacacttttctcaaacaagatcacacctattcagtccaaagaaagcatattgaccctggcccaatgggaagaaccatggaatgatgtgggtcattcattccaatagtgtggtgtagtaattggtgctgttgtccaaatttagaagcctagctgaggtagccttgcagcatcttttctagttgaaatggtgaactgataggaaaacaaatgagtagaaagagttcatgaagaggccctcctctgcctttcaaaaggctggtcacctacacatgtttaaggtgtctctgcacatgtctcaagcccatcacaagaaagcaagtacagtgtggatttcaaatggtgtgtaacttccagctccagctgggtttttgacagctgttgctgtgggtaatatttttgacatgtgatgggtgatagtcttctggttctccccattccccacaaagggctgtttgaaccacaggcaccagaaaagcctgaggattgaatcctgagggctctagcccaggctttgtccccaggcttttctgggtttgtgcccctcctggtaaccagtgaaattgaagctactttactcatagtgggttgtttctctggtcttgagtgactgtgtccacagttcatttttttccggtaggaataactccttttcctacatcccacgcttcaatagagtctctccttttcagacatcttaggatgaaagaatttggctttttttttttctttttttttttggacatctgttttcactctttaggcttttaaacaatagttattgcttttatccctctcagattctaataactgagagcgatggggctatattgaatctctgtatgcactgagaactgagctatgaagaggatcttattaaactgctggtctgactttatggattgacactgttcctttcttttattgtgaaaaaaaaaaaaaaaaccctgaaagtcttggggaaccccctaaagtcttttggggaatcctcaaaaagcatggggaagttaagtatttagctacataaatgttgtaagattcatatcttatgtatagaagtaataagaccatttggaattactggactaattgaatagttaaggtttcctattcgggacaataaaatggtattttgaaagtgctgctaactattgatgctgacagtggtttcactcctatgagtgacccaaacatattataaatatgtggtcaaagggcaaattcgcggcacggnccnacttttgggtgggttgagcagaatgttgtactagctgtgcctggactgagtataacagctttatgattatgagaaccccaattctttatttttttcttctgttccaaagattcctcctatggcctggccataaagtctagaattagatcctaatattttgtcattcattataacatatcaataaaccatttgttaaaagatttgcctgggtttccagacttgggtgggccaccttggaataattcttgctgtcttctgggggagggatgatggaaatttattcctggctgccttaaaaatatggatcccttcttcacccctcatggactgtcccccagtgagtgtcctttactattcttgggggagtgactcctgtgctaacttttgcatactggcgagacgatgcgaggcctattctaccactttactgttgttctctcccctctcccactcatttatcgttccccctccatctcatgtctactcaacctgtcatccgcctccttccgcttcctcttcgcgctcgcatcttcttctcccctgcctctcctctgtgcgcgtccttctcctcctgttcccctcccatctcccctattcgccgtcgttctcctcctctagcctcgactcc

SEQ ID NO: 153954 - DNA, 445 bp, Homo sapiens; identical to SEQ ID NO: 132947
  misc_feature (1)...(445): n = a,t,c or g

SEQ ID NO: 153955 - DNA, 622 bp, Homo sapiens; identical to SEQ ID NO: 132948

SEQ ID NO: 153956 - DNA, 2292 bp, Homo sapiens
atgaaggcagagatttgcaagtcaaggactgtcaaggactggcacaaccaccagaagctaggagaagggaataaaactgattctcccccacaaccctcggaaggaactaacactgccaacactttgatcttggacttctggcctctagaaatgattgcatgctgttgggaaacttttcctcagcggctgactgcagagctgtttatgaaccccacacacagatggcatggttacaagaaccagagtgtaggcgcgctgcgggcacctctcggacaaggccccagccgtcgcgggttgccgggcagagtcggacgccgccagctcttcactccacgcccacctctctcctggagcgctgggccttcgctggccgcaccggcagccatgagctcggagatggagccgctgctcctggcctggagctattttaggcgcaggaagttccagctctgcgccgatctatgcacgcagatgctggagaagtccccttatgaccaggaaccagatcctgaattgccagtgcatcaggcagcttggatcttaaaagcaagagcgctaacagaaatggtatacatagatgaaattgatgtagatcaggaaggaattgcagaaatgatgctggatgaaaatgctatagctcaagttccacgccaatcacacaagctggaagacccattacaggtttcctcaggcccagcacgcagagtggaaggccaggcactatggaacaggctatcagaacacccagaaccgcctacacagcccgccctatcaccagctcctccggaagatttgtcaggctgggaacggttgggaatgtatcgtgaagcagaaaaacagtttaaatcagccctgaagcagcaggaaatggtagatacatttctgtacttggcaaaagtttatgtctcattggatcaacctgtgactgctttaaatcttttcaaacaaggcttagataagtttccaggagaagtaaccctgctctgtggaattgcaagaatctatgaggaaatgaacaatatgtcatcagcagcagaatattacaaagaagttttgaaacaagacaatactcatgtggaagccatcgcatgcattggaagcaaccacttctattctgatcagccagaaatagctctccggttttacaggcggctgctgcagatgggcatttataacggccagctttttaacaatctggggctgtgttgcttctatgcccagcagtatgatatgactctgacctcatttgaacgtgccctttctttggctgaaaatgaagaagaggcagctgatgtctggtacaacttgggacatgtagctgtgggaataggagatacaaatttggcccatcagtgcttcaggctggctctggtcaacaacaacaaccacgccgaggcctacaacaacctggctgtgctgggagatgcggaaggggccacgttgaacaggcaagggcactattacaaactgcatcatccattagcaccccatatgtatgaaccgcatttttaattttgcaacaatctctgataagattggagatctgcagagaagctatgttgctgcacataagtctaaatcaacatatatcagaccatgcggacatcacaacatttaattaaacaattaaggcagcattttgctatgctctgattgttccttagaccacatatgttcttatgaagcagcattatgcaaggggaaaaaagcactatgtctgtgtacgtattacactatatacatacatacacagacatagggtaatacgtatattttaacaaacctgtccttgatattagttaaggtgacacataagggtgaccccagaatgtgtaatgccaaatttcatagtaatagtaactttataaaataatattataaaatacgggatttaaacctttctaaatagatcctgaaactgtctctcacattatatagtagatgtttgtttaataaatgtttaccaaaacattttggtgaatttcctcaatgttttataaatgtacattttttaagtccttaagctgactcttagccatcatgtagcttaaggagtctgaaatctgccattaaaactgcacctttaagccaggtgtggtagcatgtgcctatagtcccgagctacttgggaggtggaggtgggaggattataaatagagactttccttaagactttaaaaatgtatttaaaactattttttattaaatactttgtgatttcctacttaagctttaaaataaatcattgtgtaaacaccaaaaaaaaaaaaaaaaaaaaaaagggcggccgct

SEQ ID NO: 153957 - DNA, 303 bp, Homo sapiens; identical to SEQ ID NO: 136922
  misc_feature (1)...(303): n = a,t,c or g

SEQ ID NO: 153958 - DNA, 438 bp, Homo sapiens; identical to SEQ ID NO: 124105

SEQ ID NO: 153959 - DNA, 1440 bp, Homo sapiens
atgccgagggcggagccaagagcgacactgggggagcaggaaaaggcggggcttccgcttggggcatggaggctgtacctcttacgtcacttccgtaaacaaacggagctgcggaggagcgggtcccgggatgtgaccggggctctgcttgtggctgcggcggtggcttctgaggctgtcgggtctttgcgggttgcggaagggggccccaatacccttcttcttcaggtcttaagaaggctggaccgtggtgcaataaggaacttaaaacaatggaagagcggaaagtgaagaggaggagtcctaagtcttttagtgcccactgtactcaggttgtcaatgtccaaaaaaaaatgtccattccagtgagtaaaaagcacaagggttttcaaatcctgcatcacaagtcaacttcacaagccgaccaaaagttaaaaaagaagtgatgaaaagaaaagaccaaacctcaagggttggaagaagggcaaaggcactccagtcaactcccgatccaacactccttcctcacttgatgtctccagatgttccaggaagatggagagagggctgctcagtctttttgaatgatttccactcctggaaaactttcaaacattttggaaattgaatgttccatttgaacagatggaacatgtttccggggaattgcaggagaaattagctcgcttgaatttggagctctatggggagttagaggaacttcctgaggataaagagaaaacagccagtgactcccaatctggataggcttctgtcagatttagaagaattgaattcttccatacaaaaactccatttggccagatgcacaagatgttccaaataccttccgctagctaaaatgaaatgtacgtttgctttccttgtgatttgaagagaagccagcagtcctttactttttccagccaaattcccagtagcagaatccatcttcccacaaccagggaatttaaagtaattaaaagtgccaagttccaatgatccgttttcacttactgctttttagtaaatggtgactccgctgtaaattccgccattaactgggagggcctaagcctttggttgaaggcttcaatcaggaaatgtgacgcagagaattgtgcctgctgtgcttcatattgttgccttatggggattatactttgaaatgccattggtgctgatgttccttgacagggcggagggatttctctttcctgagctcaccaaacttattccagtgttgagtcgcaagctgttgatgcacaggcgtccttgtggcaagcccagctttcaagtttatgttagacaatcagtacacatgctggtgtgttttccaatggccagtgataagaaattaaataaagtatttgtgagatttgctattttttaataaaggtaattgttttaaattaaaaaaaaaaaaaaagggcggccgct

SEQ ID NO: 153960 - DNA, 177 bp, Homo sapiens
atggacgcagtggctgtgtatcatggcaaaatcagcagggaaaccggcgagaagctcctgcttgccactgggctggatggcagctatttgctgagggacagcgagagcgtgccaggcgtgtactgcctatgtgtgctacagcacctggggtacataaaagatatttccggaaaataa

SEQ ID NO: 153961 - DNA, 189 bp, Homo sapiens
atggacgcagtggctgtgtatcatggcaaaatcagcagggaaaccggcgagaagctcctgcttgccactgggctggatggcagctatttgctgagggacagcgagagcgtgccaggcgtgtactgcctatgtgtgctcatttcagaagccagatcaaggcattgtaatacctctgcagtatccagttga

SEQ ID NO: 153962 - DNA, 4512 bp, Homo sapiens
cctgcccaagagtccaccaggccatggacgcagtggctgtgtatcatggcaaaatcagcagggaaaccggcgagaagctcctgcttgccactgggctggatggcagctatttgctgagggacagcgagagcgtgccaggcgtgtactgcctatgtgtgctgtgagtatgatacggtggacccctgtctatggtatcttgttatggcagcctgaacagaccaatacagattttggtactgagaggaggagtattgctgtaacaaatacctaaaaatgtggaagtggccttagaactaggtaatgagtagaggctggaggagttttaaggtgtatggctcaacagacaaaacaaaatacccatcgtaaccttgtacccgcccagtgctcaaaagctgctgcttttccccttctgtccatgccctaatcccctcttccccctcttgcagccttctttgttccttagtccaggcctgggccactgcgcgctgtctggcaatctccaacacgtgattcttttcctcttcgacagttgtcccataccggatgttgaagcacagggctccatgctggagctgaatatctgcaaaccgtctagtcctcccattcaacacagaagtcatctgggacacagtgacattgacaccattctccagaatccgcctccccccagtgttaccgatgagcaccaggtcttcctccagagacccaagcttaatgaagtagtgagtgtccctcccctctatggtaaaatgtaggttttccaggtaatgggcattattgagaatggcagcaagccgcctgctatcttcattggctactcctataatatcagctgttactatgccatccttgatggcaaattttatacctttcccaaaaacagaagggacagcagcaaaccttggttgcttccctccttcaaggcaccgtccatcattgtatcggggagtcataggtagttggtccaaggaaatgaaattcctgagctgtttctggagttcacactgaatgcccaggatagtctaggaaagagaggcacagagcagatgcagcatggagttagacatctgtcagatacttggtgattgttctaattcaggtttgggaaatccaggtagtacattgtgtaattggaaaccaaatagctccaaccaacttctgatgtctgtgagacacaatattaaaaaaagaaaatgaaaaatcccatactttataagctttgttgaaaacttgaatggtttaggaaggaggttcaactgtttccatatgtgatgattaggcgttgtccatctgccagcaacaacatcataatccctttgccccaggtgcactaatttagtaaggaaatcatagagtcctccatgaaaaccaataatgacctgaaagtcagggtaagtgtcatgatagatatcgccataaggtgtgtatagtatctcctttatgacctgacctcggctgctgaacacagctagtggggtacctgtattatcacaggctacataatattcttcaccactgcttaactccatggcaataaggtgaccttggagatcataatacagagatgtaatctccgagcttgtgtggttgtacaaatgagtaactcttatggggttggtaaggtctgcataaaagaactgaaggtgctgccctaggctggacttactcgcgacacgtcgcccaagcccatcatagtaatactgcacagtccagccagaagccttattgtaggctttctgcagcaggccattagaattatattcaaaaatatcatttcccctctgcctcagaaagccatcttcatccattttatactgaatttctcctaatctggtgatgcggtctcggaggtcatatcggagaggagtaagacgagcactcttcccatggcttaagaggttgatgtttccattcagatcgtaactataacgccactgggttttgtcatttacagaaacagtctgaagttgcccatcagcatcgtattcatagaagtaccttgttatattggcatctactcctacccttatgtcacatattaccatgcggcccacattatcatattgaatggtcatccagtaggcaattgcctttaggatttcatattggacttcaatgacttgtccattggcactgaagattttggtgtgtttcatcactgtagtagttatgacctgatttaaatcgtaattaattacactgaattttccaaactgctctgttctgccagagacatcaacatatcggtaaagatctataggcaaaggggtttcattgattacagcttgcatgcttgtgactcggaaattgttgtagctgtagtcgaaccgtgcattcacaaggccttcttcactgaatctgaaaatctggcgtccaataagaggtcctgcaggaaccaaaacaaaaacagtaagaagctaggcgatcaatgtggaagagtcagaaaggtctagagaagactcttcatatgttaatgtgacctgagtggtatcatagagaacctcagaaagccttgcttgcttggtgtacttgtataagactctgcgccctgtccccagatgcagggtctgtagcaatcggccatctcgactatagtcttggataaaagaagtgctactgtccggtggggtgtagatgttccggtagtagcccactgaaagcatggtttgtaagctgtgacgcaccatgctaggcatggtgactgagagcagacaatctggttggtcatactcaaagatgtaacgccgctggctgtgtaggagaagcatcacagactgaaacgagacaaaggcagaatagcatattatggacaactaaagttgaggcgactaaagaaaatactggtcatattccattttttcattccacgttcctctttgaataaacgtcaccaatcccgaaggtgaatatgtgatgttcacttcattatatctgcttacaggagaccacagaatgggtcgcccagtctggtcataaagaattcgaagggtgaattttcgatggtcatcatagatctttcctgtgcgggttatatgatcaaaatctatggagagtaggtttctgttgtgggcctatgagaaagagatatgaaatacattttaagcacagccttgttcccctcattagagcactgacaataggtttgcattgtgctctccgggcaatgagatgttgcatttgcccagggtagggttgactgcccctgccaggatgtggggctctgagctgaggccgatctccatcccgctggcaaaagtgacacgcagggaaccatctggattcacccgataggtactttgagtattttctgtagacagaagagcaaaggaggaagagggggaaggaagggaagagcaggaagcagaaaagagacaagagtgtctggtgtcaccacctaacaacagaatgaggtcttaatgacagggcagagagaaagcaatttctctttgtgcacttgtcctggaagtatctagctccacttttgtcagcttctccaggtcactgtggaagctgctgacctctccagtgggaaacgttgcattggtcaggtgtccctcggggtcatacctgaggaatgtaaccaatcccagctttgaagcgtctcggcagtgataacaggactttgcaaaataaatcattaaggccagattatagccttgggctgacactcttttcaggactccattgctgcttatagtcagccagtatacttgtccgccaggcaccacaagccatagcggcattccgcctgcatcacggcgaatgtgcactgaattgccattgctgctggtaatcgcgcccaagtcaccttcagaattgtaggtgaagttataaacatagtcccttgttatcaagttcagggtgtgtaggtgggttccatttacagtgaactggtacagttcctgatcagcgggtgaagcaatctcataaatgttcatgtcattcaggtgggcttggttcctgctgatggtacgaattcgaacatttccgaggtctgccacatagagggttccatcaggcgacactgctaaggaggaaggggctttcatctttgcatctttggcatagccaccatcacctgtgggagaaagacttgattttaacaattggcatcataagcatttacatgaacataccacagacatgatctccccattggtggttacttgctgaatgcggtttactttcctctcgtctgtttcagctatgaagagcagcccgctgtgggagacactgatggccctcgctgactctagagtggagtgaattgctaccttgctgaccaggaaatgatcgatgcctggcacctggcagtgaatggggcgtcctgcgatgatccgaacacgcctgttctcagaaatttgcagcacaatgttgttatccaagacatacaatgaattgtccataggatttactgcaaggtctgttggccactctaatcgcacctgtgaaacgaacagaacacataccattaggttaccatgtctttccatggacagttttaacttgaaa

SEQ ID NO: 153963 - DNA, 483 bp, Homo sapiens
ggcatctcccttgcacagttctcctcctcggcctgcccaagagtccaccaggccatggacgcagtggctgtgtatcatggcaaaatcagcagggaaaccggcgagaagctcctgcttgccactgggctggatggcagctatttgctgagggacagcgagagcgtgccaggcgtgtactgcctatgtgtgctgtatcacggttacatttatacataccgagtgtcccagacagaaacaggttcttggagtgctgagcatttcagaagccagatcaaggcattgtaatacctctgcagtatccagttgagaagaagtcctcagctagaagtacacaaggtactacagggataagagaagatcctgatgtctgcctgaaagccccatgaagaaaaataaaacaccttgtactttattttctataatttaaatatatgctaagtcttatatattgtagataatacagttcggtgagctacaaatgca

SEQ ID NO: 153964 - DNA, 2481 bp, Homo sapiens
aaatccttcttccaatgttcctcccctctctgtatgaaccctgtgttggggggcagaagatggaagcccttggcaagctcgatcgaaccaagctactaaattgctgagctcgttttaactgaagtgtgagaaggaggtttaaggcaagtagacaacatcctgttgttggggtgcttctctcttttttttgcacatctggctgaactgggagtcaggtggttgacttgtgcctggctgcagtagcagcggcatctcccttgcacagttctcctcctcggcctgcccaagagtccaccaggccatggacgcagtggcttgtgtatcatggcaaaatcagcagggaaaccggcgagaagctcctgcttgccactgggctggatggcagctatttgctgagggacagcgagagcgtgccaggcgtgtactgcctatgtgtgctgtatcacggttacattttatacataccgagtgtcccagacagaaacaggttcttggagtgctgagacagcacctgggggtacataaaagatatttccggaaaatgaaaaaatctcattttcagcattttcagaagcaagatcaaaggcattgtaatacctctgcagtaatccagttgagaagaagtcctcagctagaagtacacaaggtactacagggataagagaagatcctgaaggtctgcctgaacgccccattaataaaaatatcaccccttcgccctttattttctatcactttcaatatatgctaagtcttatatattgtagatacatacagtttggtgagctacaaatgcatttctaaagccattgtagtcctgtaatggaagcatctagcatgtcgtcaaagctgaaatggacttttgtacatagtgaggagctttgaaacgaggattgggaaaaagtaattccgtaggttattttcagttattacatttacaaatgggaaacaaaaggataatgaatactttataaaggattaatgcccattcttgcctaatataaataaaaataatcctcagtttttgtgaaaagctccatttttagtgaaatattattttatagctactaattttaaaatgtcttgcttgattgtatggtgggaagttggctggtgtcccttgtctttgccaagttctccactagctatggtgtcataggctcttttgggatttttgaagctgtatactgtgtgctaaaacaagcactaaacaaagagtgaaggatttatgtttaattctgaaagcaaccttcttgcctagtgttctgatattggacagtaaaatccacagaccaacctggagttgaaaatcttataatttaaaatatgctctaaacatgtttatcgtatttgatgctacaggatttgaaattgtattacaaatccaatgaaatgagtttttcttttcatttacctctgccccagttgtttctactacatggaagacctcattttgaagggaaatttcagcagctgcagctcatgagtaactgatttgtaacaagcctccttttaaagtaaccctacaaaaccactggaaagtttatggttgtattatttttaaaaaaaattccaagtgattgaaacctacacgagatacagaattttatgcggcattttcttctcacatttatatttttgtgattttgtgattgattatatgtcactttgctacagggctcacagaattcattcactcaacaaacataatagggcgctgagggcatagaagtaaaaacacctggtccctgctctcagttcactgtcttgttggacgagaaaagaaacaataacgataaaagacagtgaaagaaaataacgataaaagacagtgaaagaaaataacaataaaagacaaggaaaaaataacaatgaaagttgataagtacatgataagcgaggttccccgtgtgtaggtagatctggtctttagaggcagatagataggtcagtgcaaatactctggtccatgggccatatgaaaaaggctaaacttcactgtaaaaataataactgggaattctggattgtgtatgggtgttggtgaacttggttttaattagtgaactgctgagagacagagctattctccatgtactggcaagacctgatttctgagcatttaatatggatgccgcgggagtacaaaagtggagtgtggcctgagtaatgcattatgggtggcttaccatttcttgaggtaaaagcatcacatgaacttgtaaaggaatttaaaaatcctactttcataataagttgcataggtttaataatttttaattatatggcttgagtttaaattgtaataggcgtaactaattttaactctataatgtgttcattctggaataatcctaaacatatgaattatgtttgcatgttcacttccaagagcctttttttgaaaaaaagctttttttgaatcatcaagtctttcacatttaaataaagtgtttgaaagctttatttacctaaaaaaaa

SEQ ID NO: 153965 - DNA, 1123 bp, Homo sapiens
acagcattcgggccgagatgtctcgctccgtaggccttagctgtgctcgcgctactctctctttctggcctggaggctatccagcgtactccaaagattcaggtttacatcacgtcatccagcagagaatggaaagtcaaatttcctgaattgctatgtgtctgggtttcatccaccccgacattgaagttgacttactgaagaatgaaagagagatttgaaaaaagtgggagcattcagacttgtcctttcagcaaaggactggtcttttctatctcttgtaatacactgaatttcaccccccactgaaaaaagatggagtatgccctgcccgtgtgaacccatgtgattttgtcccaggccaaagatagtttaagtgggatcgagacatgtaaagcagcatcatggggggtttgagaatgcccagtttgggttgggtggaattccaaaattctgcttgcttgcctttttaatattgatatgctttaacacttttccactttatgcaccaaaatgtaggggttataataatgttaaccatgggccatgatcctctttaataattctactttgaagtgctgtctcccatgtttgatgtatctgagcaggttgctccaccaggtagcttctaggagggctggcaacctaaaaggtggggagccagagaattctcttatccaacatccaacatcttggtcagatttggacctcttcaatctcttgcccctcaaagcctgtttagatagttaagcgggccataagttaactttccaattttacatactctgcttagaaatttggggggaaaatttagaaaatataattgacaggatttattggaaatttgttataatgaatgaaacattttgtcatataagatttcatatttacttcttatacatttgataaagtaaggcatggttgcggttaatctggtttatttttgatccacaagttaaataaatcataaaacttgaaggaaaaaaatggaaaataggtaatcacaaaagaaaaaaatggtcgcgtttccacaatccctatgtaactttccttaatacaattttgaacccccttaaagggcactgggttctccggggtagtccctcgccctaaaaaatcgcgc

SEQ ID NO: 153966 - DNA, 404 bp, Homo sapiens
ccacagtgagtgactcggtggggctggaggaacccagggtgacccagagggggctctggagcgggtccctaacatctgaaaaagtcctcccagggaactcggagctggaacttccaggcagcttcgggggtgacatttgtatccggccagccgagcggggaaaggagaccttgtgtcctggcaacagggagagccgggactgggatggccacagctcagcctccaggtgaggagcccagggccctgctcgagctgtgacctccacggtcacggagtcctcggaaaaagagaagttgagcttgttcccctggtagaagatgccggagacgctcactctgaaccccgtgcacccgaagaccaccgcctgcaggaagccccccatgcctgtcaggaagttcacagcg

SEQ ID NO: 153967 - DNA, 587 bp, Homo sapiens
  misc_feature (1)...(587): n = a,t,c or g
aaggccccattgggctgtatgaccttagtccagtgcggtggaattcgctggtggctgggacgtggtcagggctgtggccgagttttggtgcagtcgtgttgagtggagccccagggaggaaaagtaccacctgaggggagtcatgtcccccgacgagtaccactcaggggtcaacaactctgtgtacaccaacgtcctggtccagaacagcctgcgctttgctgctgccctggcccaggacctgggtcttcccatccccagccagtggctggcggtggctgacaagatcaaggtaccctttgacgtggagcagaacttccacccggagttcgatgggtatgagcctggagaggtggtgaagcaggcagacgtcgtgctcctgggatacccagtccccttctccctgagtcctgatgttcgcaggaaaaatctggagatttacgaggctgtgacgtccccccagggccccgccatgacctggagcatgtttgctgtgggctggatggagctgaaggacgcagtgcgggcccggngcctcctggacaggagctttgccaacatggctgaacccttcaaggtgtggacgg

SEQ ID NO: 153968 - DNA, 6648 bp, Homo sapiens
  misc_feature (1)...(6648): n = a,t,c or g
atggaccagccagaggccccctgctccagcacggggccgcgcctcgcggtggcccgcgagctgctcctggctgcgctggaggaactgagccaagagcagctgaagcgcttccgccacaagctgcgcgacgtgggcccggacggacgcagcatcccgtgggggcggctggagcgcgcggacgccgtggacctcgcggagcagctggcccagttctacggcccggagcctgccctggaggtggcccgcaagaccctcaagagggcggacgcgcgcgacgtggcggcgcagctccaggagcggcggctgcagcggctcgggctcggctccgggacgctgctctccgtgtccgagtacaagaagaagtaccgggagcacgtgctgcagctgcacgctcgggtgaaggagaggaacgcccgctccgtgaagatcaccaagcgcttcaccaagctgctcatcgcgcccgagagcgccgccccggaggaggcgctggggcccgcggaagagcctgagccggggcgcgcgcggcgctcggacacgcacactttcaaccgcctcttccgccgcgacgaggagggccggcggccgctgaccgtggtgctgcagggcccggcgggcatcggcaagaccatggcggccaaaaagatcctgtacgactgggcggcgggcaagctgtaccagggccaggtggacttcgccttcttcatgccctgcggcgagctgctggagaggccgggcacgcgcagcctggctgacctgatcctggaccagtgccccgaccgcggcgcgccggtgccgcagatgctggcccagccgcagcggctgctcttcatcctggacggcgcggacgagctgccggcgctggggggccccgaggccgcgccctgcacagaccccttcgaggcggcgagcggcgcgcgggtgctaggcgggctgctgagcaaggcgctgctgcccacggccctcctgctggtgaccacgcgcgccgccgcccccgggaggctgcagggccgcctgtgttccccgcagtgcgccgaggtgcgcggcttctccgacaaggacaagaagaagtatttctacaagttcttccgggatgagaggagggccgagcgcgcctaccgcttcgtgaaggagaacgagacgctgttcgcgctgtgcttcgtgcccttcgtgtgctggatcgtgtgcaccgtgctgcgccagcagctggagctcggtcgggacctgtcgcgcacgtccaagaccaccacgtcagtgtacctgcttttcatcaccagcgttctgagctcggctccggtagccgacgggccccggttgcagggcgacctgcgcaatctgtgccgcctggcccgcgagggcgtcctcggacgcagggcgcagtttgccgagaaggaactggagcaactggagcttcgtggctccaaagtgcagacgctgtttctcagcaaaaaggagctgccgggcgtgctggagacagaggtcacctaccagttcatcgaccagagcttccaggagttcctcgcggcactgtcctacctgctggaggacggcggggtgcccaggaccgcggctggcggcgttgggacactcctgcgtggggacgcccagccgcacagccacttggtgctcaccacgcgcttcctcttcggactgctgagcgcggagcggatgcgcgacatcgagcgccacttcggctgcatggtttcagagcgtgtgaagcaggaggccctgcggtgggtgcagggacagggacagggctgccccggagtggcaccagaggtgaccgagggggccaaagggctcgaggacaccgaagagccagaggaggaggaggagggagaggagcccaactacccactggagttgctgtactgcctgtacgagacgcaggaggacgcgtttgtgcgccaagccctgtgccggttcccggagctggcgctgcagcgagtgcgcttctgccgcatggacgtggctgttctgagctactgcgtgaggtgctgccctgctggacaggcactgcggctgatcagctgcagattggttgctgcgcaggagaagaagaagaagagcctggggaagcggctccaggccaggcctgggtggcggcagctggctggggacccaactggctccagaagtaccctttcgaccaccctgctgtgacatctgccccacacctccaccagaccctcggctcctccagggcaaggcttttgccagagttcctttgaatatagctccaattcagcccctgcccaggggcttggcatctgttgagaggatgaatgtcacggtgttggcaggggctgggcctggggacccaaagacccatgcaatgactgacccactgtgccatctgagcagcctcacgctgtcccactgcaaactccctgacgcggtctgccgagacctttctgaggccctgagggcagcccccgcactgacggagctgggcctcctccacaacaggctcagtgaggcaggactgcgtatgctgagtgagggcctagcctggccgcagtgcagggtgcagacggtcagggtacagctgcctgacccccagcgagggctccagtacctggtgggtatgcttcggcagagccctgccctgaccaccctggatctcagcggctgccaactgcccgcccccatggtgacctacctgtgtgcagtcctgcagcaccagggatgcggcctgcagaccctcagcctctcgcttccttctgacccgaccccgagttctttctccggacggtgtcgagaacccgggcgccggctggggctggagtctcgctggcctcggagcgcccccgagccctcgggcagacagcgaggcgaggacccaggtggaggcggccgggggcgcgggcggagggaggaggcgcgggagggaacccccggcccgcgggccccacccacagccgccccgggacgcagctcggggtccaggctcgagctttgctcactcagggcgcttcgtgcagggaacgccaggcccccggacgcgacccacgcggccgctgccagcggggaccgaggggagccggggccgcggccgcgagtccacgtcccgcccccgggcccggcccagcgaccgcccccgccgcccagggaccgcccccgcctcccagcgaccgcccgggccctcggggcggggaccgcggaccttcctggtggcgcggcagccgggcggctcctccttcctcccggccctggcgtggagcagagggacacaggttcccacgctggcgcccggcgaccgggtggggctgcggccgctcaggcccagcagctccatggaggacgccggcgaggaccccaccacgtttgctgcccactctctgcccagtgacccccgtctcttggccactgtgaccaacgcatacctgggcacacgagtgtttcacgacacgctgcacgtgagcggcgtgtacaatggggctggcggggacacgcaccgggccatgctgcccagccccctcaacgtccggctggaggcccctgcagggatgggggagcagctgaccgagaccttcgccctggacaccaacacaggctcctttcttcacaccctggagggcccccgcttccgggcctcccagtgcatctatgcgcatcgcacgctgccccacgtgctggctttccgagtgtccatcgcccgcctggccccggggagcgggcccatcacgctgctcctgcggtcagccttctccccagaaagcccagacctggacctgcatcagggtcctgacttccagggagcccggtacctgtatggccacaccctcacccctgagcagcccggggggccacagcaagaggtacacatgctgtggacaccagcacccccagacctgacccttggggaaggtgaggaggctaggacgtgggacttcctgacagcagtgggcggcagccaggctgaggctcaggcctgcctcactgaggccctgcagctgcaggccaggggagctctgtatacggctcacgcacaggcctgggcccagctctgggtagaatgtggcttggacgtggtggggcccctgcagctgcgccaggccctgcgtggctccctctactacctgctcagtgccctgccccagcccaaggccccaggatacatctgccatggcctcagtcctgggggcctctccaatgggagccgtgaggaatgctactggggccacgtcttctgggaccaggacctctggatgttcccgagtatcctgatgttccacccagaagccgccagggccatcctggagtaccgcatccgcacgctggacggggccctggagaacgcccagaacctgggctaccagggagccaagtttgcctgggagagtgcagactccggcctagaggtttgccctgaggacatttacggagtccaggaggtccacgtcaacggggccgtggtgttggccttcgagctgtactaccataccacccaggacctgcagctatttcgagaggctggtggctgggacgtggtcagggctgtggccgagttttggtgcagtcgtgttgagtggagccccagggaggaaaagtaccacctgaggggagtcatgtcccccgacgagtaccattcaggggtcaacaactctgtgtacaccaacgtcctggtccagaacagcctgcgctttgctgctgccctggcccaggacctgggtcttcccatccccagccagtggctggcggtggctgacaagatcaaggtaccctttgacgtggagcagaacttccacccggagttcgatgggtatgagcctgaccctcgagtctgtcctggaacaccttccagtcagcggcacctccctgtaggagaggtggtgaagcaggcagacgtcgtgctcctgggatacccagtccccttctccctgagtcctgatgttcgcaggaaaaatctggagatttacgaggctgtgacgtccccccagggccccgccatgacctggagcatgtttgctgtgggctggatggagctgaaggacgcagtgcgggcccggggcctccgtggacaggagctttgccaacatggctgaacccttcaaggtgtgggacggagaatgcagacgggtcaggcgctgtgaacttcctgacaggcatggggggcttcctgcaggcggtggtcttcgggtgcacggggttcagggtcacccgagcgggtgtgacctttgaccctgtgtgtctgtcggggatcttcaaaaggaagcgtttccggattcttcaaccaggggaacaagctcaacttctctttttccaaggactccgtgaccgtggaggttacgagcccgagcagggccctgtgctcctcacctggaggctgagctgtggccatcccagtcccggctctccctgttgccaggacacaaggtctcctttccccgctcggctggccggatacaaatgtcacccccgaagctgcctggaagttccagctccgagttccctgggaggactttttcagatgttagggacccgctccagagccccctctgggtcaccctgggttcctccaagccccaccgaggtcactcactgtggaccctgcctctgaataatcaggaacggtggcttcagagacgtctcttgggccttccctctggccacgtctgcacccacccctgnctgggcaccctcctagcctgccatccctcacctgcagccaggctctcagggaaggtccatgctgcttggcctgagttcaaggctttctgcctgtagcctgggactcccgtggacccccgtgggcaggtggcttccccgtggcatctccacaccgcctctgcctgcccctgtggactgatgctatcgcgcaccgtcccacgaccccaccccgagctcctgaagccggggtctgagcctgcatcacctctgggcctcttcatcccccactctcctgagagcagtggtcacagcggccggccgttcttgctgagaaggcagagaggcaggctcaggcctcagcgtgggacagcagggataaggggcacgaaggacggggactcggccccttcagaattcctcaggactctcaggtgcagctttgccaaaaaggaacttttcatgtcatgncagttgaggggacttagtctcaatccccaggctcctcttgaactctgggcaaactttaatcaggttgggcagcctctgctacagcgtggagtgggatggctctcttccctcagccacgcccgctttgtaaggacagaggtgggggagtgggaagtgggaagtcacccagagaacaggagagggatttgagggcgagacccccagcgctctccacggaccagccagagggactggagcccaggtgtgcatgggttcaaggccctggccctgccccagcctctgtcttgggagctcagcccccagggtcggtcgtcagcaagtttcccaagaacaagatgtgatggcatctgctgctgaaaccctgatgaggaccagcgccccctgcaacgctgtcaagcctgaggaattaaaagctttggtgctgggaagagcattattcctctgaggagccgctgtgcttccttctgaagcgatggccgtgccccgggtcccatttctcctttcacttgagtcgggaagcacagcaactttaacgtcgcgcccagcaacatggctcccctcgcaaaaaaa

SEQ ID NO: 153969 - DNA, 439 bp, Homo sapiens
cagctatacacctgtacccagaaatactccccttggggaatgaaaaaagtactactggagatggaagaccagaattagacaacctcagtgacgagtatctctcctgcctgcgtaagctgcagcactgtcgagaagagctgaaccagagccagcagctgcctcccagaaggcaatgtgggcgatggctcccagtgctgatggtggtgattgctgcagcactggcagtgttcctggccaataaagacaacctgatgatctgaataatttgtgacaactgccttgggtgaaaatcagaagcaagcaactcagcgaaaaactcagaaggtttgggtacattacagcttgggttttccaactgacttaggatttctgactttttattaatttcttaacctactgtaaataaacttcacctggcccggaaaaaaaaaaaaaaaaa

SEQ ID NO: 153970 - DNA, 429 bp, Homo sapiens
cggacgcgtgggcggacgcgtgggcggacgcgtgggcgctgaggatccaacagagagagcagctccagagagctcgactgcagcagttcttcaggaggaggaacctggagctagaggagaagggcaaagcgcagcatccccaggccagggagcaagggccctccaggcggccaggacaggtgactgtcctcaaggaacccttgtcttgtgccagaaggatttcttctcccagagagcaggtgacaggcaccagctctgaagtctttccagcccagcatcctcctccctcaggcatctgcagggatctgtctgaccacctctcctcacaggctgggggccttcctccacaggacactcccatcaagaagccacccaaacaccaccgtggtactcagacaaaggcagaaggaccaacaattaagaacgatg

SEQ ID NO: 153971 - DNA, 859 bp, Homo sapiens
gccctgggcaaacagaagtgtgaagagtggaggagcaagtataggctctaaaggagactgaggaacctgggggcccagcacagggaggctggagagccaactccacgtgcttcagtccaaactgcagggagcagatagcagggacttacagatgaatcaggccctgcgatctttgcaaaatgagcaccagcaactgcaggccaagattgaatgcctgcaagcggacagagacctgtgcagcttgtatacacaggacctacaagatcaactaaaaaggtcagaggcagagaaactcaccctggtgaccagagtacagcagttgcagggtttgcttcagaatcaatccttacagcttcaagaacaggagaaactcttaacaaagaaaggtcagcgaatttattaccacaaattctaagatattgctctttctcttacctgcctagaggcagcgggatggactacatgacctcctggagtcccagccagttctgggagttctgttaagtccgggatgtgtgggagctttttaaggactgatcattggctctgaggacacttcaactagttagccttctatcttgagatcaggctttgcccgtgtggagtccaaagtccttccctaacgaagtggagcctgagggtacagggaaggagaaagactgggatctcagagaccagctgcaaaagaagactttgcagctccaggccaaggaaaaggagtgcagagaactgcattcagaattagacaacctcagtgacgagtatctctcctgcctgcgtaagctgcagcactgtcgagaagagctgaaccagagccagcagctgcctcccagaaggcaatgtgggcgatggctcccag

SEQ ID NO: 153972 - DNA, 2298 bp, Homo sapiens
  misc_feature (1)...(2298): n = a,t,c or g
cccacgcgtccgcagagagcaagagagaggaactggggtttgcgaaccttgtggctttgtctgtttcctgtttcagcaaggctgctgtgcaaaaagaaagacggtaccaagaagggacgtgttaatggggcccagacctatggattgaaagcgtgtgctttacccatctgctgtcttgctccatcttgagaccatagccaagatctgtccaggactggaatgctttcccgagtggcttgagttggagcctgggactacgagcagccttattgaggtacaattcatgtgcttgtgggtttggatggcacaatctgtgtctgggctaaggaaagcagacttggcaccaacattatacctgacagatccatgcatctattgcaggaacttgtaagccaagcgcaacaggtgcttggaggtcatcatgatcagcccagaccccaggccctcccctggcttggcccggggggctgagagctatgaggccaagtgtgagcgcaggcaagagatccgggaaagccgccgctgccgtcccaatgtgaccacttgccgccaggtggggaagacgctgaggatccagcagagagagcagctccagagagctcgactgcagcagttcttcaggaggaggaacctggagctagaggagaagggcaaagcgcagcatccccaggccagggagcaagggccctccaggcggccaggacaggtgacaggcaccagctctgaagtctttccagcccagcatcctcctccctcaggcatctgcagggatctgtctgaccacctctcctcacaggctgggggccttcctccacaggacactcccatcaagaagccacccaaacaccaccgtggtactcagacaaaggcagaaggaccaacaattaagaacgatgccagtcagcaaaccaattacggagttgcagttctggataaggaaatcatccagctttctgattacctcaaagaggccctacaaagggagctggtcctaaaacagaaaatggtgattctccaagacctactgtccactctgattcaggcctctgacagctcttggaagggacagcttaatgaagacaaactgaaggggaaactgagatccttagaaaaccagctatacacctgtacccagaaatactccccttggggaatgaaaaaagtactactggagatggaagaccagaaaaacagctatgagcagaaggccaaggagtcactgcagaaagtgctggaggagaaaatgaatgcagagcagcaactacagagcacacagcgatccctggccctggcagagcagaagtgtgaagagtggaggagccagtatgaggctctgaaggaggactggaggacccttgggacccagcacagggagctggagagccaactccacgtgcttcagtccaaactgcagggagcagatagcagggacttacagatgaaccaggccctgcgatttttggaaaatgagcaccagcaactgcaggccaagattgaatgcctgcaaggggacagagacctgtgcagcttggatacccaggacctacaagatcaactaaaaaggtcagaggcagagaaactcaccctggtgaccagagtacagcagttgcagggtttgcttcaaaatcaatccttacagcttcaagaacaggagaaactcttaacaaagaaagatcaggctttgcccgtgtggagtccaaagtccttccctaacgaagtggagcctgagggtacagggaaggagaaagactgggatctcagagaccagctgcaaaagaagactttgcagctccaggccaaggaaaaggagtgcagagaactgcattcagaattagacaacctcagtgacgagtatctctcctgcctgcgtaagctgcagcactgtcgagaagagctgaaccagagccagcagctgcctcccagaaggccaatgtgggcaaaggcctcccagtgctaatggtggtgattgctccagcactggcagtgttcctggccaataaaaacaacctgatgatttgaataatttgtgacaactgccttgggtgaaaatcaaaagcaagcaactcagcgaaaaactcaaaaggtttgggtacattacagcttgggttttccaactgacttaggatttctgactttttattaatttcttaacctactgtaaataaacttcacctgaccagattgttnnnnnnnnnnnnnnnnnnnngggcggccgttttaaaggatccttgggggggcccaagtttacccgggcttgcaaggtaatagttttttccttatagggggccgaattataac

SEQ ID NO: 153973 - DNA, 413 bp, Homo sapiens; identical to SEQ ID NO: 152440

SEQ ID NO: 153974 - DNA, 589 bp, Homo sapiens
atcacagtgaccacttcgctggcactggagcagcatgatggagacagatccagggctatcaaaggaggctgactttgtactatctgatatgcatgtgtttgtggcctgtgagtctgtgatgtaaggctcaatgtccttacaaagcagcattctctcatccatttttcttcccctgttttctttcagactgtggcttcacctccggtaagagaggctctcctttttctctctatctttcgccgtctctgctctcgaaccagggcatggagaatccacggacacaggggcgtgagggaggccagagccacctgtgcacaggtgcctacatgctctgttcttgtcaacagagtcttaccaagcaggggtcctgtctgccaccatcctctatgagatcttgctagggaaggccaccttgtatgccgcgctggtcagtgccctcgtgctgatggccatggtcaagagaaaggattccagaggctagctccaaaaccatcccaggtcattcttcatcctcacccaggattctgctgtacctgctcccaatctgtgttcctaaaagtgattatcactctgcttctcatctcctact

SEQ ID NO: 153975 - DNA, 1212 bp, Homo sapiens
gtaaagctcccatcctgccctgaccctgccatgggcaccagcctcctctgctggatggccctgtgtctcctgggggcagatcacgcagatactggagtctcccagaaccccagacacaacatcacaaagaggggacagaatgtaactttcaggtgtgatccaatttctgaacacaaccgcctttattggtaccgacagaccctggggcagggcccagagtttctgacttacttccagaatgaagctcaactagaaaaatcaaggctgctcagtgatcggttctctgcagagaggcctaagggatctttctccaccttggagatccagcgcacagagcagggggactcggccatgtatctctgtgccagcagcttagcagggttgaatcagccccagcattttggtgatgggactcgactctccatcctagaggacctgaacaaggtgttcccacccgaggtcgctgtgtttgagccatcagaagcagagatctcccacacccaaaaggccacactggtgtgcctggccacagggtatcttccctgaccacgtggagctgagctggtgggtgaatgggaaggaggtgcacagtggggtcagcacggacccgcagcccctcaaggagcagcccgccctcaatgactccagatactgcctgagcagccgcctgagggtctcggccaccttctgggcagaacccccgcaaccaatttccgttgccaagtccagttctacgggctctcggagaatgacgagtggacccaggatagggccaaacccgtcacccagatcgtcagcgccgaggcctggggtagagcagactgtggctttacctcggtgttcttaccagcaaggggtcctgtcttgccaccatcctctatgagatcctgctagggaaggccaccctgtatgctgtgctggtcagcgcccttgtgttgatggccatggtcaagagaaaggatttctgaaggcagccctggaagtggagttaggagcttctaacccgtcatgggtttcaatacacattcttcttttgccagcgcttctgaagagctgctctcacctctctgcatcccaatagatatccccctatgtgcatgcacacctgcacactcacggctgaaatctccctaacccagggggaccttagcatgcctaagtgactaaaccaataaaaatgttctggtctggcctgaaaaaaaaaaaaaaaaa

SEQ ID NO: 153976 - DNA, 1883 bp, Homo sapiens
accttttgtagaccatagtacatgcggtggaattccggggagaggccatcacttgaagatgctgagtcttctgctccttctcctgggactaggtatgagccttgtcttttgaggagtctggggttaatgttaacactgggtggaaagactttctctccagagagtctgaagccaccagacagaagatgaaggggatatgttagattaaagaaccataacagagtaattgttggcacaataaaaaggaggcagttccctggggtcctttgggagctgaggtggtattggagaaataaagcagagaccttcctgcctggggagatgtctggaccccagcttgtcggtcctcatgaatatctctctggaactaggctctgtgttcagtgctgtcatctctcaaaagccaagcagggatatctgtcaccgtggaacctccctgacaatccagggtcaagtcgatagccaagtcaccatgatgttctggtaccgtcagcaacctggacagagcctgacactgatcgcaactgcaaatcagggctctgaggccacatatgagagtggatttgtcattgacaagtttcccatcagccgcccaaacctaacattctcaactctgactgtgagcaacatgagccctgaagacagcagcatatatctctgcagcgttgaagagcaaggttttgtggggggagcagagacccagtacttcggcgccaggcacgcggctcctggtgctcgaggacctgaaaaacgtgttcccacccgaggtcgcctgctgtttgagccatcagaagcagagatctcccacacccaaaaggccacactggtgtgcctggccatatgcttctacctcgaccacgtggagctgagctggtgggtgaatgggaaggaggcgcacagtggggtcagcacagacccgcagcccctcaaggagcagcccgccctcaatgactccagatactgcctgagcagccgcctgagggtctcggccaactttctggcagaacccccgcaaccacttccgctgtcaagtccagttctacgggctctcggagaatgacgagtggacccaggatagggccaaacctgtcacccagatcgtcagcgccgaggcctggggtagagcagactgtggcttcacctccggtaaagtcttaccagcaaggggtcctgtctgccaccatcctctatgagatcttgctagggaaggccaccttgtatgccgtgctggtcagtgccctcgtgctgatggccatggtcaagagaaaggattccagaggctagctccaaaaccatcccaggtcattcttcatcctcaacccaggattctcctgtacctgctcccagatctgtgttcctaaaagtgattctcactctgcttctcatctcctgcttacattgaatacttctctcttttttctgtttccctgaagattgagctcccaacccccaagtacgaaataggctaaaccgaataaaaaattgtgtgttgggcctggttgcatttcaggagtgtctgtggagttctgctcatcactgacctatcttctgatttagggaaagcagcattcccttggacatctgaagtgacagccctctttctctccacccaatgctgctttctcctgttcatcctgatggaagtcctcaaacaccatttccatacccaggcattctgggtccccactggagggttagtctgaagggcaatggctgggctttggaaaaccagcaagatgaggacagagaggaaggcacacagcaaaccataagcccttacccagtgcaggacagaggatgcgggcagacctatgggttacaatgtctggtcatttcccaattccagattaaactgtcacctgttaaaaaaaaaaaaaaaaaaa

SEQ ID NO: 153977 - DNA, 286 bp, Homo sapiens
  misc_feature (1)...(286): n = a,t,c or g
ctcacaacgctgccgccgcgctccgtgggcaactcctactactgctgggctgggctgggctgggctgggctgcgccagagctcgcctgcacagatcagctccggagaggggaaaaccacgctcctcggaccaagcctcgggagctaagtntttctgaaagatctatccagcactccgatggccagcaacaacaccgccagcatagcacaagccaggaagctggtagagcagcttaagatggaagccaatatcgacaggataaaggtgtccaaggcagctgcagatt

SEQ ID NO: 153978 - DNA, 423 bp, Homo sapiens
cagtgagcctcaggctttaggaactgaggagtgtttctgaaagatctatccagcactccgatggccagcaacaacaccgccagcatagcacaagccaggaagctggtagagcagcttaagatggaagccaatatcgacaggataaaggtgtccaaggcagctgcagatttgatggcctgaagagcctccgggctcctgggacattgatgtagagtttttagtgaagtgggcacctttctagtccacggcatttgaagagagcgaggagaaccattctggaaactctaggctatgcatgtttaaagatctggtcccctttatgagaatgcaagccgatccacatcctgacttaagagatctgattctgacgaactgcctggaggaggggaatatataaaaataaaattggtgtcacttcttaaa

SEQ ID NO: 153979 - DNA, 3305 bp, Homo sapiens
cagaagggggattaaagtcaaatcactgtcagcagcccaggagcagacaaaaccaccagagtaagccctgaaatggaaatgagagggaaaagaagcaagccgctaacagctaccaagaagaggaggaagtgggagatgcgctgcttcctgtagaaagaacgttgattgaagacaaagctgggtggggactagtccctgggctgcagccgctgctacacatactcacaacgctgccgccgcgctccgtgggcaactcctactactgctgggctgggctgggctgggctgggctgcgccggagctcgcctgcacagatcagctccggagaggggaaaaccacgctcctcggaccaagcctcgggagctaagccagatctgccagtgagccctcaggcttaaggaactggagcagtgtttctgaaggatctatccagcactccggatgcccagcatcaacaccgccagcatagcacaagccaggaagctggtagagcagctttttatgttttgccaatatcgacaggataaaggtgtccaaggcagctgctgatttgatggcctactgtgaagcacatgccaaggaaagacccccctcctgacccctgttccgggcttcagaaaacccgtttaaggaagaagaagtttttctgtgcccatcctttaagtctttgagaggggcctgaaagagcctccgggctcctgggacattgatgtagagtttttagtgaagtgggcacctttctagtccacgggcatttgaagagagcgaggagaaccattcttggaaactcttaggctatgcatgtttaaagatctggtcccctttatgagaatgcaagcccatccccctttctgacttaaaagaacagattttgccgaactgcctggaggaggggaatatataaaaataaaattggtgtcacttcttttctgctatcccccagcccccccccccccaaaatcctcatgtttcttgtttcataatttgaaaaaataacaattaaaacatgacagctgtactgaggtaagatatgtgtggaccttccttgggaaggaatattgtctttagaataccctttgataaagctgagctgtcccgtgtagatgcaattcggtttaatggcattgatgtatagtcactgtgcctttctttttctttcttccttctcctctacccctccttccacccctccccattagagtagtgtggagataaggctggactggtctatcagattgaactccaagaatgatcacacaaaatgttttagggagatgttccccgtggtgtatcctcatggtaacaacggcaaaaaatgccggttgtctttgttctcttttcactattcctaacatgtgtacatgatagctttgattctgcaagtaaaagtaaatcctgtgttgtgactggtgctttcatatatttgtgacaatttttgagtaatattgcatgaaaatgtccctatgttacatccatttcagaagttttgttgttttactctaaagctgggaaaggaaatgagagggaaaagaccccggagagggaagaaaatctcagtattttgaaaattgagattacttcagagccttagccacacctaaaatacctcctagttaatagtggtataaatgcctcttcaatacgttttccagaatccaaagcattttggtttatccagggacccaggggcagcacagctgttcaccaagcaggagagttaaggattcaccatgagctggggaaatgcttttgccatgagtattgaggcaaattccctctttccctgaatcatgggacattctaggatttaaaaggaacatttttttgtgctcttaacaagaaaaccatggcccttcctttgttcaagtatcagaagaaataaacccacagcttccagagaaggtgaccattcttagaacttccagctattcactctccagggagaaggacctcaaaatcggcactctttgggcggcaggtgcggtccccacggccggctctacgaggaagagttctggctcttttgttccactgagatggtcttggtttttcacttaacaaattttttaatggaatcctttgtttttgttctccatcttgtttgttagagtctctcggcctttatttacaaattccttgcaactagagcgctccttccccaagatatggtagtgagagtaatttttcattgtagctgtagtctccatcagtaacagcaggccctgggaagacttgatcacctttttctgtgtcattttcagtcaaatgagggcctctcttacatcttgtttgctttcaaatccccaaatatcatctccatctcccaattaattttattggctctttcctctctattcgctttctcctgttttttttttttaaaaaaaagcatgaaaaaggaagagaaaaagtttgatatgccaaggacagattttgaaacagacttggtaaatgttttccttagctccttcatgggcatgctggtgaaagaataaatacatccaattaaagctcatgctkggggtcggggagaagaggatactgaaacatttgtgaaatgtatgaatgcgacttctgtaaccagatacttctgttcttctgttcaaattgtggggtttttgttacagttaggacgcccatgaagatttaggggtgaaaaaaacagcagagtatttattaaactacagcattgtacaattagcttagtaacactatggaataagctaaaacatatcttatgtttttacatgggccacaacatgaattgagtatgtggtcacatgaaaacacggatgaatgaataaaacactctttggtggtgactgaggcatcattagaaggcccagacgatttccactattcacagcatttccttttctcagaaggactctttatcatttccatgtaaatctagatctttggagcaatttaagatggaagtacaatttctagggagcattttaaaggaaaatgttttggctttttcataattttatgtcttacagtatggaattataatacgaaaatcttttatatgagttttggcttcttggtatttgtacttattcaggggaaaaagtctttcgattacttatgcctctatagagcttaatttcttgagaaattcaacagtcattttcaccagcataattttatcttaaggaataactaataggaaaagtcagcttaattatttaaggccctagcttctacatataatatattcgataggaaatgaaaatctcccgtggaattaactaataagtagtaacaataaacttcatatttagaatgcaaagtctac

SEQ ID NO: 153980 - DNA, 374 bp, Homo sapiens
ggaaacctgcgccctggcctctcactccgggagctcaggctccaagtcgggaggcgacaagatgttctccctcaagaagtggaacgcggtggccatgtggagctgggacgtggagtgcgatacgtgcgccatctgcagggtccaggtgatggatgagggaattggagttcgtaattggtccgaggccctgaacctaatatatgccagtgaaatgggatttgacttagatatgggttcacaaacatcgctgtcccctctggctcactggcttctcaacaaccttggctggatgaaccttggtaagcaactattggaaggataccaaggagtttattttaaaagaactttttaagtggcctaggggaaaaaggaag

SEQ ID NO: 153981 - DNA, 989 bp, Homo sapiens
gccgacgtggaagacggagaggaaacctgcgccctggcctctcactccgggagctcaggctccaagtcgggaggcgacaagatgttctccctcaagaagtggaacgcggtggccatgtggagctgggacgtggagtgcgatacgtgcgccatctgcagggtccaggtgatggatgagggaattggagttcgtaattggtccgaggccctgaacctaataaatgccagtgaaatgggatttgactgtagatctggctccacagccctcgctgtcccctctgtctcactggcttctcaccagccttgtctggatgaccatcggtagcaacctattggaagcatacaaagcagtttattttagaggaactctcaagtgtcttagggtagaaagtaaaaagttgcttcttatgagttgctaaaggaaggcttctgtgtcaatgcctgtcttagatgtcaagctgaaaacaaacaagaggactgtgttgtggtctggggagaatgtaatcattccttccacaactgctgcatgtccctgtgggtgaaacagaacaatcgctgccctctctgccagcaggactgggtggtccaaagaatcggcaaatgagagtggttagaaggcttcttagcgcagttgttcagagccctggtggatcttgtaatccagtgccctacaaaggctagaacactacaggggatgaattcttcaaagccttggtttagcattttgtcagttttatcttcagaaattctctgcgattaagaagataatttattaaaggtggtccttcctacctctgtggtgtgtgtcgcgcacacagcttagaagtgctataaaaaaggaaagagctccaaattgaatcacctttataatttacccatttctatacaacaggcagtggaagcagtttcagagaactttttgcatgcttatggttgatcagttaaaaaagaatgttacagtaacaaataaagtgcagtttaaaacccaaa

SEQ ID NO: 153982 - DNA, 1096 bp, Homo sapiens
gtcgggcggctccacagagcccttaggcctttccgcctttcccaagccaacgtcttccgccgtcggctccgtcggcgccgccatggccgacgtggaagacggagaggaaacctgcgccctggcctctcactccgggagctcaggctccaagtcgggaggcgacaagatgttctccctcaagaagtggaacgcggtggccatgtggagctgggacgtggagtgcgatacgtgcgccatctgcagggtccaggtgatggatgcctgttttagatgtcaagctgaaaacaaacaagaggacttttttgtggtcttgggagaatgtaatcatttccttccacaactgctgccatgtcccctgtgggtcgaaacagaacaatcgctgccctctctgccaagcaggactgggtggtcccaaagaatcggcaaatgaagagtggttagaaggcttcttagcgccagttgttcagagcccctggtggaatcttgtaatccagttgccctacaaaaggctaagaacactacaaggggatgaattcttcaaatagggagccgatggatctgttggtcctttggcgactcatgaaagccttggtttagcattttgtcagttttatcgttcagaaatctctctgcgattaaggaagataatttattaaaggtgggtcccttccctaccttcctgtgggtgtgtgtccgcgcacacagccttagaagtgctataaaaaaggaaagagctcccaaattgaatcacctttataatttacccatttctatacaacaggcagtggaagcagtttcagagaactttttgcatgcttatgggttgatcgagttaaaaaagaatgttacagtaacaaataaagtgcagtttaaaacccaactcttactcttaatttgttcctaatacgtatttttggcagggagagggaacggtccatgaaatctttatgtgatataaggattttaagtttgatccaatgaacacggtaaataagcttaaacttttcagcatgaggaagtatgtatgcctttagttgacctgctcatgtgtaactgaggaatgtttgtcatgtatgattgcctttcaattactatt

SEQ ID NO: 153983 - DNA, 2782 bp, Homo sapiens
tgcggccgcaatagtacgctcgcgcggcggtggcgggtggtggtccttggaacgcggtgggcggacagcggcacggcctcccctcccctccggacgcaagccgaagtacgtgagaggagacttccggccactgcgttgtagtcggcccggctgcaaagcgtttttctgcaggctgttttcccaggttccctcggcctgtacctcgcgcactcctcattgctccaggtccttcagtctccgctcgtctcaccgtaggctgtgacgacatgagcaacaaagaaggatcaggagggttcaggaaaaggaagcatgacaatttcccacataaccaaagaagagaagggaaggatgttaattcatcttcacccgtgatgttggcctttaaatcatttcagcaggaacttgatgcaaggcatgacaaatatgagagacttgtgaaacttagtcgggatataactgttgaaagtaaaaggacaatttttctcctccaataggattacaagtgctccctgatatggaagatatattgactgaatcagaaattaaattggatggtgtcagacaaaagatattccaggtagcccaagagctatcaggggaagatatgcatcagttccatcgagccattactacaggactacaggaatatgtggaagctgtctcttttcaacacttcatcaaaacacgatcattaattagtatggatgaaattaataaacaattgatatttacgactgaagacaatgggaaagaaaataaaactccctcctctgatgcacaggataagcagtttggtacttggagactgagagtcacacctgtcgattaccttctgggagtggctgacttaactggagaattgatgcggatgtgtattaacagtgtggggaatggggacattgataccccctttgaagtgagccagtttttacgtcaggtttatgatgggttttcattcattggcaacactggaccttacgaggtttctaagaagctgtataccttgaaacaaagtttggccaaagtggagaatgcttgttatgccttgaaagtcagagggtcagaaattccaaaacatatgttggcagatgtgttttcagttaaaacagaaatgatagatcaagaagagggcatttcttagaatctaacgttactcagttactaattcttttgagaactcctaagagaccaatttgtaagacttatttagtatttcatttaactttattgtggcttttacatagaaacatattcagttgtacttgttttaaattgtatacaagctgtacataaaattagccaaatgaatcatttcttatatcttattcatgaaagtttgcatacagatgtttgcatatatgcctttttgaatttttgctggttaacctttatcatttatctttgtaatgggaacatgcttcagagtgtaccttttgccataacctattttaatttactttttctgaaggttggagtgataatttttagtggaagcaatttgtaatttaagttggtagttatattatatatagaaaagattttttagttaaacttctggacatgagcgtcctgtttaaatttcttgttaatatcgcgccaagcctcaaaaataggcttattccatggaacaagaattaaaaatgaataagctatcaatatataatttaagtacaagtttaggctgggcgtggtggctcacgcctgtaatcccagcactttgggagggccgaggtaggcagatcacgaggtcaagagatcaagaccagcctgaccaacgtggcgaaacctcgtctctactagaaatacaaaaattagctggatatggtggtatgtgcctgtaatcccagctacttgggaggctgaggcaggagactcgcttgaacctgggaggcagaggttgcagtgagccgagattgcgccactgcactccagcctgggtaacagagcaagactccatctcaaaaaaagaaagaaagaaaaaagaaagtacaagtttataaagtattatagtgaaaaattcgcattctggctgattttaagccatttaaaatttatataaaacaaccttccataaaaatttgacaggtgcccagatgttgctttctccatttattttttgtttttttttaatcacagtaggtctgatagagaattggagctaaattataatatttttgttggtaaagttgagttatatacttgtacatacaatggaaatgcttttagctagctgattatttagcaatttttgtttttgttatattaggcatgtttggaggctttcctattctagcatttaaatttaaattttattaaaattaaataatttaaatctagcatttaaatttaaataatttaagtctagcatttacttttaaataattataaatgaagttttgaaatactaaggtgaatccagacctttagttgtcccatgggtgttaattaaagttgccaaagaagatgtattatggaaccaattcagcaataagacaattgtccaacacagttggagaataacaatgggtaaccgttagtaaatatttagaattggaatttgcctactgaaatagttatagatgattacttgtgatgtgaaactgaattgagcatgacaaccagacatttccagttggttttgtaagttttgagaatctagatactgggttttattttttgaaagattagctctgtttgtaagggctgattccttgaaaatgtaattttccagaaaaacacctaaagaaaataaaacatggacatgcctagtaaaaaaaaaaaa

SEQ ID NO: 153984 - DNA, 412 bp, Homo sapiens; identical to SEQ ID NO: 140441

SEQ ID NO: 153985 - DNA, 462 bp, Homo sapiens
actactaaattcgcggccgcgtcgacggcagcaggcgcagcccagcctcgaaatgcagaacgacgccggcgagttcgtggacctgtacgtgccgcggaaatgctccgctagcaatcgcatcatcggtgccaaggaccacgcatccatccagatgaacgtggccgaggttgacaaggtcacaggcaggtttaatggccagtttaaaacttatgctatctgcggggccattccgtaggatgggtgagtcacatgattcctttctccgaatggcaaaggccgatggcatcgtctcaaagtaaggttgggggctcacatttgggcagagtgagtggactaggactgctccagaggcgtggtcttaacgttgtccttttcccctggttctaggaacttttggacttggagagaatcacagattgtggaatatttgtcataaataaataatgaaaaacctaaaaaaaa

SEQ ID NO: 153986 - DNA, 535 bp, Homo sapiens
  misc_feature (1)...(535): n = a,t,c or g
cgccgatatctctgccgggtgactagctgcttcctttctctctcgcgcgcggtgtggtggccagctaggcgcagcccagccttcgaaatgcagaacggacgccggcgcagttcgtcggacctgtaccgtgcccgcgggaaattgtccgctagcaatcgcatcatcgggtgccaaggaccacgcatccatccagatgaaccgtggccgaggttgacaaggtcacaggcaggtttaatggccagtttaaaacttatgctatctgcggggccattccgtaggatgggtgagtcagatgattccattctcccgattggccaaggccgatggcatcgtcttcaaagaactttttgactggagagaaatcacagatgtgggaatattttgtcataaataaataaataatgaaaacctaaaaaaaagggggggcccgggtaccccaatttcgcccttttagttgagtccgtatttacaatttcactgggccgtcgtttttacaaccgtcgttgantggggaaaacccnggggggtttacccc

SEQ ID NO: 153987 - DNA, 415 bp, Homo sapiens
tttcgtgacattgtgaatgagaatggtgaaggtgaaatacaagatgaggaggaggatggttatgatgatgatgatgatgactggcactgggatgaaggagtcgtaaaactcgccatgggttatggctggaatggaggaagcaacccacaggcaaatcgacagacctccgacagcagttcagccaaaatgtctactccagcagacaaggtcttacggaaatttgagaataaaattaatttagataagctaaatgttactgattccgtcatatataaagccaccgaaaagtttacacaaaaggaatcaaatatgtgttggatcccacaacaagaatgattttattcaagatgttgactagaggaatcataacagatattgatggctgcattagcacaggaagagaagctaatgtatt

SEQ ID NO: 153988 - DNA, 2523 bp, Homo sapiens
tttcgtggtggcacgagtggtggatctgttggtcccgttttcccgtcgcacgtggtggccactgttggcttctgaatggtttgcgaggcggatatccacgccaaggcctttggatcggccgtgggtacatccgtctgagccgttcctttccatcgcagagcggcggcctccggcggcgctctccagtcatggactaccggggggcttctcatgagccgggtggtccccgggcaattcgacgacgcggactcctctgacagtgaaaacagagacttgaagacagtcaaagagaaggatgacattctgtttgaagaccttcaagacaatgtgaatgagaatggtgaaggtgaaatagaagatgaggaaggaaggagggttatgatgatgatgatgatgactgggactgggatgaaggagttggaaaactcgccaagggttatgtctggaattggaaggaagcaacccacaggcaaatcgacagacctccgacagcagttcagccaaaatgtctactccagcagacaaggtcttacggaaatttgagaataaaattaatttagataagctaaatgttactgattccgtcataaataaagtcaccgaaaagtctagacaaaaggaagcagatatgtatcgcatcaaagataaggcagacagagcaactgtagaacaggtgttggatcccagaacaagaatgattttattcaagatggtgactagaggaatcataacagagataaatggctgcattagcacaggaaaagaagctaatggataccatgctagcacagcaaatggagagagcagagcaatcaaaatttataaaacttctattttggtgttcaaagatcgggataaatatgtaagtggagaattcagatttcgtcatggctattgtagaggaaaccctaggaaaatggtgaaaacttgggcagaaaaagaaatgaggaacttaatcaggctaaaccacagcagagataccattgtccagaaccaataatgctaagaaggcatggtcttgccatgagtttcatcggtaaagatgacatgcctgccaccaattttggaaaaatgttccagttatcagaatccaaggctcgggagttgtacctgcaggtcattcagtacatgagaagaatgtatcaggatgccagacttgtccatgcagatctcagtgaatttaacatgcatgtaccacggtggaggcgtagtatatcattgaccgtgtctcagtccgtggagcacgaccacccacatgccttggagttcttgagaaaggattgcgccaacgtcaatgatttctttatgaggcacagtgttgctgtcatgactgtgcgggagctctttgaatttgtcacagatcccatcccattacaccatgagaaccatggatgcttatctctcaaaggccatggaaatagcatctcaaaggaccaaggaaagaacggtcttagccaagatcatgtggatgaagaggtgtttaagcgaagcatatattcctaggaaccttgaatgaagtgaaaaattatgagagggatatggacataattatgaaattgaaggaagaggacatggccatgaatgcccaacaagataatattctataccagactgttacaggattgaagaaagatttgtcaggagttcagaaggtccctgcactcctagaaaatcaagtggaggaaaggacttgttctgattcagaagatattggaagctctgagtgctctgacacagactctgaagagcagggagaccatgcccgccccaagaaacacaccacggaccctgacattgataaaaaagaaagaaaaaaagatggtcaaggaagcccagagagagaaaagaaaaaacaaaattcctaaacatgtgaaaaaaagaaaggagaagacagccaagacgaaaaaaggcaaatagaatgagaaccatattatgtacagtcattttcctcagttccttttctcgcctgaactcttaagctgcatctggaagatggcttattggttttaaccagattgtcatcgtggcactgtctgtgaagacggattcaaatgttttcatgtaactatgtaaaaagctctaagctctagagtctagatccagtcactgactctgtctggtgttgacagaggatttatttaagctattattttaataaagaactttgtacatttttatttttatatttttttctcttacaaatatgtttttggaagcatgataaatgtttaaatgtagtcaacatctgtaactcttacatgagtgtccagaggcactcatgggaaaattggttttgctttctttgtacacaccagagacccatctgaggtcatctgattataaggccatgtttatataaagggaatttcacccacagttcagctggctgttgattttcactgcaactctgcctttgtgtgtattggcgatcatttgtaatgctcttacacttcgtctttaatgttctttttggagttaggacctctcagttcataaagttttttacaattcaaaaaaaaaaaa

SEQ ID NO: 153989 - DNA, 1100 bp, Homo sapiens
  misc_feature (1)...(1100): n = a,t,c or g
tctagtgtggtggaattcgccgccgccgcgcgcgcgntacgctctccaacgccagacgccgcctctcgctcgcagtgctccagccgaaggagaaggggggtaagtaaggaggtctctgtaacatatgatcgtacaaaagcagactggcccgcaaatcggaccggtggtaaagcacccaaggaagccaactggcttacaaaaagcccgcttcgcaagagtgcggccctctacttggagggttgaagaaacctcatcgttacagggcctggtactgtggcgctccgtgaaattagacggttatcagaagtccactgaacgtcatgattcgcaaacattcgcttccagcgatctagtgcgagaaattgctcaggacttttaaaacagatctgcgcttccaggagcgcagtaatcaggtggctttgcaggatggcaagtgagggcctatctggtttggccttttttgaaagacaccaacctagtgtgcttatccatgcccaaacgtgtaccaattatgcccaaaagacattccagctcagcacgccggcatcacgtggagaacgtgctttaaggatccactcatggatggggaaacatttcatttctcaaaaaaaaaaaaaaaaaatttctcttcttcctgttattggtagttctgaacgttagatatttttttttccatggggtcaaaaggtacctaagtatatgattgcgagtggaaaaataggggacagaaatacaggtattggcagtttttccattttcattggggggggaatttttaatataaattgcggagacgtaaagcattaatgcaagttaaaatgtttcagtgaacaagtttcagcggttcacctttataataattataaataaacctgttaaatttttctggccaaggccagcatttggaatttttttaaaacaagtaaatttcttattgatggcaactaaatggtgtttgtagcatttttatcatacagtagattccatccattcactatacttttctaactgagttgtcctacatgcaagtacatgtttttaatgttgtctgtcttctgtgctgttcctgtaagtttgctattaaaatacattaaactata

SEQ ID NO: 153990 - DNA, 497 bp, Homo sapiens
gcatggaccatgagtttgttgctaagggacatttgttccgtaagggcatcatgaagattatggtgtacaagattttccgcatcctggtgccagggaacacagacagcactgaggccttgtcactctcctatctcgtggaattaagtgtggtagcacccgctgggcaggacatggtctctgatgacatgaagaacttcgcagaacagctaaaacctctggttcacctagagaaaatagaccccaagaggctcatgtgactaagaggatctgtccacatttggggcctatccttacttgtttgaaaaaatatgtttgcactccagcctgggtgagaagagcgaaatccgtctcaaaaaaaaataaaaatgaagaggggaaaccagaataaattatcttttggaaaggacaatttcttgtttggccatttgtgtataaggttggtaacattagaggctgtgagcttgtgttacatggtaataaagccaatgaagagaaaa

SEQ ID NO: 153991 - DNA, 500 bp, Homo sapiens
tgaagattatggtgtacaagattttccgcatcctggtgccagggaacacagacagcactgaggccttgtcactctcctatctcgtggaattaagtgtggtagcacccgctgggcaggacatggtctctgatgacatgaagaacttcgcagaacagctaaaacctctggttcacctagagaaaatagaccccaagaggctcatgtgactaagaggatctgtccacatttggggcctatccttacttgtttgaaaaaatatgtttgctttttttggtttttgttttgttttgtttttgagacagagtctcgctttgcactccagcctgggtgagaagagcgaaactccgtctcaaaaaaaaaataaaaatgaagaggggaaaccagaataaattatcttttggaaaggacaatttcttgtttggccatttgtgtataaggttggtaacattagaggctgtgagcttgtgttacatggtaataaagccaatgaagagaaaaaa

SEQ ID NO: 153992 - DNA, 1050 bp, Homo sapiens
cccacgcgtccggaggaggaagttggctggttgcaccgatctgggggcttcccgggctcgggtaaccggagtgctggtatctaatcgtcgctcaaaagctcctaagtgcgcgggtggatataattcccggcttctcgagaagacactacagcctcaaggaggtatatcccgtgccttacctgactgggggctctgagtccagttgtgttgtcttcaacttagacaccatggaggcacctccagtcaccatgatgcctgtcactgggggcaccattaacatgatggagtacctgttgcagggaagtgttttagatcacagtttggaaagcctcatccaccggccttcgtggtttgtgtgacaacatggaacctgagactttccttgaccatgagatggtattcctccttaagggccagcaagccagcccatttgttctcagggcccgacgctctatggacagggcaggggcaccctggcatctgcgctacctgggacagccagaaatgggagacaagaaccgccatgccctggtgcgaaactgcgtggacattgccacatctgagaacctcaccgacttcttgatggaaatgggcttccgcatggaccatgagtttgttgctaagggacatttgttccgtaagggcatcatgaagattatggtgtacaagattttccgcatcctggtgccagggaacacagacagcactgaggccttgtcactctcctatctcgtggaattaagtgtggtagcacccgctgggcaggacatggtctctgatgacatgaagaacttcgcagaacagctaaaacctctggttcacctagagaaaatagaccccaagaggctcatgtgactaagaggatctgtccacatttggggcctatccttacttgtttgaaaaaaaaaaaaaaaaataaaaatgaagaggggaaaccagaataaattatcttttggaaaggacaatttcttgtttggccatttgtgtataaggttggtaacattagaggctgtgagcttgttttacatggtaataaagccaatgaagaga

SEQ ID NO: 153993 - DNA, 484 bp, Homo sapiens
  misc_feature (1)...(484): n = a,t,c or g
tggggnggaagggggnnnnccattgattggcatcggcattcggcacgagagggagtcgggccgcgactgtggtcgtttttataccttcccgcgcggacgccggcgctgccaacggaagggcgggtagggcnnnnnnnnnnnnnnnnnnnnnnnnnnnnnccatttgagatctttgaagatatcctcaacgtgaggcaaggtgcccggcgacgactgcccgctggtgtggggccagtgctcccactgcttccacatgcattgcatcctcaagtggctgcacgcacagcaggtgcagcagcactgccccatgtgccgccaggaatggaagttcaaggagtgaggcccgacctggctctcgctggaggggcatcctgagactccttcctcatgctggcgccgatggctgctggggacagcgccccttgagctgcaacaaggtggaaacaagggctggagctgcgtttgttttgccatcactatgttn

SEQ ID NO: 153994 - DNA, 838 bp, Homo sapiens
  misc_feature (1)...(838): n = a,t,c or g
tttgccccgccttgangaattcggcacgaggagactcggcgggcgctgttgagggagtcgggccgcgactgtggtcgtttttataccttcccgcgcggacgccggcgcttgccaacggaagggcgggtagggcgagacggagtttcgtcatgttggccaggcccatttgagatctcgtaagatatcctcaacgtgaggctctgctgccatgaaggtgaagattaagtgctggaacggcgtggcccacttggctctgggtggccaacgatgagaactgtggcatctgcaggatggcatttaacggatgctgccctggctgtgaatgttccccttccatgctgtctgagcggccccgactgcaaggtgccccggcgacggactgccccgctgggtgtgggggcccagtgcttcccacttgcttccaacatgcattgcatcctcaagttggcttgcacgcacagcaggtgcagcaagcacttgccccaatgttgccgccaagaattggaaagttcaaggagtgaggcccgacgctggctctcgcttggaggggcatcctgaagactccttcctcattctgggcgccgatggctgcttggggacaagcgcccctgaacttgcaacaaggtggacacatagggctggaacttgcgtttgttttgccatcactatgtttgacactttttatccaataagtgaaaactcattaaaactactcaaatcttgctggaggcctctgggtgcctgtgttctcagcatatagatgtggtctcggtgtgttttgatatgaaaactctcatgaataaacatctccgtgaaacgccaaaaaaaaaaaaaaaaa

SEQ ID NO: 153995 - DNA, 6523 bp, Homo sapiens
atgctcagaaagaggaagtggctgggtgtggtggctcacgcctgtaatcccagcactttggggggccaaggccacccagataaacagccacaggtgagaaggctgctgagtgcccctggaagcagaatagctgggcaatgggtccttgactctctgaaatctcctcatttactgctgaaaggggaaaatgacaagaatagtttatcccagaaagcatttctctacgttgctcatgttttggatgagtctgagagaggcgtgctggtcaccatgacaacagagacaggccccgactctgaggtgaagaaagctcaggaggaggccccgcagcagcccgaggctgctgccgctgtgaccacccctgtgacccctgcaggccacggccacccagaggccaactccaatgagaagcatccatcccagcaggacacgcggcctgctgaacagagcctagacatggaggagaaggactacagtgaggccgatggcctttcggagaggaccacgcccagcaaggcccagaaatcgccccagaagattgccaagaaatacaagagtgccatctgccgggtcactctgcttgatgcctcggagtatgagtgtgaggtggagaaacatggccggggccaggtgctgtttgacctggtctgtgaacacctcaacctcctagagaaggactacttcggcctgaccttctgtgatgctgacagccagaagaactggctggacccctccaaggagatcaagaagcagatccggagtgagtggcttgttgtgtttggggaggtgggtagcccctggaattttgccttcacagtcaagttctacccgcctgatcctgcccagctgacagaagacatcacaagatactacctgtgcctgcagctgcgggcagacatcatcacgggccggctgccatgctcctttgtcacgcatgccctactgggctcctacgctgtgcaggctgagctgggtgactatgatgctgaggagcatgtgggcaactatgtcagcgagctccgcttcgcccctaaccagacccgggagctggaggagaggatcatggagctgcataagacatatagggggatgaccccgggagaagcagaaatccacttcttagagaatgccaagaagctttccatgtacggagtagacctgcaccatgccaaggactctgagggcatcgacatcatgttaggcgtttgtgccaatggcctgctcatctaccgggaccggctgagaatcaaccgctttgcctggcccaagatcctcaagatctcctacaagaggagtaacttctatatcaagatccggcctggggagtatgagcaatttgagagcacaattggctttaagctcccaaaccaccggtcagccaagagactgtggaaggtctgcatcgagcatcatacattcttccggctggtgtcccctgagcccccacccaagggcttcctggtgatgggctccaagttccggtacagtgggaggacccaggcacagactcgccaggccagcgccctcattgaccggcctgcacccttctttgagcgttcttccagcaaacggtacaccatgtcccgcagccttgatggagcagagttctcccgcccagcctcggtcagcgagaaccatgatgcagggcctgacggtgacaagcgggatgaggatggcgagtctggggggcaacggtcagaggctgaggagggagaggtcaggactccaaccaagatcaaggagctaaagttcttagacaagccagaagatgtcttgctgaagcaccaggccagcatcaatgagctcaaaaggaccctgaaggagcccaacagcaaactcatccaccgggatcgagactgggaacgggagcgcaggctgccctcctcccccgcctccccctcccccaagggcacccctgagaaagccaatgagtcccagaggacccaggacatctctcagcgggacttggtacctgagcctggagcagccgcaggcttggaagtgttcactcagaaaagcctcgcagcatctcctgagggttcagagcattgggtatttatagaaagagagtacactaggccagaagagctcggtctcctaaaagtgaccaccatgcagcaggaagaaaggcaggcaggccttgctggtatccttgccaacggcagactctccaaggtagacgttctggtggacaagttcaaagtggaagtggccacagaagaaatggtgggaaacagaagagcaaacacccagcaacaaggaaaaatgattgcaagtcctgaagactttgagtcagtgggggaggaaggcccctggatcagggaaagcccaggaggggctgccctggcttccggccgcacattggcagaaaagctcctcgagggctctgagctcagggcagacaccagagaggcaaccatcaggaaccgctgcatgtcagatggtcagccggagggccagacagagctgaggaaggggctggaggagcctcacacttgtgggagacccactgctccagggaccaggccagcagaggtggacgtcctctctccagcctccgacaagggaggactccagtcgtttctattggatccagcccacgcagaagccagagctgagttgagcaatgaaactgatacttcctttgcagagaggagcttctatttaaattatgaagaaaaagactcagaagaccaagtcctccctccacccctggaggagagaaaagggcgcctggatgcccctcccggaggtgagcccaggccgacgctgaattccttagacctgagggtttctgctgctgcttccagcaggagcaaggacgaagcccacatgacttccccaaaggaaggggcagggacccccaagaaccatggaggacctggtgacctgaagggatctcccgcaggacagacgtttgctgaaggctgggaagatgcccagtggggagtggaaggagagtttccccacctgacagccagcgcagcccgagaggaagggacccccgtgagtggagatttgctgggaaaggctgaggaaagtcccacagaggaactgaagaagcaccctcctcacagaggacagggcgtgcatcccgacccccaggcctgcgcccttcctcgggccatccctctgaatgtcaggaagccagtcaaaccagacagaggcaacttcccacccaaagagaggggagtggttcccacccagaaaggaggggctgagctgaaggaccgcgaggcttcagcatttcttcacatggaggtgatcattcccctgccagcctcccctggtcattctgaggacctggcagctctggaggaagcttctccaagcccaacctcccatgggtcaggggagccttcggagctcagggagccctttcttagacatgtccatctttcgaaagccagcccagagcccaaggaccaagtagggtttgtggtgtcccctgccacaggaggtgagcgcaggcctcctcccatcaccagcagaaagcccagagtagtccctgaagaagctgaggggcgcatacctctggggtttgggttcccttcagggaagcgaagggagatgacctctttccaggctggggaccaagagggctccctagaagatattagcaagacctcagtggccaacaaaattcggatatttgagacccacggagctgaaactcgccgaatgagtgagggtgaagcaaggtcccttccaaatgacgtatcttcagaggcacccgtgggacaagcagagcagcagcggagtacgctctcagacctgggcttcgcccaactccagcccccaggggactttgccagccccaaagccacacattccacagtgatacctctggctaccagacacttcagggaggacacttctgcatcctaccaggaagcacacacggaactagagcccgtgtcccccaattcaggctgtgaaaccacgctggcagaagctactggaactggggtaactggccgcaacaaatccggagatgcggtcagggaagagaagcgctccaccaacttagcagccaacacccctgggaagggggggcgcctgagatttgccagcccctcgggccctcagagagcagggctgagggagggctccgaggagaaagtcaaaccaccacgtccccgggccccagagagtgacacaggcgatgaggaccaggaccaggagagggacacggtgttcctgaaggacaaccacctggccattgagcgcaagtgctccagcatcacggtcagctctacgtctagcctggaggctgaggtggacttcacggtcattggtgactaccatggcagcgccttcgaagacttctcccgcagcctgcctgagctcgaccgggacaaaagcgactcggacactgagggcctgctgttctcccgggatctcaacaagggggcccccagccaggatgatgagtctgggggcattgaggacagcccggatcgaggggcctgctccaccccggatatgccccagtttgagcccgtgaaaacagaaaccatgactgtcagcagtctggccattagaaagaagattgagccggaggccgtactgcagaccagagtctccgctatggataacacccaggttgatgggagtgcctcagtggggagggagttcatagcaaccactccctccatcaccacggagaccatatcgaccaccatggagaacagtctcaagtccgggaagggggcagctgccatgatcccaggcccacagacggtggccacggaaatccgttctctttctccgatcatcgggaaagatgtcctcaccagcacctacggcgccactgcggaaaccctctcaacctccaccaccacccatgtcaccaaaactgtgaaaggagggttttctgagacaaggatcgagaagcgaatcatcattactggggatgaagatgtcgatcaagaccaggccctggctttggccatcaaggaggccaaactgcagcatcctgatatgctggtaaccaaagctgtcgtatacagagaaacagacccatccccagaggagagggacaagaagccacagaagctaaaacgagaaactaagaataacaaaaggcaaccttgcatccggcggaacctgcaggcacgggccattcttcccgcgacccagggctctgccggaccgcttcccccgtcgctccagtcagacgccaaagctggagaacttccggtgcgtttccgctgtaccggaacgtggggcgaggcgctgttcatcaaagaaaaagggttcttttggtcacccaccactggccccatggctgccgtgcagatggatcctgagctagccaagcgcctcttctttgaaggggccactgtggtcatcctgaacatgcccaagggaacagagtttgggattgactataactcctgggaggtcgggcccaagttccggggcgtgaagatgatccctccaggcatccacttcctccactacagctctgtggacaaggctaatccgaaggaagtaggccctcgtatgggtttcttccttaagcctgcaccagcgggggctgacagtgctgcgctggagcacactcagggaagaaggttagacctgtccccagccccagagtctgaggtggaggccatgagggccaacctccaggagctggaccagttcctggggccttacccatatgccaccctgaagaagtggaccatcactcaccaacttcatcagcgaagccacagtggagaagctacagcccgagaatcgacagatctgtgccttttccgatgtgctacctgtgctctccatgaagcacaccaaggaccgcgtggggcagaatctaccccgctgtggcattgagtgcaaaagctaccaagagggcctggcccggctaccagagatgaagcccagagccgggacagagatccgcttctcagagctgcccacgcagatgttcccagagggtgccacgccagctgagataaccaagcacagcatggacctgagctatgccctggagactgtgctcaacaagcagttccccagcagcccccaggatgtgcttggtgaactccagtttgcttttgtgtgcttcctgctggggaatgtgtacgaggcatttgagcattggaagcggctcctgaacctcctgtgccggtcagaagcagccatgatgaagcaccacaccctctacatcaacctcatctccatcctgtaccaccagcttggtgagatccccgctgacttcttcgtagacattgtctcccaagacaacttcctcaccagcaccttacagaaaggattcttgattgacatcagtgaagacttcatcgaggtcctgtttctcagaggtacagaacgcttttctaaagccaacctactgttggatgagtccctcattgccgtggatgccaccctgagaaagaaagctgaaaagttccaagctcacctgaccaagaagttccggtgggactttgctgcggaacctgaggactgtgccccggtggtggtggagctccctgagggcatcgagatgggctaa

SEQ ID NO: 153996 - DNA, 2478 bp, Homo sapiens
  misc_feature (1)...(2478): n = a,t,c or g
ggctgtaccggaacgtggggcgaggcgctgttcatcaaagaaaaagggttcttttggtcacccgccactggccccatggctgccgtgcagatggatcctgagctagccaagcgcctcttctttgaaggggccactgtggtcatcctgaacatgcccaagggaacagagtttgggattgactataactcctgggaggtcgggcccaagctccggggcgtgaagatgatccctccaggcatccacttcctccactacagctctgtggacaaggctaatccgaaggaagtaggccctcgtatgggtttcttccttagcctgcaccagcgggggctgacagtgctgcgctggagcacactcagggaagaggtagacctgtccccagccccagagtctgaggtggaggccatgagggccaacctccaggagctggaccagttcctggggccttacccatatgccaccctgaagaagtggatctcactcaccaacttcatcagcgaagccacagtgaagaagctacagcccgagaatcgacagatctgtgccttttccgatgtgctacctgtgctctccatgaagcacaccaaggaccgcgtggggcagaatctaccccgctgtggcattgagtgcaaaagctaccaagagggcctggcccggctaccagagatgaagcccagagccgggacagagatccgcttctcagagctgcccacgcagatgttcccagagggtgccacgccagctgagataaccaagcacagcatggacctgagctatgccctggagactgtgcacaacaagcagttccccagcagcccccaggatgtgcttggtgaactccagtttgcttttgtgtgcttcctgctggggaatgtgtacgaggcatttgagcattggaagcggctcctgaacctcctgtgccggtcagaagcagccatgaagaaaacgccacgcgcctgtggatcaacctcatatccatcctgcaccaccagctgggtgagatccccgctgacttcttcgtagacattgtctcccaacacaacttcctcaccagcaccttacaggttttcttttcctctgcctgcagcattgccgtggatgccaccctgagaaagaaagctgaaaagttccaagctcacctgaccaagaagttccggtgggactttgctgaggaacctgaggactgtgccccggtggtggaggagctccctgagggcatcgagatgggctaactcggggagcgctctcagctgcgaggggccccttcccacagggctgcagtcctggcctctccatttacttcttcccatcctgggacctgccagggcagcaatcttttccaggtcctgcaaagatggagccagaattccctttttcactgattaaatatatttctttcatttgccaaagaggctgttacccatcctgaaagggcacatttgtggggtttccccatcagccaggccttggtgctaacctggctgaatttcacacaggctcttacacacacacgctcctaaggagacatcttgcctacacggcaaccatattttcctttggaatgagaaggaatttgaaccaaaagtccaagaaagaactgattgcttgttccataaggagcttaggaaacaaagaaaccctggattgcccagggggtcttgagaagttggttggtgactttttttgcggttaaatgaagggtgatggggagatcagcccgtaattgccgcctgcctcttgctaaataggagcagaggacttggcctgcagctccttgggaccactttgattgggaagagagtttcaagggaggcagctggattcaatctagcaggtggtcagcttcagttttcttccattcgaaatcccatttcttcctgttccagaggcccagtgggtcatctcccaagggtgggtgttggaccctgggccttcagaggccttgcttggtgctgtcacctccgacctgtttccattccgaggcctcacccagaagtgggnaccctccccttcctcaccagagccaccgtgactgtttctgatgacctgggagagtcaacaacaaccagaaaggttttcgccccagaagcaggcttcttaaggcctttacgaagttttgtgccttccaagtgctgaagaagaacctggtcaagcctaaatcttcccaggtcccgctttggagcttgtcaagtcaccggagtaatgagctcctggttccttcgggagttccttcgtgcctgtgtggtcagggtttcctctctagacaagtacacaggcccctgccaccctgacatcaaactgttgtactatgatcacagtccctgtgccatccttttccaagactggggctcacaccatgtttttgaatgagaatccctgctggttgagacttttgcttccacttgtttccttggagatgtttttccaagagcataatgtacattaaagtcttcgagttgagacaaaaaaaaaaaaaaa

SEQ ID NO: 153997 - DNA, 483 bp, Homo sapiens
tttcaagttatataaattatttattaaattccttcctgttttagagaatggaggtgttgtccaagttggagaattgttaccttgcaagatttgtggaagaacattctttccagtagcattagtgagtagactgattttgtacctttatggttttacagatctgtaattgttcaataattctggtcaattctcatgggaagaatttacgtggaatagtttttgaagagttaatgggtacctattctttgttcaagggtcttgatttcaagctatgcccattcttccaaaatggtgttctttccttccgaagttatggtcttccagaacctcttcctgtaaaaggtttaaaaggtattgcctcatttttacgagaccttgttgctggagggttggggaagtccaggaggcataaggtgctagactcctggcgaggggccttctgtgcaaatctccttggttgggttagggcttcaccccaggggc

SEQ ID NO: 153998 - DNA, 1450 bp, Homo sapiens
tttcgttacagccagagctgggcggtggcgggcgctggtgaaggagtctcgctgagctcgaggaggtggcgcgatggagggactggaagagaatggaggtgttgtccaagttggagaattgttaccttgcaagatttgtggaagaacatttctttccagtagcattaaaaaaacatggacccatttgccagaagactgcaactaaaaaacggaagacttttgattcaagcagacagagagctgaaggaactgatattccaacagtaaaacctctcaaaccgaggccagaaccaccaaagaaaccatctaattggagaaggaaacatgaagaattcattgctaccataagagcagctaaaggccttgatcaggccctcaaagagggttggcaaactttcctcctcctcctccaaccttctttatgatcctggatttataattcaatggtcccatattggtcagaggaagattccaatggaaaatgcagctgatagacatataaatttctgtaaagaacaggcagcacgtattagtaataaaaggagattttctacagataccaaaggaaaaccaacttctcggacacaggtgtataagccacccgcacttaaaaagtcaaattctcctggaactgcatcatcaggatcttcacgagtaccgcagccaagtggcgctggccaaaactgttgtaggtgtcccttccagggtaaagtgtcttcaagtagcagctctttggggaaaccaaacttcagaccttgtctccctctcataaagggatagcagcccctcatgcaggagctaatgtcaaaccccgaaattccacaccacctagttttgcaaagaaatccttgccccaggtgtgcttacaaacaaaaagaaaaacttatactgagagctacatagccaggccagatggggactgtgcatcttcccttaatggtggaaatattaaaggcattgaaggacattcccctggaaactttccaaaatttctgccatgagtgtgggactaaataccctgtagaatgggccaaattttgctgtgaatgtggcattcgaagaatgattctatgaatagaatctcaaaaaaaaaaaaaaaagccaagttcagagtttatgattattgctgcttggacagctagagcacatcctctagttagtttgtgctaaaaatactcgaaataccatttccagttaattttgaagtgtaatcttttggctatataatgtgtgtatgtttatatgtgtacatatactgtatataataaatatctgataccccagactgtgtcattcaaggaaatattcacttatctgtcagaaaataatttcaaatggaacaattaatttaggtgttacttttctgttgttgttaaagcacgttaagtacatttccacaaactctcatactctagtgcttagcccttcaagctttaggataagtataact

SEQ ID NO: 153999 - DNA, 1185 bp, Homo sapiens
cccacgcgtccggggaatacttccaagttgtagtgttgttgttttcagcctgctgctgctgctgctgttgcggctaggggaaccgtcgtggggaaggatggtgtgcggagaaatgtgaaaagaaacttggtactgttatcactccagatacatgggaaagatggtgctaggaatacccacagaaaattggtggaagaaagctgaatgaaaataaagctttgacttcaaaaaaaagcaagatttgatccatatggaaagaataagttctccacttgtagaatttgtaaaaagttctgtggcaccaaccaggttctcatttactgccagcggctgtgcctacaaaaaaggcatctgtgcgatgtgtggaaaaaagggttttggataccaaaaactacaagcaaacatctgtctagatgtattgatggaatttctggctttctaaatgattttactttcttgccttgaattttcaaggcatagatgtcaacttaacagataacatggttttaagataaattaagtttaaaccagagaatttgattgttactcattttgctctcatgttctaaacagcaacagtgtaactagtcttttgttgtaaatggttattttccttataagaattttaagaactaagtggcaaattccatgaaaatatttctcagttctgtatgcacttttatttaacattattccatataattctccccccacccactttatttataggatactgcaaaagtgaggaaggagataatagatactttgctctgaatttgggcatccagagttaacatttctcccctcactcccttgctgggtgtccataggttattaggaatcaggcagcctctttaactaattggcgggtttcataggatatataaatgtttcaagccattattgctgaatggttctttagttattaacctagacccaaatcaaagaccagttggatttatgatattttttatttgttcttgcagccaaagtgccagtttctttaatatgtgaccaagaacacaaggagcatccatatggccaaataaatacactgaattttagaaaaacatattactttgaattcaaattgtcatgaaaaccagaacagtgtttgtccatgttgcatgtaatgaaaataaatgccctgcctctgagaaaagcatctttcaagtcaaaagccag

SEQ ID NO: 154000 - DNA, 1323 bp, Homo sapiens
tcagttatatgacttcttgagaaccctgtagcccacttgtctacatttgcttccatatgccactgttccaaactttcccacattttcctgtctttttctaagccctccaaactgttccaacctctgcctgttacccagttccaaagtcacttccacattttcaggtatcttttcagcaatgccccacactactttgctccagttcccaataagtttctcatttccatctgagacctcattagcctggccttcattttccatatcactatcagcattctggtcacaactattcaacaactgtctaggaagtgccaaactttcctgtcttcttctgagccctccaaactgttctaacctctgcctcttatccagctccaaagcttcttctacattttcaagtatcaccaccagactagagtctctactacgaggcttatcacaggatgtgtcagggaagtataaaacttgagctagatacagagtgccgattggtgtatttacaatccctgagctagacataaaggtcctccacgtccccaccagagcagctagatacagagtgtccattggtgcactcacaaaccttgagctaaacacagggtgctgattggtgtatttacaatccctgagccagatataaagactctccacgtccccaccagactcaggagcccagctggcttcacctagtggatcccacaccggggctgcaggtggagctgcctgccagtcccggtgccgtgcgcccgcactcctcagcccttgggtggtggatgggactgggcgcggacccaccagacccactgtaagttggatctgagctaaaactccattaattacctgacatccatgagcctctactttaactggaggactgcaacgacattttgggtcccctggaatcaatgtcagctcagagccagtgttcagtagtccccaaaatgtctgatcaattccctttctccatagcacagttaccctgggaaaaggccacaggtctccttgcttttgatggttgagtgctgccacttggtccctgccatcttgggatccaattactcccattgtatttaaatgttgtagttgagtgactgtggttcccaccgttagatctgacatacagagaagagcaattacagggctcttcaaagatgcaggttctgccctcacaaatctattttgcaagacattggtcaaggctatatcttctagattctccaagctgggatgagtaggcctaaagtgactaatccactccaccatcacaatctccctaagtctttgaatcccttcctctacattaacccaagggagatcaggcat

SEQ ID NO: 154001 - DNA, 1296 bp, Homo sapiens
ttacagagagtggcttgagtgggcaacccgtgggcagtcatggtcccgtgtatcttcccaccggcactgctgggaccagagtgtgggtgacagaacaaaaggattccgtccaaatgtgttagcaggcctcttcaggtaggctgtgctgcgctcgatttctccccgggccttagctgccttcccgccgggcagggctcgggacctgcagcccgccatgcctgagcctcccacccgcttcacgggctcctgtgccgcccgagcctctccaatgagcgccaccccctgctccatggcgcccagtcccatcgaccacccaagggctgaggagtgcaggctcccggcgcgggactggcaggcagctccacctgcagcccctgtgcgggatccactgggtgaagccagctgggctcctgagttctttgggtccacactgcttttatgagctgtaacactcaccgcgaaggtctgcagcttctctcctgaagccagcgagaccacgaacacaccagaaggaagaaactccgagcacatcaattccggacgcagtagtattgtccacgggcatccacaagtgagggagaaggcagcatattgaatatactgtctgtggttggtagtgttgtccacgggcatccacaagttagggagaaggtagtgagaggtgacagcgtgccggcagccctcggtcgccttcagcacctccttggccttggcgctcactctggccctgcttgaggagcccttcagcctgctgctgcactgtgagagcccccttctgggctgggccagcagctgcggagggtgtgctgggtcccccagcagtgctggccctgctggcattgtgctcaaattctcgctgggcctcagctgcctccctgcagggtagggctcgggacctgcagcctgccatacctgagcctcccccctgcggtgggctccttcatggcccgagcgtccctgatgagcgccgccccctgctcgatggctagggtcccctcgaccacccaagggctcctcagccgcactcctcagtgcgggcagatggcgcaggactggcaggcagctccacctgcctccccagtgcaggatccactggaagaagccagctgggctcctgagtctagtggggacttggagaacttttatgtctagcgcaaaggtctgcagcttctctcctgagaccagtgagaccacgaactcaccggaaggaatgaacaactccagacgcgtcacttgaagagctgtaacacttaccgcgaaggtctgcagcttcactcctgaagccagcgagaccat

SEQ ID NO: 154002 - DNA, 503 bp, Homo sapiens
ctgtccagagtccaaggttcctgccacaaaccggaaagcaaagaggaccacacagcactctgaaaaggccgcggtggtttggagctgtttgctcgagttttctctaaattgtgcccctggactgtcagaactgtcagcggctgacggccggtcccgcgcaacttcaaggttcccgggctgccaaccgcaggaaagcgctggtgtcgccaagcagttccgtagcagggaagatggttttgcagaggaaatggggtatttccttctagggtggtggcggcttttctttttattcccccacccgcttaggatgacgcatagggcatctccacagagttttggccacttgcatcctagagcttgatgcttttcctgagatacgcgcccttggtgggtggtagtttctgcatctggtctcacccactccagttcttcctcacctccatcaaggtgaactttgtagaaacactcttctgcttccagtccttcaaagacattttttagcc

SEQ ID NO: 154003 - DNA, 579 bp, Homo sapiens; identical to SEQ ID NO: 133636

SEQ ID NO: 154004 - DNA, 3138 bp, Homo sapiens
tcattttccctccaccttttcctccttgtcttccttctccttattcttctcttcatccttttcctcctccccttcatcttcttcctcttcatctttattatcaacatggtgagtgttacagttcttaagggagcgcgtctggagtttgttccttctgatgttcggatgtgttcggagtttcttccttctggtgggttcgtggtctagctggctcaggagtgaagctgccgactttcgcgcttgagctagatacagagtgcccattggtgtatttacaatccctgagctagacataaaggttctccaaggccccaccagactcaggagcccagctggcttcacccagtggatctcgcacgggggctgcaggtggagctgcctggcagtcccgcgccctgcgcctgcactcctcagcccttgggtggtcgatgggactgggtgccgtggagcaaggggtggcgctcgtggaggaggctcgggggcacaggagcccacggaggggttgggaggctcaggcatggcgggctgcaggtcccgagccctgccccacgggaaggcagctaaggcccagcgagaaatccagcgcagtgccggtgggctggcactgctgggggacccagtacactctccgcagccattggcccgggtgctaagtccctcattgcctggagccaacagggccggccggctgctctgagtgcagggcccgccaagcccacgaccacctggaactctagctggcccgcaagcacggcacacagccctggttcctgctcgggcctctccctccacacctcccactaaccaaggtatccaggttccgtcatcacaacggactaggaggctggcctgatccacggagaggaaggaagagcgtggcagcccacccccctccgcaaagggacagtcaaagtactttgttaaacaggtcctgttccctctgccacccaactggacgagaccctccaacaggggttgtaagataccctgtacaggaacaatcctgctggcatcaggttggtgcccctcgaggtcagagatcccagaaaaaggagcaggcacctgcctttgctgttctccagcctcctcaagtaatatctctgggcttgggagcaaaccagatgaatagtgcctgaagtgaacccctagcaaattgcagcagcccattgatgattttttttcgctataccacaatatatcaataacattgtatccgggaggaaggcttggtgccatgttgcaactgtgtctgttgtaattgttctgccgaatctggaatttcctgaacaacccaaaacagccagaggcagagtctctcagagaagcatctaagtcgcctagaccagggtgcttgggcaatgacatggaaatgtcctctttccaagcagagaagacagagtcccctccatatgaccagagaccacaggattgtagaggcttgtaacacaagggcaacaggcactcaaaacggaaagctctatgtctctttaagaatgcaatggttctgagccttgttgctaggctagctgtgtttccaggcaagctcattagagcatatcttggttctgcacatctcagggtggggtgctcatttcttttctctcccaatgcacgaagcattgccaaagctctacagcagtggtccctgatcttttcagcaccagggactggtttcacggaagacaatttttccatggatggctgtcgggggatggttttgggatgattcaagcacattacatttatcgtacactttatttctattattgttacattgaaatatataatgaaataatcatacaactcatcataatgtcgaatcagtgggagccctgagcttgttttcctgcaactagatggtcccatagtccaggagggaagcagatgaaggaattcatggtgaaattgcagagtggtaattgcttggataggatacagtgggttctgtgggggatcatggaggaacagccagatgggggaagtgacatccaaaccgaaacttgaaacagggctgttgtttcctgactttttaatgattgccattctaactggtgtgagatggtatctcattgtggttttgatttgcatttctctgatggccagtgatgatgagcattttttcatgtgttttttggctgcataaatgtcttcttttgagaagtgtctgttcatgtccttcgcccactttttgatggggttgtttgtttttttcttgtaaatttgtttgagttcattgtagattctggatattagccctttgtcagatgagtaggttgtgaaaattttctcccattttgtaggttgcctgttcactctgatggtagtttcttttgctgtgcagaagctctttagtttaattagatcccatttgtcaattttgtcttttgttgccattgcttttggtgttttggacatgaagtccttgcccatgcctatgtcctgaatggtaatgcctaggttttcttctagggtttttatggttttaggtctaacgtttaagtctttaatccatctcgaattgatttttgtataaggtgtaaggaagggatccagtttcagctttctacatacggctagccagttttcccaacaccatttattaaataggaaatcctttccccattgcttgtttttctcaggtttgtcaaagatcagatagttgtagatatgtggcgttatttctgagggctctgttctgttgcattgatctatatctctgttttggtaccagtaccatgctgtttcggttactgtagccttgtagtatagtttgaagtcaggtagtgtgatgcctccagctttgttcttttggcttaggattgccttggcaatgcaggctcttttttggttccatatgaactttaaagtagttttttccaattctttgaagaaagtcattggtagctttatggggatggcattgaatctgtaaattaccttgggcagtatggccattttcacgatattgattcttcctacccatgagcatggaatgttcttccatttgtttgtatcctcttttatttccttgagcagtggtttgtagttctccttgaagaggtccttcacatcccttgtaagttggattcctaggtattttattctctttgaagcaattgtgaatgggagttcactcat

SEQ ID NO: 154005 - DNA, 663 bp, Homo sapiens
ctactgagggaacatcatgttgatgtatcttcttactggtgatggcattgtgtccggaattggtgggttcttggtctcactgactttaagaatgaagccgcggaccctcgtggtgagtgctacagttcttaaaggcggcgtgtccagagtttgttccttctgatgttcggatgtgttcgtagtttcttccttctggtgggttcgtggtctcgctggctcaggagtgaagctgcagcccttcgcagtgagtgttacagctcttaagggcgcgcgtctggagttgttcgctccccccggtgggtttgcgatctcgctggcttcaggggtgaagctgcagaccttcacggcgtatgttacagcagactcaggagcccagctggcttcacccagtggatccagcaccagggcagcaggtggagctgcctgccagtcccgcgccgtgcgcctgcactcctcagcccttgggtggtcgatgggactgggcgcctccgcagccattggcctgggttctaagcccctcattgcccggagccggcagcgccgactggctgctccaagtgcggggcccgccaagcccacgcccacccggaactccagctggcccgccagcaccgtgcgcagccctggttccagctcgcgtctctccctccacactcccctcat

SEQ ID NO: 154006 - DNA, 444 bp, Homo sapiens; identical to SEQ ID NO: 117630
  misc_feature (1)...(444): n = a,t,c or g

SEQ ID NO: 154007 - DNA, 1026 bp, Homo sapiens
ctagacataaaggttctccaaggccccaccagactcagtagcccagctggcttcacccggtggatcccgcacctgggctgcaggtggagctgcctgccagtcccgccgcatgcgcctgcactcctcagcccttgggtggttgatgggactgggcgcagtggagcagggggtggcgctcgtcgaggaggctcgggccgcacaggagcccacggagggggtgggaggctcaggcatggcgggctgcaggtcccgagccctgccccgcgggaaggcagctaaggcccggtgagaaatcgagcgcagcgcctgtaggctggcactgttgggggacccggtacaccctccgcagccgctggcccgggtgctaagcccctcattgccctgggcgacagggccggccggctgctccgagtgcgggcccgccaagcccacgcccacccggaactccagctggcccgcaagcgccgtgcgcagccccggttcccgctcgcgcctctcccccgacacctccctgcaagctgagggagccggctccggccttggccagcccagaacggggctcccacagtgcagcggtgggctgaagggctcctcaagtgccgccaaagtgggagcccaggcagaggaggtgcggagagcgagcgagggctgtgaggactgccggcacgctgtcacctcagcctccagcatctccggggcacaggtgatggatactcctgagttcagagaagctctagctccacaactcaaagctcctgtccacaccggcattccgctgtgctctctcccctgtgccctgatgtagaagatcctttcttctaagttcccattttctttcctgccttcatatgtctgtacatcatctttcccctgaacccatccatccattatttctacttcctcaagctcttcccattcagttcctacaaactgaatgcgtatatacccttgcctgaagactggtcctcctctactggggatgttggtcctcttcaggcgagtgtgagcttcaggagggacacccat

SEQ ID NO: 154008 - DNA, 1524 bp, Homo sapiens
ctagcatttgtgtcgttgtcctgaaacatgatactgtgtcacagacatccagggctggtcagtagctgagctcccacttgcttctgaagctctctgaggagtcgtgctgccattagatactggagtctgaagccagagttctggagctgagaggtccaagatcaaggcatcagcagatttggttgtttggatagcgctgctctcagtcgcattgctgcgtcccacagtggggagggatgctgtgtcctcacctgcagacttaatcccacatggaagccgccaagggttatggcttgcacctttaggagcagcatcctgagctacacctttgctccagttcccaatgaattctttgtatctatctgagaccttatcagtgtggcctttactatccatatttctatcaacattttggtgacaacaacttaacaattctctaagaagtaccaaactttccctcatcttcctgtcttcttctgagcctccaaattcttctaagctctgctcattacccagttccaaagccactttcacaccttcaggaatctttatagcaatgccccactcttctgtatcagttttctgtctgtccatttttgttgctataaaggaatatctgaggagtcctgaaggttgttcaggaagcataatgttggcatctggatctggtgagggcctcaggaagtttataatcatggtggaaggagaaggggagccagtatatgttatggcggcgctgcgctcgatttctcgccgggccttagctgccttcccgcagggcaggggttgggacctgcagtccgccatgcttgagcccccgcccaccccgtgggctcctgtgcggcccgagcctccccgacgagcaccgccccctgctccacggcgcccaatcccatcgaccacccaagggctgaggagtgcgtgcgtcacggcgcgggactggcaggcagctccacctgcagccctggtgcgggatccactgggtgaagccagctgggctcctgagttctttgggtccacactgcctttatgagctgtaacactcaccgggaaggtctgcagcttcactcctgaagccagcgagaccacgaacccaccgggaggaacgaacaactccagacgcgcctccttaagagctgcaacactcaccgtgaaggtccgcagcttcactccgcgagggtccgcggcttcattcttcaagtcagtgagaccgagaacccaccaattccggacacaatatagtccaaggatgtcaaaaatacgtgattgcagtagaagttgttcatttattagttttctggcttcgtggagaattatctgccttctctgagtattgatttcattgtgcgcatggtgaagatatcgcctgttctggcccctgccttcttcttgaaagacagtcataaagttaccctctgatccaactctctgtgtcacatcttgcacctggagtccttcaattgtctgttctcctccaatgtgcttacaagtgaaatcaatgggcttctttacactttcctgcat

SEQ ID NO: 154009 - DNA, 972 bp, Homo sapiens
tcacccatgatcaaccccaccatgttcttcgacatcgccgtcgatggtgagcccttgaggtgtgtctcctttgagccttttgcagacaagtttccaaagacagcagaaaactttcatgctctgagcattggagagaaaggatttggttataagggttcctgctttcagataattattccagggtttatgtgtcagggtggtgacttcacacgccataatggcactggtagcaagtccatccaagttattccttgccccaaagaaaaccacctgcagaagatacctcatctgtcgcaggcagcctacagcatattctcgaacgtactggtctggatagttgaaatccagaagctctagggcctcccgggggggcagtttaggccaaatctgaagcagcgcctgaagcactgcactgtgggagccactttctgggctagccaaggccggagccggctccctcagcttgcaaagaggtgtggaggcaggcgctggcgggaacctggtctgtccgtggcgcttgcgggctagcgcgagttccgggtgggcgtggcctcggcagacccggcattcggagcagctggccggccctgcccgcaggggcaatgaggggcttagcacaccggccagtggctgcggagggtgtactgggttccccagcagtgccagcccaccggcgttgcgctcgatttctcgcccggccttagctgccttcccgcggggcagggctcgggacctgcagcccgccatgcctgagcctcccaccccctccgtgggctcctgtgcggcaagcggagcctcccagacgagcgccgccccctgctccctggcgcccagtcccatcgaccacccaagggctgaggagtgcgggcacacggcacgggactgccaggcagctccacctgcagcaccggtgcaggatccactgggtggaagccacctgggctcctgagtcgcgagggtccgcggcttcat

SEQ ID NO: 154010 - DNA, 993 bp, Homo sapiens
tcatgctgtgtttttcatctctatcaggtcatttatgtttttctttaaactggttatactagttagcaattcctctaaacttttttcaacgttcttagtttccttgcattgggttagaacatgctcctttagctcagaggagtttgttattacccactttctgaagcctacttctgtcaattcatcaaactcattctctgtccagttttgttcccttgctggtgaggagttgtgatcctttggaggagaagaggcattctggtttttggaattttcagcttttctgcactggtttttccttatcttcatggatttatctacctttggtctttgctgttgttgacctttggatggggtttctgtgtggacatcctttttgttgatattgatgctattcctttctgtttgttttcctttgacttcaagaatgaagccgcggacactcgcggtgagtgttacagttcttaaaggcggcgtgtccggagtttgttccttctgatgttcggatgtgttcagagtttcttccttctggtgggtcggtggtctcgctggctcaggagtgaagccgcagaccttcacagtgagtgttacagctcttaaggcaggacgtctggagttgtttgttcctcctggtgagctcgtggtctcgctggcttcaggagtgaagctgcagaccagactcaggagccctgctggcttcacccagtggatcccgcacgggggctgcaggtggagctgcctgccagtcccgcgccctgcgcctgcactccgcagcccttgggtggtcgatgggactgggcgccttggagcagggggcggtgctcgtaggcgaggctccagccgcacaggagcccacggggttgggggaggctcaggcatggcgagctgcaggtcccgagcctgcccaggccgctggggccagccggcggctccgagtgcggggtccgcggagcccacgcccaccgggaactcgcgctgctggcctgcaagcat

SEQ ID NO: 154011 - DNA, 599 bp, Homo sapiens
caccaccagactagagtctctactacgaggcttatcacaggatgtgtcagggaagtataaaacttgagctagatacagagtgccgattggtgtatttacaatccctgagctagacataaaggtcctccacgtccccaccagagcagctagatacagagtgtccattggtgcactcacaaaccttgagctaaacacagggtgctgattggtgtatttacaatccctgagccagatataaagactctccacgtccccaccagactcaggagcccagctggcttcacctagtggatcccacaccggggctgcaggtggagctgcctgccagtcccggtgccgtgcgcccgcactcctcagcccttgggtggtggatgggactgggcgcggacccaccagacccactgtaagttggatctgagctaaaactccattaattacctgacatccatgagcctctactttaactggaggactgcaacgacattttgggtcccctggaatcaatgtcagctcagagccagtgttcagtagtccccaaaatgtctgatcaattccctttctccatagcacagttaccctgggaaaaggccacaggtctc

SEQ ID NO: 154012 - DNA, 1021 bp, Homo sapiens
ttaggtaggaagacactttgaagaacttgacaagctatataggcatgatgtgttgagtcctatctgttctttccaggggacgtagacaggttgaggttggaatgggccatagtcaggaaccaattcatgagtaggcaacaccaccaagaagcagaatcgaaacacaaagtcagagtcacaaagagtgatggcttgggcaaatggagattcaaaatcatgtgccaaaaatccagatggagttgtgtgggcagcattctgctgcagcggtgtctctgctaaaggccggtggcagagcccttcaagaatgaagccgcggaccctcgtggtgagtgttacagttcttaaaggaagcgtgtccagagtttgttccttctgatgttcggatgtgttcggagtttcttccttctggtgggttcgtggtctcgctggcttcaggagtgaagccacatcctgctgattgatccattttacagacagcagagtggtctgttttgacagggcactgattggtgcatttacaagccctgagctagacacaaaggttctccaagtccccaccagagtagctagatacagagtgtcgattggtgcattcacaaacccagactcaggagcccagctggcttcacccagtggttcccgcactggggccgcaggtggagctgcctgccagtcccgctccacgagcctgcactcctcagcccttgggtggtcgatgggactgggcgccgtgaagcagggggcggagcttgtcggggaggctccggccgcgcaggagcccgtgaagcgggtgggaggctcaggcatggcgggctgcaggtcccgagccctgcccggcgggaaggcagctaaggcccggggagaaatcgagcgcagcacagcctacctgaagaggcctgctaacacatttggacggaatccttttgttctgtcacccacactctggtcccagcagtgccggtgggaagatacacgggaccatgactgcccacgggttgcccactcaagccactctctgtaa

SEQ ID NO: 154013 - DNA, 801 bp, Homo sapiens
ctagatataaagactccccacatccccaccagactcaggagtccagctggcttcacctagtggatcccgcaccgggactgcaggtggagctgcctgccagtcctgcgccgtgcgctcgcattcctcagcccttgggtggtcgatgggactgggcgcagtggagtagggggtggtgctcctaggggaggctcgggccgcacaggagcccatggagtgggtgggaggctcaggcatggcgggctgcaggtcccgagccctgccccgcgggaaggcagccaaggcccagcgagaaatcgagcacagtgccggtgggccggcactgctgggggactcagtacaccctccgcagccactggcccgggtgctaagtcccccattgcccggggccagcagggcttgctggctgctccgagtgcggggcccaccaagcccacgcccacccggaactccagctggcccgcaagcgccgcacgcagccccggttcccgctcgtgcctctccctccacacctcccttggtccacttgacaaacgatgttctaagagtgaaggtcaagtgggcctttttctttacactccacaagtagctcaaaacattccacactgcagtctttgtcagatttggtccgtggcttcctgatacaggattttgctcttctttgagtttccagttttcttttttaatttccctggatactcttccatatagaaagggagtcatctgtttattggaggcattggatgatctgctgtttttcttggttgagacttggtaccaccaagaagcagtcagtgccctcat

SEQ ID NO: 154014 - DNA, 2217 bp, Homo sapiens
ttgggggtttattctcttcccttctaacttgacagggtcttgctctgtcattcaggcaagagtgcagtagtgtgatcacttcttactgccgcctcaagcttccagcctcaactcaagcaatcctcccacctcagccacccaagtggctgggactacagattaagaatgacccaaaataaattaaagctttgttccaaagccaatgtgtatactgaagtgcctgatggaggatggggctgggcggtagctgtttcatttttcttcgttgaagtcttcacctacggcatcatcaagacatttggtgtcttctttaatgacttaatggacagttttaatgaatccaatagcaggatctcatggataatctcaatctgtgtgtttgtcttaacattttcagctcccctcgccacagtcctgagcaatcgtcatcggacaccgtctggtagtggatgttgggggggctacttgtcagcaccgggatggtggccgcctccttctcacaagaggtttctcatatgtacgtcgccatcggcatcatctctggtctgggatactgctttagttttctcccaactgtaaccatcctatcacaatattttggcacccgacgttccatagtcactgcagttgccttccacacggagaatgtttcgctgtgtttgctttcgcaccagcaatcatggctctgaaggagcgcattggctggagatacagcctcctcttcgtggggcctactacagttaaacattgtcatcttcggagcactgctcagacccatctttatcagaggaccagcgtcaccgaaaatagtcatccaggaaaatcggaaagaagcgcagtatatgcttgaaaatgagaaaacacgaacctcaatagactccattgactcaggagtagaactaactacctcacctaaaaatgtgcctactcacactaacctggaactggagccgaaggccgacattgcagcaggtcctggtgaagaccagccccaggccaagcgaaaagaaagccccgctattagacttctccattttgaaagagaaaagttttatttgttatgcattatttggtctctttgcaacactgggattctttgcaccttccttgtacatcattcctctgggcattagtctgggcattgaccaggaccgcgctgcttttttattatctacgatggccattgcagaagttttcggaaggatcggagctggttttgtcctcaacagggagcccattcgtaagatttacattgagctcatctgcgtcatcttattgactgtgtctctgtttgcctttacttttgctactgaattctggggtctaatgtcatgcagcatattttttgggtttatggttggaacaataggaggactcacattccactgcttgctgaagatgatgtcgtgggcattgcagaagatgtcttctgcagctggggtctacatcttcattcagagcatagcaggactggctggaccgccccttgcaggtttgttggtggaccaaagtaagatctacagcagggccttctactcctgcgcagctggcatggccctggctgctgtgtgcctcgccctggtgagaccgtgtaagatgggactgtgccagcgtcatcactcaggtgaaacaaaggtagtgagccatcgtgggaagactttacaggacatacctgaagactttctggaaatggatcttgcaaaaaatgagcacagagttcacgtgcaaatggagccggtatgacacactttcttacaacaacagccactgtgttggctggagagggatggggtgggcccaacggggacacaaggaggcagaggagctaacccctctactccactttcaaaactacattttaaagggaatgtgtatgtgaagagcactaccaacatcgcttttgttttgttttgttttgttttaagctttttttttttgcttgtttttaaagccaaaacaaaaaacaaccaagcactcttccatatataaatctggctgtattcagtagcaatacaagagatatgtagaaagactctttggttcacattccgatattaaaatagtgacatgaactggcaaagtggttttaaaagctttcacgtgggataaatgattttctttttttcttttctttcttcctatggtcttgtctgaataaactactctcctgaataaaacaacatccaacccaggtcattgaaatgaaattggccagtc

SEQ ID NO: 154015 - DNA, 2475 bp, Homo sapiens
ggatttgtcttcttgctgctgctggctcccttatctaggttagagttccacaagagcagagggctaaaaaatgtctttgaaggactggaagcagaagagtgtttctacaaagttcaccttgatggaggtgaggaagaactggagtgggtgagaccagatgcagaaactaccacccaccaagggcgcgtatctcaggaaaagcatcaagctctaggatgcaagtggccaaaactctgtggagatgccctatgcgtcatcctaagcgcgcccagtcccatcgaccacccaaaggctgaggagtgcaggcgcagggcgcgggactggcaggcagctccacctgcagcgccggtgcgggatccactgggtgaagccagctgggctcctgagtctgggcagcagatgaaagaagcagctgagttaggagtctcttgcatgggtccagatctggagaaattaacgctctacgaggttaaattacgcctacaaggttgcaaagctgctcagcggccccttggctgtacactactggccatacaaggcaccctgtaccaacgaatcttctccccacttacacaaccagaacttgtcaacggcaaaggatggcatttaactcaggagagcctatcccaaaatggctctcttgagtttctgacatcagaaccacattctccgaaccccaatgaaggcagcagccggcgccaaagtctgcatacgaatgcaaataacatggcctttgcttccgagcagtttccaaatttgccctcgggatcgggaagccggggatttcccggcagagcgcgggtcctccacctggactgtcagaactgtcagcggctgacggccggtcccgcgcaacttcaaggttcccgggctgccaaccgcaggaaagcgctggtgtcgccaagcagttccgtagcaagggaagatggttttgcagaggaaatggtcttcacctacggcatcatcaagacatttggtgtcttctttaatgacttaatggacagttttaatgaatccaatagcaggatctcatggataatctcaatctgtgtgtttgtcttaacattttcagctcccctcgccacagtcctgagcaatcgtttcggacaccgtctggtagtgatgttgggggggctacttgtcagcaccgggatggtggccgcctccttctcacaagaggtttctcatatgtacgtcgccatcggcatcatctctgcaatcatggctctgaaggagcgcattggctggagatacagcctcctcttcgtgggcctactacagttaaacattgtcatcttcggagcactgctcagacccatctttatcagaggaccagcgtcaccgaaaatagtcatccaggaaaatcggaaagaagcgcagtatatgcttgaaaatgagaaaacacgaacctcaatagactccattgactcaggagtagaactaactacctcacctaaaaatgtgcctactcacactaacctggaactggagccgaaggccgacatgcagcaggtcctggtgaagaccagccccaggccaagcgaaaagaaagccccgctattagacttctccattttgaaagagaaaagttttatttgttatgcattatttggtctctttgcaacactgggattctttgcaccttccttgtacatcattcctctgggcattagtctgggcattgaccaggaccgcgctgcttttttattatctacgatggccattgcagaagttttcggaaggatcggagctggttttgtcctcaacagggagcccattcgtaagatttacattgagctcatctgcgtcatcttattgactgtgtctctgtttgcctttacttttgctactgaattctggggtctaatgtcatgcagcatattttttgggtttatggttggaacaataggagggactcacattccactgcttgctgaggatgatgtcgtgggcattgagaagatgtcttctgcagctggggtctacatcttcattcagagcatagcaggactggctggaccgccccttgcaggtttgttggtggaccaaagtaagatctacagcagggccttctactcctgcgcagctggcatggccctggctgctgtgtgcctcgccctggtgagaccgtgtaagatgggactgtgccagcatcatcactcaggtgaaacaaaggtagtgagccatcgtgggaagactttacaggacatacctgaagactttctggaaatggatcttgcaaaaaatgagcacagagttcacgtgcaaatggagccggtggtgcgccggcggttcgcagctgctgggcccgccggcctgggcgcagccggggacagcgacgcgtttcctgcccgggaagggcccgagcgcagggccggctatagcggtcccgcagctgcctgcttcgattttagcactgctgctcccaagagggagcaacgcggccctctgtccctcgtagggcttgaaatgtaa

SEQ ID NO: 154016 - DNA, 3664 bp, Homo sapiens
tcagtgccacagcagtaccgagctgctgcttgatctcacacccctctgcatctcacacatcattgtccctctgcgtgcagttggtgatctctcctgctctcctttaattaactgccaggcagctgccttcccacctctctggtgttgtctcctttccagatgcctctggcagtcagattggggcccatgattcatttggggcaatgaaaacttgtggtacttccaagtagaagcatcaagagcaggcatgtctcctccatctctcctttccttgtgaaagcgacctggttggtgcaggcattggatgggagaggccatgtgatccacactgtatttgccagcaatggatacaaaccaagaagaaatccctgatttactcgctcttggcacctctgcctggtcttccactttggcggcacttgaggagcctttcagcctaccgctgcactgtgggagcccctttctgggctggtcaaggcctgagctggctccctcagcttgcagggaggtgtggagggagaagcctgagtgggaactggggctgcgcacggtgcttgcgggccagtgcgagttccgggtgggcgtgggctcgggggactccactaggagcagctggcctcccctgctggccccgggcaatgaggggcttagcacccgggccagcagctgcggaggatgtactgggtcccccagcagagccggcccaccagtgctgtgctcaatttcttgccaggccttagctgccttcccacggggcagggctcggggcctgcagcccgccatgcctgagcctccccctcgcctccgtgggctcctgtgcagcccggagcctccccgactagtgccaccccctgctccagggcacccagtcccactgaccacccaagggctgaggagtacgggcacaaagcaccgggactggcaggcagctccacctgcagccccggtgcgggatccactgggtgaagccagctgggctcctgagtctgctaatctggtggggaagtggagaacctttgtgtctagctcagggactgcaaacgcaccaatcagcaccctgtcaaagcagaccactgggctctaccaatcggcaggatgtgggtggggccagaatttgggggctaaataccgggcacctgtcggccagttaaaagcgactagcacggccgccagactaaagacacgggtgtcaggctttctgggaaagggctctctaacaacccctgactcttcagagttgggaccgttggatcccacagaccacacttcccaacttacatggacggtcttgcctcaggggtttagggatagccctcatctgtttggtcaggctctggcccaagatctaggccacttctcaagtccaggcactctgatccttcaatatgtggatgatttacttttagctaccagtttggaagccttgtgccagaaagctactctagatctcttgaactttctagctaatcaagggtacaaggtgtctaggttgaaggcccagctttgcctacagcagcgagatagccaggcccctctatactctaatcaaggaaacccagagggcaaatactcatctagttgtatcggaaccagaggcagtaatcccttcgaaaccttaaagcaggccctagtacacgctccagctttaagccttcccataggacagaacttctctttatacatcacagagagagccgggatagctcttggagaccttactcagacttgtgggacaaccccacaaccagtggcatacttaagtaaggaaattgatgtagtagcaaaaggctggcctcactgtttaagagtagttgcagcagtggccatcttagtgtcagaggctatcaaaataatgcaaggaaaggatctcactgtctggactactcatgatgtaaatggcatactaggtgccaaaggaagtttatggctatcagacaaccacctactaagataccaggcactactccttgagggactggtgcttcaaatatgcacttgcgtggccctcaacactgccacttttctcccagaggatggggaaccaattgagcatgactgccaacaaattatagtccagacttacgccacccgagatgatctcttggaagtccccttaactaatcctgaccttaatctatataccgatggaagttcagttgtggagaatgggatacgaagggcaggttatgcaatagttagtgatgtaactatacttgaaagtaagcctcttgtcccagggacaagtgcccagttagcagaactagtggcacttacccgagccttagaactgggaaagggaaaaataataaatgtgtatacagatagcaagtatgcttatctaatcctacatgcccatgctgcaatatggaaagaatgggagttcttaacctctgggaacccccacggatgccacagggaagttatggagttattgcacatggtgcaggaaacaaaagaggtgggagtcttacactaccaaagccatcagaatgggaaggagaggggagaacagcagcgtaagcagctggcagaggcctcagctgccttcctctggggcagggctctggacttgcagcccaccatgcctgagcctcctatcccctccatgggctcctgtgcggcccgagcctccccaacgagtgccagccctgctccacggcgcccagtcccatcgaccacccaaaggctgaggagtgcaggtgcatggcacgggactggcaggcagctccacctgcagccccggtgctggatcaactgggtgaagccatctgggctcctgagtctggtggggcctcggagaacctttatgtctagctcagggattgtaaatacaccagttggcactctatctgtagctcaagctaatctggtggggacatggagaacctttgtgtctagctcagggattgaaaacgcaccaatcagcgccctctcagaccactgggctctaccaatcagcaggatgtggagctgtattccaattttcgctgctcttaaaattttttttaatatcattgcttcccaattgactcacaataacgcagacatagggactgctggagactgtgaccttaaacagttaaagatgtctgcatatacgacatcatgtttgatgggggtgcagggcggtttgccgctgccaccctcggcaccatctctgaactgcccgcttttccggaggagcggaaaagttggaagccgaaaagacaggcgcccggagccctggtctaggtatcaggtgatccggagccctagtcggtgcccactaagaacaccccttctcccatcgggggttcggaggagtgttaagcctgcgggtctgccagtccctaaggcggaactgaaagcgaagatcagccaagagcacagtcggaggcggcagagacggtggcggcctgacctggctctttcgcccctcggagaaccggatcacaactcctcacaagcaagggaacaaaactggatggagaatgagtttgatgaattgacagaagtgggcttcagaacgtgggtaatagcaaattcctctgagctaaagaagcatgttctaacccaatgccaggaagctaagaaccttgaagaaaggttagatgaatttctaactagaataaccagattagagaagaacataaatgacctgatggagctgaaaaacacagcatga

SEQ ID NO: 154017 - DNA, 3555 bp, Homo sapiens
atgtgcgaactcgatattttacacgactctctttaccaattctgccccgaattacacttaaaacgactcaacagcttaacgttggcttgccacgcattacttgactgtaaaactctcactcttaccgaacttggccgtaacctgccaaccaaagcgagaacaaaacataacatcaaacgaatcgaccgattgttaggtaatcgtcacctccacaaagagcgactcgctgtataccgttggcatgctagctttatctgttcgggcaatacgatgcccattgtacttgttgactggtctgatattcgtgagcaaaaacgacttatggtattgcgagcttcagtcgcactacacggtcgttctgttactctttatgagaaagcgttcccgctttcagagcaatgttcaaagaaagctcatgaccaatttctagccgaccttgcgagcattctaccgagtaacaccacaccgctcattgtcagtgatgctggctttaaagtgccatggtataaatccgttgagaagctgggttggtactggttaagtcgagtaagaggaaaagtacaatatgcagacctaggagcggaaaactggaaacctatcagcaacttacatgatatgtcatctagtcactcaaagactttaggctataagaggctgactaaaagcaatccaatctcatgccaaattctattgtataaatctcgctctaaaggccgaaaaaatcagcgctcgacacggactcattgtcaccacccgtcacctaaaatctactcagcgtcggcaaaggagccatgggttctagcaactaacttacctgttgaaattcgaacacccaaacaacttgttaatatctattcgaagcgaatgcagattgaagaaaccttccgagacttgaaaagtcctgcctacggactaggcctacgccatagccgaacgagcagctcagagcgttttgatatcatgctgctaatcgccctgatgcttcaactaacatgttggcttgcgggcgttcatgctcagaaacaaggttgggacaagcacttccaggctaacacagtcagaaatcgaaacaaggaagttgaagtcaatgatctctcaggtctcatctcagatgtggtgatgtcaccaattcccctgacatcccttctatgtgggaaccctgatgaaatccgcagctttccctcactgtgtccagaatgcactgaaggcccaattgacctggtctttgtgatcgatggatccaagagtcttggagaagagaattttgaggtcgtgaagcagtttgtcactggaattatagattccttgacaatttcccccaaagccgctcgagtggggctgctccagtattccacacaggtccacacagagttcactctgagaaacttcaactcagccaaagacatgaaaaaagccgtggcccacatgaaatacatgggaaagggctctatgactgggctggccctgaaacacatgtttgagagaagttttacccaaggagaaggggccaggcccctttccacaagggtgcccagagcagccattgtgttcaccgacggacgggctcaggatgacgtctccgagtgggccagtaaagccaaggccaatggtatcactatgtatgctgttggggtaggaaaagccattgaggaggaactacaagagattgcctctgagcccacaaacaagcatctcttctatgccgaagacttcagcacaatggatgagataagtgaaaaactcaagaaaggcatctgtgaagggatcaactactgtgcactgaacaaaccgggctgtgagcatgagtgcgtcaacatggaggagagctactactgccgctgccaccgtggctacactctggaccccaatggcaaaacctgcagccgagtggaccactgtgcacagcaggaccatggctgtgagcagctgtgtctgaacacggaggattccttcgtctgccagtgctcagaaggcttcctcatcaacgaggacctcaagacctgctcccgggtggattactgcctgctgagtgaccatggttgtgaatactcctgtgtcaacatggacagatcctttgcctgtcagtgtcctgagggacacgtcgccgcagcgatgggaagacgtgtgcaatcagtcctgggagaagaggatgctcctgagaaacgctttgccctgctttctgaccccggtgatctcacagcacatgaattggactcttgtgctctgggggaccacggttgtgaacattcgtgtgtaagcagtgaagattcgtttgtgtgccagtgctttgaaggttatatactccgtgaagatggaaaaacctgcagaaggaaagatgtctgccaagctatagaccatggctgtgaacacatttgtgtgaacagtgacgactcatacacgtgcgagtgcttggagggattccggctcgctgaggatgggaaacgctgccgaaagagttcctgtgagaacaagcgggcagacctggttttcatcattgacagctctcgcagtgtcaacacccatgactatgcaaaggtcaaggagttcatcgtggacatcttgcaattcttggacattggtcctgatgtcacccgagtgggcctgctccaatatggcagcactgtcaagaatgagttctccctcaagaccttcaagaggaagtccgaggtggagcgtgctgtcaagaggatgcggcatctgtccacgggcaccatgactgggctggccatccagtatgccctgaacatcgcattctcagaagcagagggggcccggcccctgagggagaatgtgccacgggtcataatgatcgtgacagatgggagacctcaggactccgtggccgaggtggctgctaaggcacgggacacgggcatcctaatctttgccattggtgtgggccaggtagacttcaacaccttgaagtccattgggagtgagccccatgaggaccatgtcttccttgtggccaatttcagccagattgagacgctgacctccgtgttccagaagaagttgtgcaccattctagctagcggtaccaatagcaaccggcagctgccctccgcttttgctccgccccttctgcttgcgatctgtttccgcttccggtcccgcagttccggctctgctcgaagagctttgcattgtgggaagtctttcctttctcgttccccggccatcttagcggctgctgttggcaggaagatggtggccgcaaagaagacgaaaaagtcgctggagtcgatcaactctaggctccaactcgttatgaaaagtgggaagtacgtcctggggtacaagcagactctgaagatgatcagacaaggcaaagcgaaattggtcattctcgctaacaactgcccagctttgaggaaatctgaaatagagtactatgctatgttggctaaaactggtgtccatcactacagtggcaataatattgaactgggcacagcatgcggaaaatactacagagtgtgcacactggctatcattgatccaggtgactctgacatcattagaagcatgccagaacagactggtgaaaagtaa

SEQ ID NO: 154018 - DNA, 773 bp, Homo sapiens
agggattgagccttgacggctgtggaattcggcacgagcggccatcttagcggctgctgttggttgggggccgtcccgctcctaaggcaggaagatggtggccgcaaagaagacggtgagtgaggcgggccaggcccggaagacgattcacgtggagagatgtcttggccagggcgggcagatgtgagcccacgggggtgacagcatgcctgctggcaatttggaggggcccagaaggaatcacagtggccctctcaatgacttggggtcctcgacttcggaagtttaaggggctcggcttcaaaaagctgggtccggttttgaggcggttgcaggcgaggcccttaggtccgtatttaatgtttgctttgtagaagaagtcgctgctgtcgatcaactctaggctccaacttcgttatgaaaagtgggaagtacgttcttggggtacaagcagactctgaagatgatcagacaaggcaaagcgaaattggtcattctcgctaacaactgcccagctttgagtggcaataatattgaactgggcacagcatgcggaaaatactacagagtgtgcacactggctatcattgatccaggtgactctgacatcattaggaagcatgccagaacagactggtgaaaagtaaaccttttcacctacaaaatttcacctgcaaaccttaaacctgcaaaattttcctttaataaaatttgcttgttttaaaaaaaaaaaaaaaaaagtcgacgcggccgcgaatttagtagtagtaggc

SEQ ID NO: 154019 - DNA, 620 bp, Homo sapiens
gctctgaggaattcggcacgagtaccgaccgaggtttacgcagcgcggggagctttgcgggttgccatttgtaactccggatcctaaaattcctgtcctgttctctgtctcttctaggttgggggccgtccccgtctctaaggcaggaagatggtggccgcaaaagaagacgaaaaaagtcgctggagtcgatcaaccttaggctccaactcgttatggaaaagtgggaaattacttcctgggggtacaagccagactctgaagatgattcagacaaggcaaagcgaaatgtggtcattctcgctaacaactgggcccagctttgaggaaatctgaaaatagagtactattgctatgtttggcttaaaactgggtgtcccatccacttacagtgggcaataatatttgaacttggggccacagcattgcgggaaaattacttacagagtgttgcacactgggctattcattgatccagggtgactcttgacatcctttaggaaggcatgcccggaacagacttgttgaaaagttaaacccttttcacctacaaattttcacctggcaaacctttaaacctgcaaaattttcctttaataaaatttgcttgttttaaaaac

SEQ ID NO: 154020 - DNA, 2580 bp, Homo sapiens
atgggctcccaccatctggttgtcgtgctcattgaaagtccacagacagagagccaaatcgtgagtgattcacatgcttcaaagagaataaaatacctaggaatccaccttacaagggacgtgaaggacctcttcaaggagaactacaaaccactgctcaatgaaataaaagaggatacaaacaaatggaagaacattccatgctcatgggtaggaagaatcaatatcatgaaaatggccatactgcccaaggtagtttatagattcaatgccatccccatcaagctaccaatgactttcttcacagaattggaaaaaactactttaaagttcatatggaaccaaaaaacagcccacatcgccaagtcaatcctaagacaaaagaacaaagctggaggcatcatgctacctgacttcaaactatactacaaggctacagtaaccaaaacagcatggtactggtaccaaaacagagatatagatcaatggaacagaacagagccctcagaaataatgccacatatctacaactatctgatctttgacaaacctgagaaaaacaagcaatggggaaaggattccctatttaataaatggtgctgggaaaactggctagccatatgtagaaagctgaaactggatcccttccttacaccttatacaaaaatcaattcaagatggattaaagacttaaacgttagacctaaaaccataaaaaccctagaagaaaacctaggcattaccattcaacacataggcacgggcaaggacttcatgtctaaaacaccaaaagcaatggcaacaaaagccaaaactgacaaatgggatctaattaaactaaagagcttctgcacagcaaaagaaactaccatcagagtgaacaggcaacctacaaaatgggagaaaatttttgcaacctactcatctgacaaagggctaatatccagaatctacaatgaactccaacaaatttacaagaaaaaaacaaacaaccccatcaaaaagtgggtgaaggatatgaacagacacttctcaaaagaagacatttatgcagccaaaaaacacatgaaaaaatgctcaccatcactggccatcagagaaatgcaaatcaaaaccacaatgagatatcatctcacaccagttagaatggcaatcattaaaaagtcaggaaacaacagcaaactcccgtttgagccgagcaggaacaaacgcgttatgcctgaaccttgtgcacatacaattctttcttctcttgcacggcccgcttccaaaatgcattcaccgccactctccatggaaccttcagcgggccctgggggcagccagaattttccaaacgaggaagctgaggatcggcccagaaccctgaattttgaggggagtgagacttgggccctcacaggcccagacgcgagatatttcaactacacccgggaggcgcggggtgaaaactccctggtgtcgggcgggtgcaggcccctcgcggccggtcgcgccagagcttccacctcagggtgggcggccaagcgcgtgggcacgctgcagggagggccgctcacctgggcaatgccggcgcccatcagcccgccgccgatgaccgtcacgtgcttgacgattatcttcttggccgaggccgaggcggtggacgaggaggacacggaacgcatgaactgcctggtgacgaaggccatggtgtggcagcggcggcgacagcgaggagacccgggcagggaagacgcgcgaggcgggcagccgcggaaagccagactctgggggcggggacctacgcggccctgcagcccgcgcgcccccggcgtccccgtgacgccacaaggcgggggcggggcctcgagtcccgctctgcccattggccctggctgtaacgtcccagcgttgagcgggtatacacgcgcgggctcgcagctgtcagcagccggagcccgagtgagcgcgggcttgagacctgctgagcagcgggacctggcggctggcgttctgtggcatgccctctcccgtgaagagcaggctaaatattatgaattagcacggaaagaaagacagctacatatgcagctttatccaggctggtctgcaagagacaattataagagaggtatactgtcatgtcacagattgtaccatgaacacacagatgaatgtgatgtggaagtacaggcaggtggtcaacaaagagctttttccagagagcttgcccctcctgttgctgcagttgttcttccagccacatgtactctgaagatgggatcacaatcagtgtctccataccagaaaaggctctgtaactttttggtcatgggagagctctttcctctgccctctcctttgcagttcctagaccaggtcattaaaacaccaatgaccagccagaagacatttgaatctttggtagactttagcaaagccctaggaaagcatcctgtttcttgcaaggttgctgcagcaactggtcacacagtagtgttggtagaccagacagaggacatcctggcaaaatccaaaaagggaattgaggaaagccttaggaaagtggcaaagaagaagtttgcagaaaaccctaag

SEQ ID NO: 154021 - DNA, 1389 bp, Homo sapiens
gctccagttactgaaaacaatgggtctccttttggctcccagaatgaattattcccagagccttgtttccttctcgataaaacagaaatcttaacacctaacttaggtatggctttaggattaaatgactgtcaaggggcagtaacttgtgaaatcagaggaagcctgcagatttttgggctgaggaatcttgactgtgatgatgatgtgccacatatccgcagttcaaataaagtgcccgtggtgcagccatcccatgcggtccatcctctcacccccctcatcacttacagtgacgagcacttttctccaggatcacacccgtcacacatcccatcagatgtcaactccaaacaaggcatgtccagacatcctccagctcctgatatccctactttttatcccttgtctccgggtggtgttggacagatcaccccacctcttggctggttttttaatgaacaacttatatttttcaaaaatgaatttagacgcattgaatatctaccgttacttgtaagtgggcaagtgaggcaaggtcagcctgtatatcccatcacgggtggattcaggcaaccctacccatcctcactgtcagtcgacacttccatgtccaggtgtcagagagagtcccgggtaggagctctgcgctgtgccccggccggaccagccacaccatcgggcgatggactcagcctccttggaaagcgttgcctccaaacaaattcatggccgcctgactgtgggatgggaactgtccggaaagcggacattacaagaagagtttgtttgattcaaaatatgccgggggtggggttttcccatcatatgattcccggtcctcctggtccccacacaactggcatccctcatccagctattgtaacacctcaggtcaaacaggaacatccccacactgacagtgacctaatgcacgtgaagcctcagcatgaacagagaaaggagcaggagccaaaaagacctcacattaagaagcctctgaatgcttttatgttatacatgaaagaaatgagagcgaatgtcgttgctgagtgtactctaaaagaaagtgcagctatcaaccagattcttggcagaaggcgtgaccagtatttgtcattgtgcctccccccccgccacatcattcatatgtctataattgtcatcgagatgtggcatgtcagcgggactccagtgttctctgctccccgtcttcacacagtcactcagcttctctctggccagttctgctcagcaggaggtcgtttgatcaaagccctgggaaaggtcagacattcctggagtggtgacactcagccggctgcaagagctgcccttacagaaccttgtactgcagaagctgtagctcaaatggagaggcttttctag

SEQ ID NO: 154022 - DNA, 2669 bp, Homo sapiens
gcggccgccgggcattcgggcgccgcggcagctgcatccggctgccggccggcggcccgacgcgtcagcccgcccccgcttccgcccgactgtcctgctgcacgaccccttccaactctcctttcctcccccacccttgagttacccctctgtctttcctgctgttgcgcgggtgctcccacagcggagcggagattacagagccgccgggatgccccaactctccggaggaggtggcggcggcgggggggacccggaactctgcgccacggacgagatgatccccttcaaggacgagggcgatcctcaggagggaaaagatcttcgccgagatcgtcaatcccgaagaggaaggcgatttagctgacatcaagtcttccttggtgaacgagtctgaaatcatcccggccagcaacggacacgaggtggccagacaagcacaaacctctcaggagccctaccacgacaaggccagagaacaccccgatgacggaaagcatccagatggaggcctctacaacaagggaccctcctactcgagttattccgggtacataatgatgccaaatatgaataacgacccatacatgtcaaatggatctctttctccacccatcccgagaacatcaaataaagtgcccgtggtgcagccatcccatgcggtccatcctctcacccccctcatcacttacagtgacgagcacttttctccaggatcacacccgtcacacatcccatcagatgtcaactccaaacaaggcatgtccagacatcctccagctcctgatatccctactttttatcccttgtctccgggtggggttggacagatcaccccacctcttggctggcaaggtcagcctgtatatcccatcacgggtggattcaggcaaccctacccatcctcactgtcaggcgacacttccatgtccaggttttcccatcctaatgattccgggtcctcctggtcccccacacaattggcatcccttcatccagctattgtaaccacctcaggtccaaacaggaccatccccaccactgccagtgacctaatgcacgtgaagcctcagcctgaacatgagaaaggagcaggagccaaaaagaccccccactaagaaggcccttgaatgcttttatgttatacatgaaagaaatgagagcgaatgtcgttgctgagtgtactctaaaagaaagtgcagctatcaaccagattcttggcagaaggtggcatgccctctcccgtgaagagcaggctaaatattatgaattagcacggaaagaaagacagctacatatgcagctttatccaggctggtctgcaagagacaattatggtaagaaaaagaagaggaagagagagaaactacaggaatctgcatcaggtacaggtccaagaatgacagctgcctacatctgaaacatggtggaaaacgaagctcattcccaacgtgcaaagccaaggcagcgaccccaggacctcttctggagatggaagcttgttgaaaacccagactgtctccacggcctgcccagtcgaccccaaaggaacactgacatcaattttaccctgaggtcactgctagagacgctgatccataaagacaatcactgccaacccctctttcgtctactgcaagagccaagttccaaaataaagcataaaaaggttttttaaaagggaaatgtaaaagcacatgagaatgctagcaggctgtggggcagctgagcagcttttctccccccatatctgcgtgcacttcccagagcatcttgcatccaaacctgtaaccttgcggcaaaggacggtaacttggctgcatttgcctgtcatgtgcaactgggagccagcaaccagcacatccatcagcaccccagtggaggagttcatggaagagttccctctttgtttctgcttcatttttctttcttttcttttctcctaaaagcttttatttaacagtgcaaaaggatcgtttttttttgcttttttaaacttgaatttttttaatttacactttttagttttaattttcttgtatattttgctagctatgagcttttaaataaaattgaaagttctggaaaagtttgaaataatgacataaaaagaagccttctttttctgagacagcttgtctggtaagtggcttctctgtgaattgcctgtaacacatagtggcttctccgcccttgtaaggtgttccagtagagctaaataaatgtaatagccaaacccactctgttggtagcaattggcagccctaatttcagtttattttttcttctgttttcttcttttctttttttaaaacagtaaaccttacacagatgcgttcagcagactggtttgcagtgaattttcatttcttttccttatcacccccttgttgtaaaaagcccagcacttgaattgttattactttcaaatcttctgtatttgtatctgtttttattagccaattagtgggattttatgccagttgttaaaatgagcattgacgcacctgttattttttttttttttaaatagcaaggcacagcctttgccccaaacttgtcatcttaacgtttgtcattccagtttgagttaacgtgctgatgctatttttttaaaagaagctttgtaataaaacatttttaaaaattgtcaaaaaaaaaaaaaaaaa

SEQ ID NO: 154023 - DNA, 882 bp, Homo sapiens
tagagactgggtttcatcatgttggtcgggctggtctccaactcctgacctcaggtgatccacctgccccgccccccaaagtgctagagtgcaatggtgcaatctcagctcactgcaacctccaccccccacccccacaccccgttcaagtaattctcctgcctcagcctcccaaatagctggggattacaggtgtccgccaccacacccagctaatttttgttatttttagtaggagatgggggttttcactgtgttgggtcagggtgggtctccaactgttggccctcagggtggaggccactgtggccccaccttttcctggggtttcataaggatctggaagtggtgggattccttgtttttgctagtatctcatttaggagttggagatgggaccttaaaaactcatctgttttaactcacttttttaaataggatggagttaaacttaatttacttaaggatgtacagttagagccgggaacttcaaccattattcactccccatgccctgtttcccccccacttcgaaattaaatgcggttagcatcatatagttcattttccccctccatgctgctgtgtgattccttgactttggggtatggagtttttccatcccttcaggcaggggttctgtcagttcatggtatagtgattcagtgttaaaatgggtggtgtctccagctttgctgtgcacatttccaaccttgtcaaattaatagtcctgagcaaggcaagaaaaagaggtaataacatacccattttcttttatgaatataagcttataatattttttcatgtgctatttttactgagcaaattgtatgtctcacatgttaacacaataaatatcttgacaattttaaaaaaaaaaaa

SEQ ID NO: 154024 - DNA, 485 bp, Homo sapiens
  misc_feature (1)...(485): n = a,t,c or g
ggacagcaggccccttgacagcccctcccacaggatgtgggctctgaggcntaaaccatttccagcacacacttctttggcctaagggcttctctctcaggacctctaatttgaccacaaccaacctgggcttcagccacatcagtgggcactggagctggggtgcacatggggcctgctcaccttgcccacacatctccagccagccagggccctgcccagcttcaatttacagacctgactctcctcaccttcccccctgctgtccagagctgaacatagacttgcacttggatgtcacctggagtgtcacatgggagtgttatggcagcatcataccaaggcctactgttgcacatggggccaaaaccagtaaacagccaccttcttggaaagggaatgcaaaggctttgggggtgatggaaaagaccttttacaaatgataccaatttaaaaaccctccaacgggcataggtgggaaaaaa

SEQ ID NO: 154025 - DNA, 1894 bp, Homo sapiens
ccatccacttggtatgcgatggagcatggcgactcaacacgcaggatgtgtgtcacagcggtgcggacttttccccatgacggttggttgctcacaagggaacatattgtggtcgttgtaataccaccacgacctatgatggttaacatctgcagggcagttgtccttacccaacaaacattcctggagcctcagcaaatgcaggcccagtgctgggtgctgagtctacaagaacatgtcaaactagccctcttctcaaggagctcacagtctgtaggtacagcctcattgggagtgattcagtgcagtacaattagtgctaaagcccggggatactacctgggctgtggcaagactgaggtcagggaaggcttccagagagaggatatttggcagaggctggtgtgtacagaatttgtggcagacaaagcaggcatgaggatgggacacataggggagcccaagttattgaacagaggagaaagtggctcccagcagctctgggcttccaacccatcatcttacagctctgtggcaagagagtacctgactcccagtagagccagcacaggtcagccgcaagcctcccgggcctggtcaggacccctgcgcatccgcagtgtggctcagacatccggctccgggttcgagcagagtactgcgagcatgggccagccttggagcagggcgtggcatcccggcggccccaggcgctggcgcggcagctggacgtgtttgggcaggccaccgcagtgctgcgctcaagggacctgggctctgtggtttgtgacatcaagttctcagagctctcctatctggacgccttctggggcgactacctgagtggcgccctgctgcaggccctgcggggcgtgttcctgactgaggccctgcgagaggctgtgggccgggaggctgttcgcctgctggtcagtgtggatgaggctgactatgaggctggccggcgccgcctgttgctgatggaggaggaaggggggcggcgcccgacagaggcctcctgatccaggactggcaggattgatcccacctccaagtctccgggccaccttctcctgggaggacgaccatctctacccctagaggactgtcactctagcatctttgaggactgcgacaggaccgggacagcaggccccttgacagcccctcccacaggatgtgggctctgaggcctaaaccatttccagctgagtttccttcccagactcctcctacccccaggtgtgcccccttagcctccggaggcgggggctgggcctgtatctcagaagggaggggcacagctacacactcaccaaaggcccccctgcacattgtatctctgatcttgggctgtctgcactgtcacaggtgcacacactcgctcatgctcacactggccctgctgagatctttccttggccttttgccctggcctgcttcccagcacacacttttttggcctaaggggttttctctcaaggagccctttaatttggccccccacccaacttgggcttcagccacatcagtgggcactggaagctggggtgcaacatggggcctgctcaccttgccccacacatctcccagcccagccagggccctgcccagcttcaatttacagacctgactctcctcaccttcccccctgctgtcccagagctgaacatagacttgcacttggatgtcaccctggagtgtcacatgggagtgttatggcagcatcataccaaggcctactgttgcacatggggccaaaaccagtaaacagccaccttcttggaaagggaatgcaaaggctttgggggtgatggaaaagacctttttacaaatgataccaattaaactgccctgggaaagggcattaggtgggcaaaaaaaaaaaaaaaaa

SEQ ID NO: 154026 - DNA, 702 bp, Homo sapiens; identical to SEQ ID NO: 136945
  misc_feature (1)...(702): n = a,t,c or g

SEQ ID NO: 154027 - DNA, 1359 bp, Homo sapiens
atggggcgggggcgcggggacctgcagcccagcgggctcggacgacctcggacccccgccgctccacgggcaggaagggagcccggagcggcgcgggtgcgcattgatcgtggtgcggatgcagccgctgcggcgcggccccggcttctctgcgagcccgtgcccgggccgggctgtcgggaactcggcccggctccacttgctcgcgcttactggaaacgtgctcccgagcggcgcaaggctcggcggctggagcccggggcggcccttggccgagggcagggccgagccaggtgctcgggcgccccaggctgccgcgccctgctgggccacactgggcgcgtgccacccccggggacccgtcccgtcctgagggcgcccagggcctcccagcgccgctctccccaggctgttgtcaaaggaatgaagctgggctttgcacagggtggcgggcaccaggcttcatccggcagttcagggtccagcaacgagctaggcggccaccagccctaccaggtcctcccctcccggcaggtcttcgccttgatcgtgttctcctgcatctatggtgagggctacagcaatgcccacgagtctaagcagatgtactgcgtgttcaaccgcaacgaggatgcctgccgctatggcagtgccatcggggtgctggccttcctggcctcggccttcttcttggtggtcgacgcgtatttcccccagatcagcaacgccactgaccgcaagtacctggtcattggtgacctgctcttctcagctctctggaccttcctgtggtttgaaggtttctgcttcctcaacaaccagtgggcagtcaacaaaccgaaggacgtgctggtgggggccgactctggctctgaaccaccaaagaggggcagcaaagtaaatcccggggcccgacgactctcctctggctgtccttcggatcggcctgaactgatccgcccacgatgtagaatacgagcagaagcacgaaacagcacctcacgaaagcacatacagcgcaacatacacgagagacgaagaactcacgacacaccagaacaacaaaagaagaacacagcaacaacaggaacagcacagcgattcaatttgcctcaatttaactgcccccttataggcccccccctagccttaaggggaagtcctctgcacgaaattggcataagaacctccaaggggttcttcagctccctactcaatggaaatcactttgaatacctctctacactgacgggggaactgccttggtctcggaactgcatcggatatgggcggaacccgttgtaccattatatgcctaccggacgactacaaaggcgaatagaacagaggagcacatga

SEQ ID NO: 154028 - DNA, 1775 bp, Homo sapiens
gcggcggcggcagcggcggcgacggcgacatggagagcggggcctacggcgcggccaaggcgggcggctccttcgacctgcggcgcttcctgacgcagccgcaggtggtggcgcgcgccgtggtccttggtcttcgccttgatcgtgttctcctgcatctatggtgagggctacagcaatgcccacgagtctaagcagatgtactgcgtgttcaaccgcaacgaggatgcctgccgctatggcagtgccattcggggtgctggccttcctggcctcggcctttcttcttggtggtcgacgcgtatttcccccagatcagcaacgccactgaccgcaagtacctggtcattggtgacctgctcttctcagctctctggaccttcctgtggtttgttggtttctgcttcctcaccaaccagtgggcagtcaccaaactcgaagaccgtgctggtgggggccgactctgtgagggcagccatcaccttcagcttcttttccatcttctcctggggtgtgctggcctccctgggctaaccagcgctacaaggctggcgtggacgacttcatccagaattacgttgaccccactccggaccccaacactgcctacgcctcctacccaggtgcatctgtggacaactaccaacagccaccctttcacccagaacgcggagaccaccgagggctaccagccgccccctgtgtaattgaggcgggcggttaggttggggaagggggacagagagggccctcccctctgccctgggactttcccatgagcctcctgggaacttgccagcccctctctttcacctgttccatcctgtgcagcttgacacacagctaaggagcctcatagcctgggcgggggctggcagagccacaccccaagtgcctgtgcccagagggcttcagtcagccgctcactcctccagggcacttttaggaaagggtttttagctagtgtttttcctcgcttttaatgacctcagccccgcctgcagtggctagaagccagcaggtgcccatgtgctactgacaagtgccttaagcttccccccggccccgggtcaaggcccgtgggaacccgctattattctgcgttctctgcccaaaaaaaatccgtgggggccccaatcaaaacctgcccctgtggcaagcgggagccagaccccaggctctttgtgtccctcacctaaaggtttgccttcccctgtgccccactggctgtatgattctggggggccacccaccctagtgccgggtggccttctgggctggccttcccgttggtgttgatgtgcgggtgcttggtgctcattggcacttcctccttgctcccacccctggcagcagggaaaggggctttgccctgacaacacccagctttatgtaaatattctgcatgttgttacttaggaaagcctgggagagggcaggggtggccccactggcctcccaagactctgtctgtgcccgagtgtattataaaaatcgtgggggagatgcccggccctgggatgctgtttggagacggaataaatgttttctcattcagtctccagtcattggttgagccacagcctaggggttggaggaagactccactgtgggtacacccttaggggctggctttatggaacttgtagtttgaacaaggcagtggcaatccgccccctccagcctgcctggctggcccccttccctctgtctggggtcgcattccacacaagcctttcatcaacatcttaaaatagtaactgtgaaaaaaaaaa

SEQ ID NO: 154029 - DNA, 456 bp, Homo sapiens
gtgattccacagattcaaaaagtgtgtgaagttgtagatgggttcatctatgttgcaaatgctgaagctcataaaagtccaggatacagaggctgaaactctgactggttttttgaatggcattgagtggattcttgaagaagtggaatctaagcgtgcaagatgattctcttttcagatcttgggaactgaaaccatttgaaatttattactaaggtcgtgatgtgaatatttgctcagtcagcccaccttgtcctgcctttttgcagataggctttcatttggacagctataactgctgtgttttttatattatttttactctttaccataaatcaattacaagaaaagagtttcagtcctagtatttagccccaaaatgaacctttaaacatttttttggtaatttttatattttctgtctttttaaaaatattaaattctggaaaaaacaaa

SEQ ID NO: 154030 - DNA, 1495 bp, Homo sapiens
gacagcgtggtggaattccaagccatggcgggaagcgagccgcgcagcactagaacgtcgccgccgccgcccgttcagcgacgtggggccgcctggaggcggccatcctcagcggctggaagaccttctggcaggcactgagcacggagagggtggcgcgtacgacctcactggaggaggtggatgaggcggccaacaccctgacgcggctgccgattgatgtacagctatatattttgtcctttctttcacctcatgatctgtgtcagttgggaaagtaccaaatcattattggaatgaaactgtaagagattcaaattctgtgggagatactttttgtcgagggatcttccttcttgggcttctgtagactggaagtctcttccagatctagaaatctcaaaaaagcctatatctgatgtcactgatggagcattatttgactacttggcacactatagaatgtgctgcccatacacaagaagagcttcagaatccagccggcctatgtatggagctgacacttcttttttacactccctgatcattcagaatgaaccacgatatgctttgtttggaccaggtttggaagaattgaatacctctttggtgttgagcttgatgtcttcagaggaactttgcccaacagctggtttgcctcagaggcagattgatggtattggatcaggagtcaattttcagttgaacaaccaacataaattcaacattctaatcttatattcaactaccagaaaggaaagagatagagcaagggaagagcatacaagtgcagttaacaagatgttcagtcgacacaatgaaggtgatgatcaacaaggaagccggtacagtgtgattccacagattcaaaaagtgtgtgaagttgtagatgggttcatctatgttgcaaatgctgaagctcataaaagacatgaatggcaagatgaattttctcatattatggcaatgacagatccagcctttgggtcttcgggaagaccattgttggttttatcttgtatttctcaaggggatgtaaaaagaatgccctgtttttatttggctcatgagctgcatctgaatcttctaaatcacccatggctggtccagggatacagaggctgaaactctgactggttttttgaatggcattgagtggattcttgaagaagtggaatctaagcgtgcaagatgattctcttttcagatcttgggaactgaaaccatttgaaatttattactaaggtaaagatgtgaaaatttgctaagtcagcccaccttgtcctgcctttttgcagatagatattcatatggacagctataactactagtgttttttatattatttataatctttaccataaatcaattacaagaaaagagtttcagtcctagtatttagccccaaaatgaacctttaaacatttttttggtaatttttatattttctgtctttttaaaaatattaaattctggaaaaaacaaaaaaaaaaaa

SEQ ID NO: 154031 - DNA, 506 bp, Homo sapiens
  misc_feature (1)...(506): n = a,t,c or g
cgcatactcatggccatcaacggcaaggtgttcgatgtgaccaaaggccgcaaattctacgggcccgtcaagtatcatcacgtgggcaaactgctganggngggggaggagcccacntgtgtactcagatgaggaagaaccaaaagatgagagtgcccggaaaaatgattaaagcattcagtggaagtatatctatttttgtattttgcaaaatcatttgtaacagtccactctgtctttaaaacatagtgattacaatatttagaaagttttgagcacttgctataaagttttttaattaacatcactagtgacactaataanattaacttcttagaatgcatgatgtgtttgtgtgtcacaaatccagaaagtgaactgcagtgctgtaatacacatgttaatactgtttttccttccatctgtagttagtaccaggatgaatttaaatggtgttttttccngagagaccaggaagacctggggtaattncccaaaccaggtng

SEQ ID NO: 154032 - DNA, 818 bp, Homo sapiens
  misc_feature (1)...(818): n = a,t,c or g
tgctctcgctgcaggaattcggcacgagctttgctggaagagatgcatccaggggccttgccacattttgcctggataaggaagcactgaaggatgagtacgatgacctttctgacctcactgctgcccagcaggagactctgagtgactgggagtctcagttcactttcaagtgctgaaggagggggaggagcccacttgtgtactcagatgaggaagaaccaaaagatgagagtgcccggaaaaatgattaaagcattcagtggaagtatatctatttttgtattttgcaaaatcatttgtaacagtccactctgtctttaaaacatagtgattacaatatttagaaagttttgagcacttgctataagttttttaattaacatcactagtgacactaataaaattaacttcttagaatgcatgatgtgtttgtgtgtcacaaatccagaaagtgaactgcagtgctgtaatacacatgttaatactgtttttcttctatctgtagttagtacaggatgaatttaaatgtgtttttcctgagagacaaggaagacttgggtatttcccaaaacaggtaaaaatcttaaatgtgcaccaagagcaaaggatcaacttttagtcatgatgttctgtaaagacaacaaatccctttttttttctcaattgacttaactgcatgatttctgttttatctacctctaaaggcaaatctggcaggtgttcccaaaggactttggggnatggggattaggccgctgtcccggtaaccaaaatggaaatcttccaaaacaggaggctcaggctggccaaaaagg

SEQ ID NO: 154033 - DNA, 2118 bp, Homo sapiens
accccgcgcgccactcgctcgctcagagggaggagaaagtggcgagttccggatccctgcctagcgcggcccaacctttactctcagagatcatggctgccgaggatgtggtggcgactggcgccgacccaagcgatactggagagcggcgggctgctgcatgagattttcacgtcgccgctcaacctgctgctgcttggcctcatgcatcttcctgctctacaagatcgtgcgcggggaccagccggcggccaagcggcgacagcgacgacgacgagccgccccctctgccccgcctcaagcggcgcgacttcaccccccgccgaagctgcggcgcttcgacggcgtccaggaccccgcgccatactcatgggccatcaacggcaaggtgttcgatgtgacccaaaggcccgcaaatttcttacggggcccgaggggccgtatggggtctttgctggaagaaaatgcatccaaggggccctgcccacatttttgctggataaggaagcccctgaaggatgagtaacgatgaccctttctgacctcacttgctgcccagcaggaagactctgagtgactgggagtctcagttcactttcaagtatcatcacgtgggcaaactgctgaaggagggggaggagcccactgtgtactcagatgaggaagaaccaaaagatgagagtgcccggaaaaatgattaaagcatttcagtggaagtatatctatttttgtatttttgcaaaatcatttgtaacagtccactctgtctttaaaacatagtgattacaatatttagaaagttttgagcacttgctataagttttttaattaacatcactagtgacactaattaaaattaacttcttagaatgaaaaagaaaaaaaaaagggcggccgctctagaggatccctcgagggkcccaagckkacgcgtgcatgcgacgtcacatgatgtgtttgtgtgtcacaaatccagaaagtgaactgcagtgctgtaatacacatgttaatactgtttttcttctatctgtagttagtacaggatgaatttaaatgtgtttttcctgagagacaaggaagacttgggtatttcccaaaacaggtaaaaatcttaaatgtgcaccaagagcaaaggatcaacttttagtcatgatgttctgtaaagacaacaaatccctttttttttctcaattgacttaacctgcatgatttctgttttatctacctctaaagcaaatctgcagtgttccaaagactttggtatggattaagcgctgtccagtaacaaaatgaaatctcaaaacagagctcagctgcaaaaaagcatattttctggtggtttctggactgcactgttgtccttgccctcacatagacactcaggacacccttcacaaacacagtagtctatagttagggttaaaatagggatctggaaccttcaaaaggaaaggctttgggaaaaaaagaggtgggtgggcttaaaaacctaaatatatgatgaagattgtaggactgtctccccaggcccccatgtttcatggtggggccaatggttatttgggttattttactccaattggttacccctcaatttgaaatgagggagggaccatacagcaatgggaaacaggtgtttggctctccctaagaagcccttccatgcacaccccccctgaaccaacgaggaaaccagtacagtcgcctagtccaagtggtttttttaaaggtaaagttatattccataaggtaaccagttattctggttgttaataaaacttataccccactccaaaaagtagtagtcaagtgtcctaggtctttgattattgctcttttgggtaaacactaagtcttaagtagactatacgagttgtatgaatttgtaaaagtatatgaacacctagtgagatttcaaacttgtaattgtggttaaatagtcattgtattttcttgtgaactgtgttttatgattttacctcaaatcagaaaacaaaatgatgtgctttggtcgagttaataaaaatggttttacccacaaaaaaaacaaaaaaggggccgcgtttatagagtgcccttgggggggcccaaatttacgcgggcttgcaaggttttttt

SEQ ID NO: 154034 - DNA, 733 bp, Homo sapiens
ccaagcggctgccgaagatggcggaggtgcaggtcctggtgctttgatggtcgagcccattcttccctgggcccgcctggccggccatcgtggctaaaccaggtactgctgggccggaaaggtggtggtcgtaccgctgtgaaggcatcaaacatttctggcaattttctacaggaaacaagttgaagtaccttggctttcctccgccaagcggaatgaacaccaacccttcccgaaggcccctaccacttcgggggcccccagccgcattcttctggccggaaccgtgcgaggtatgcatgccccacaaaaccaaagcggaggccaaggccgcctctggaccgtcttcaaggtgtttgacggcatccccaccgccctacggacaagaaaaaagcgggatggtggttcctggctgccctcaaggtcgtgcgttttgaagcctacaagaaagttttgcctaatctgggggcgcctgggctcccgaggttgggctggaagtaccaggcagtgacagccaccctggaagaagaagaggaaaagagaaaagccaagattccactaccggaagaaagaaaacagcatcatgaggctaccggaaacaggcccgagaagaaacgtggagaaagaaaattgacaaatacacagaggtcctcaagacccacggactcctggtctgagcccaataaagactgttaattcctcaaaaaaaaaaaaaaaaaaaagggcggccgct

SEQ ID NO: 154035 - DNA, 450 bp, Homo sapiens
  misc_feature (1)...(450): n = a,t,c or g
tttcgtgaagagnnnnnnnnnnnnnnnnnnnnnnnnnnnnnnnttgcgggagccgaggaggaggttccggacgctgcttaggaaccggggactcaggaatgcccgcgccctgagcgctcagctccagaggcgtcatggctgagtacgggaccctcctacaagacctgaccaacaacatcacccttgaagatctagaacagctcaagtcggcctgcaaggaagacatccccagcgaaaagagtgaggagatcactactggcagtgcctggtttagcttcctggagagccacaacaagctggacaaagacaacctcttccactcagttgttcctactcagactgttgcactctaaacctagggaggttgaagaatgagacccttaggttttaacacgaatcctgacaccaccatctatagggtcccaacttggttattgtaggcaaccttcn

SEQ ID NO: 154036 - DNA, 407 bp, Homo sapiens; identical to SEQ ID NO: 134890
  misc_feature (1)...(407): n = a,t,c or g

SEQ ID NO: 154037 - DNA, 447 bp, Homo sapiens
gcaatacaatcaatcacctttattccgggttagaacaaggccgtgcacactgcagacagaagagcacaagataggggcaatctcacagcaatataaggagtggccagaggggcagggcacgctaggctgggctaggagttaagagtactgtctaaccagtctggcttcttccttcttccagcagccagccctcccctcccattaaagttttactcccacatcctaaaagctcctaacttgaactttgtctaaatagtctctgagactgcatgtgaatttaatgttttttgaaaaagccttcttttttgtttggactatgtagcaatttgattctgccactcccttcactgtggcattcccctcccacccccgctctggcctagacaataagttaatgctagacaccacaaaaaagggcagacatggcagtgcagttttaatatacat

SEQ ID NO: 154038 - DNA, 455 bp, Homo sapiens
  misc_feature (1)...(455): n = a,t,c or g
ntctgatatcctgcgaacctcagagaatcttcgaancgacccacgcgtccgcccacgcgtccggacttacttaggaaacccttctttactagatatcctggccccctgggcttgtgaacacctcctagccacgtcactacagtacagtgagtgaccccagcctcctgcctaccccaagatgcccctccccaccctgaccgtgctaactgggggtacatatatattctacatatatgtatattaaaactgcactgccatgtctgcccttttttgtggggtctagcattaacttattgtctaggccaaagcgggggtgggaggggaatgccacagtgaagggagtggcagaatcaaattgctacatagtccaaacaaannnnnnnnnnnnnnnnnnnnnnnnnnnnnnnnnannntattaaaaattccccttaggcggcgcctttttttttgtgttg

SEQ ID NO: 154039 - DNA, 2475 bp, Homo sapiens
tttcgtggcggcggcagaagcggcggcggcggcggcgggagccgaggaggaggttccggacgctgccttaggaaccggggactcaggagtgcccgcgccctgagcgctcagctccagaggcgtcatggctgagtacgggaccctcctgcaagacctgaccaacaacatcacccttgaagatctagaacagctcaagtcggccttcaaagaaggacatccccagcgaaaagagtgaggagatcactactggcagtgcctggtttagcttcctggagagccacaacaagctggacaaagacaacctctcctacattgagcacatctttgagatctcccgccgtcctgacctactcactatggtggttgactacagaacccgtgtgctgaagatctctgaggaggatgagctggacaccaagctaacccgtatccccagtgccaagaagtacaaagacattattcggctgccctctgaggaagagatcatcaaattgggctcccccaccgaagaaggcctgagcaaggtgggaagattatgaagaaggttggaccttcatcagaggcagtggcttcccccatcctccaggagaagggggcaaaggcaacccaccatctacccacttactaacctgggtcctaacccccttactgtgcgcgtgtgtgtgcgtgtgcgcacgctctggctgtttgtctatatgtctagctcatctagttcctcttcttaaggggatgggggtcaggggctaggggagggggctgagtttccccactttaggaggaggtgggggctatttctatgcaaatagaaatcagcacattcctcctacttccctttcctccactccccccatatctttaaaaggggggaagcagaaagggacctgcattttcctacattgaggagctgacataggggtaaggtatgggagaggtaggtggatccagggaaaagcagtggggacggaaggcaaagagaccactcaacccccacctggaaggggcaaagaaaagccagagttccatgtttgtactcctgtgctggactgtttcctgagtaccagcaggtccctttttgtctctcatgggcctagcataggtatgagccagggatcctttcctggtccctaagatcaaaccccatggagcagccagcgttagatgcccccacccacctgtactctggagagactgtgctgggaaccatgtaccactgagcctgagatggggatgagtgcagagagagggagagccccctcttccactcagttgttcctactcagactgttgcactctaaaccttagggaggttgaaagaattgagacccttaggttttaacaacgaatcctgacaacaccatctattagggtcccaaattggttattgtaggcaaccttccctcttttcttggtgaagaacatcccaagccatgaaagaagttaactacagtgttttcctttgcaccgatccccaccccagttcaatcccggaagggacttacttaggaaacccttctttactagatatcctgggccccctgggcttgtgaacacctcctagccacatcactacagtacagtgagtgaccccagcctcctgcctaccccaagatgcccctccccaccctgaccgtgctaactgtgtgtacatattatattcttacatatatgtattatttaaaactgcactgccatgtctgcccttttttgtggtgtctagcattaacttattgtctagggccagagcgggggtggaaggggaaatgccacaagtaaagggagtgggcagaatcaaattgctaccatagtccaaagcaaaaaagaagggctttttcaaaaaacattaaattcacatgcagtctcagagactatttagacaaagttccaagttaggagcttttaggatgtgggagtaaacctttaatgggaggggagggctggctgctggaagagggaagaagcccagactggttagaccagtactcttaaactcctagccccagcctaagcgtgccctgccccttctggccactggttgcagacaccctgcccttaacaccacacaccctcctaggactccccacagttttgcccttaaaaggacccttcccccaagtctcccctttcccctgtcctggcttctccccttaagaagagagagatacttacttgtagaattgggtggggggaaatgagcatgaactgtccttccatttgggatatgttacattagagttagaagagagaataaggagccttttcttaaggaaagaaatgggagaagagagacagggttctttttcagcagagtctagtagtttctctgtaaggcaaaataatcctaaaaaagactaacctgcccacccactccttatattgctgtgagattgcccctatcttgtgctcttctgtctgcagtgtgcacggccttgttctaacccgggaataaacggtgattgattgtattgccgcggatcc

SEQ ID NO: 154040 - DNA, 857 bp, Homo sapiens
tttttagacgaggtttcaccgtgttgccaaggcttggaccgagggatccaccggccctcggctcccaaaagtgcggggatgacaggcgcgactaccgcgccaggaccccccctttccccttcccccgcttgtcttcccgacagacagtttcacggcagagcgtttggctggcgtgcttaaactcattctaaatagaaatttgggacgtcagcttctggcctcacggactctgagccgaggagtcccctggttctgtctatcacaggaccttacacgttaaggaggaggaaaaatcgtaacgttcaaagtcagtcattttgtgatacagaaattacacggattcacccaaaaacacaagaaagcaagtctttttagaaatgcctttagccctggtgtccgtgccaagtgattcttttcggtttggaccttgactgagaggattcccagtcggtctctcgtctctggacggaagttccagatgatccgatgggttggggacttagggctgcgtcccccccaggagccctggtcgattagttgtggggaatcgccttgcagggcgcggtgacccactgtgctgtgggagcctccatccttccccccaccccctccccaggggatcccaattcattccgggctgacacgctcactggcaggcgtcgggcatcacctagcggtctctgttactctgaaaacggaggcctcacagaggaagggagcaccaggccgcctgcgcacagcctggggcaactgtgtcttctccaccgcccccgcccccacctccaagttcctccctcccttgttgcctaggaaatcgccactttgacgaccgggtctgattgacctttgatcaggca

SEQ ID NO: 154041 - DNA, 449 bp, Homo sapiens
actagttctagatcgcgatctagaacctagcccacgcgtccggggtcttttgatttttgttagcctcccaattttcagggctgctttcttagttgtttttaaaatactactttcagagcatcaggctctcatttcccacattgctttgagtaccagtgctatttctcccttgttggcttttattctaatcatagtcattagagatgacttcatgatgagtctggagatgataaaatggaaatctttcccttccatttaaagtattaggaattctttattttaacttttaaaaataacatctttatttacaggtacaacagaatatctcgggaatggactcagaagtatgccatgtgatgctaccttaaagtcagaataacctgcattatagctggaataaactttaaattactgttaaaaaaaaaaaaaaaaaaaaaaaaaaaaaaaaa

SEQ ID NO: 154042 - DNA, 1872 bp, Homo sapiens
atgcaaaggggaagttactaccaaaccgacgagaatggcccagagctgggggctgccaggcggttcctgggcccctctcagcaccagaagaaggcgggcgcaggctcgccgcgggtcggccgcacgccatacctggatcaggccctgctggaacaaggcgctgtgcacgcagccagggaccgccccgggcagctccagcgagccgttcccattgcagatgctccagttgccacgcaagctgtaactgagctccgcggcggtggtgcctgcacgcacagcgcgagcagcaggagcaggtggaggcgcatcttgagatcccgcgccaccgagatgtggagagatcgaaaggcagcgctgcaagggaccggcggtgaagccactcaccccctcggaagtagccgaggctttagaaagttaactataaaacagtctcaggcaggtccttcaggaggtattccagaagaaggcattgttatcacaggagatgacagctccaggtgtgttattgcacttgaagaccttacagtggaacaagatgtggagtctccaacgttcagttgcttctctgctcgctgctcagccacttgtgttgctctgccagctgaagtcttctatgggcacaggataggagcatggcaggccaaaaaggtccggccaaaactcttgattatcccggcggcggggcaggattgtctcgtctcacaccagctctgccagacacaggcgccttttgcaaaaacggagcagatcagcactcgcacaggccccgaagagcccctgatgaatccagccgtccacacccacgcgtacagaggggccggggcctccctcaagctgcggcctcggcctcctccccgcgcggcagctggtgcctccccggccctacgggcgtcacgcgcacgacacagccacaagatgtccgctctgacggaactactgccagctgccacgtccgcccctccccctcctcctgcctcttcaccgccgcggatcagtccgccaacgccgccgtcccgagcacaagaccgatgtgaggccgaagccagacggcttgcttcccacatattcctagactattcatctgtgaagagtccctcagtattctggatagggaaaaacagaagtgagccttttgggcggcaacacgcaaggctagggaagctgggcactcacttgactcttactttccttcctgggagaactcatgggccaaaagggcctctcttggcactgaactctgctgccttggaggagaaggatcatctacagacgttaaaggcccaagaggagggccaccttcacacgagattccgaggagggcctcgctacccgccagttcccgcgcctcggcagtccgccgcgagcgccgaggccgccagtgcccgccggccgcttccgctcccggcgcaggcgcggcagcttggccagagcggagggggctcgggagaggagtggacgccgctggccaggatggtgctggagagcgtggcccgtatcgtgaaggtgcagctccctgcatatctgaagcggctcccagtccctgaaagcattaccgggttcgctaggctcacagaatggcttcggttattgcctttccttggtgtactcgcacttcttggctaccttgcagttcgtccattcctcccgaagaagaaacaacagaaggatagcttgattaatcttaaaatacaaaaggaaaatccgaaagtagtgaatgaaataaacattgaagatttgtgtcttactaaagcagcttattgtaggtgttggcgttctaaaacgtttcctgcctgcgatggttcacataataaacacaatgaattgacaggagataatgtgggtccactaatactgaagaagaaagaagtataa

SEQ ID NO: 154043 - DNA, 561 bp, Homo sapiens
ggcggtggcgtcaggggtgacacagaatagctcgctgcgaggatagcaatacacatcaaggctcccttcctttatttccttcctcttcctttctagaggccgggaagttaaacttgtagccaccacctccgctcttcccggtcaccctcgcccccacttcgggccgaaagcacggtacagaggctgttggtggctttgccacgccaccccacccaccccggatcgcggctgtcttaagggacctggattcatcaggggctcttcggggcctgtgcgagtgctgatctgctccgtttttgcaaaaggcgcctgtgtctggcagagctggtgtgagacgagacaatcctgccccgccgccgggataatcaagagttttggccggacctttgagcatacaccgagagaagtgaggaagccagacgacaagcacacactatggcgctgaaacggattaataaggaacttagtgatttggcccgtgaccctccagcacaatgttctgcaggtccagttggggatgatatgtttcattggcaagccacaattatgggacctaatgat

SEQ ID NO: 154044 - DNA, 1987 bp, Homo sapiens
  misc_feature (1)...(1987): n = a,t,c or g
cgatgcttctctgagcctaagggtttccgccactcgttcaccctccccccagctcatgatcctcctccctcgcccgcccttctggtccaatctccgatctgtttagtaagaaggtgctgttccgagaaggagaaggaaaagggcttgacacgtattcactcggccccggacgtgggaagcaagccgtctggcttcggcctcacatcggtcctgtgctcgggacggcggcgttggcggactgattcgcggcggtgaagaaggcgcctgtgtctggcagagctggtgtgagatcgatgacaatcctgccccgccgccgggataatcaagagttttggccggacctttgagcgtacaccgagagagtgaggagccagacgacaagcacacactatggcgctgaaacaggattaataaggaacttagtgatttggcccgtgaccctccagcacaatgttctgcaaggtccagttgggggatgatatgtttcatttggaaagccacaattaatggggacctaatggacaagcccatattcaagggcggtgtattctttttgacaattcatttttcctacagactaccccttcaaaacaccttaaggttgcattttacaacaagaatttatcatccaaatattaacagtaatgggcagcatttgtctcgatattctaagatcacagtggtcgcctgctttaacaatttctaaagttcttttatccattttgttcactgctattgtgatccaaacccaggatggaccccctagtgccagaggattgcacgggttctataaaacagacagagataagtacaacagaatatctcgggaatggactcagaagtatgccatgtgatgctaccttaaagtcagaataacctgcattataggctggggataaacttttaaattactgttccttttttgattttcttaatccggctgctcccctatcaggacctcatcttttttaattttattttttgtttacctccctccattcattcacatggctcatctgagaagacttaagttcttccagctttggacaataactgcttttagaaacctgtaaagtagttacaagagaaccagttgcccaagactccagaatttttaaaaaaaaaaatggagccatgtggtattatgtggccaatggtcttcacatcataacttgggttatgaggactaaaacccattcctcactggctcttaacatggctggaaggaaattcatctgaggggggagggagatggatgctccagttgtcacatccaaaggataccagcattattcctagcagcatcccattcttgtttaagccttcccactgttagagatttgaggttacatggatatgctttatgcctcataactggatgtggctggagaattgggtattgaaatttatagcatcagcagaacagaaaatgtgaatgtattttatgcatgtcaataaaggaatgacctgttcttgttctacagagaatgggaaattggaagtcaaacaccctttgtattccaaaatagggtctcaaacatttttgtaattttcatttaaattggttaaggaggccttggaagctattagttaatctatcttcccaatacactgtttaatataggcactggaataaatgatgccaagttgtcaatgggatgagtgatccactaataggctctgcttaggtaattggatttatttttctttcaattaaagttgccattaaaccaatgagttagctgccctggattaatccagtatgggggaaaccatctttttgttaaatgccaagcctggttttttgtatatacccgttggggatttgcctcattgtttgacatccaatggatgatggtaagttcgaaagagtgaatattttgccatggtccagttaaagtgcacagtctgttacagggtgacacattgcctgaccngatttatgcagnattaataagcnatttgggatagtgtagccttaatgtgc

SEQ ID NO: 154045 - DNA, 2424 bp, Homo sapiens
  misc_feature (1)...(2424): n = a,t,c or g
gacccacgcgttcggatctgaaggctacttctaggagcaagaagtttgtgttttgtgcttttccaaaggatacttccttgggcctttttctttattgactagaccaccagaggaggatgggtgggattgtaggcaaacccacctgtggcatcactgaaaataaatttgatcatacctaagaggttaggaaatggtgccattcccaccttatagtgctacataggtgctttgggcgtatgtaacattagtgtcctttcttgaagccacaagctagttttcttagttttaaaatcctggtggatgaatggcatttgtatattaaaacacttttttaaaggacagttgaaaagggcaagaggaaaccagggcagttctagaggagtgctggtgactggatagcagttttaagtggcgttcacctagtcaacacgaccgcgtgtgttgcccctgccctgggctccccgccatgacatcttcaccttgcagcttgtgctgagactgacccaagtgcagctagcactgggacacagatccttgtcttcagcaccttccaaggagccaacttttattccctttcctctctcccctccccacctcgcttcttcccaatttagtaacttagatgcttccagcacatacgtaggtagctaccccagccggtttggattacaggcctgtgctgggaacatcatctcagtttgtccaccttcctggcaggctgtagacctgacattttgagacaagcctagagtcaggagcagggactttgactcttagggaagaggcacacatgaggggcaaggctgctgggcagacgtctccagttgtccttatgttgtctgtgttgtatttttttttttttattgaccatgggtgattatttttttaaaccatcggtaatatactgaagtgagctatagcacatatcatgtgctntaagtttgtgtatttttctccatctccccttggcttcctagagtttggacatattccaggtctaaatgcttttactcaagactacagaaaggtttgaagtaagtgtgtgcatggcatgcacgtatgtaaagtaatctggggaagaagcaaagatctgtttcattcttagcctcaggcctcatgagggtctccacagggccggagctcaggttacaccactccttcgtccttacaggagatgtagggagaagaatctgcaggctgcttgtaggactgttcaccaagggggataccagcagcaagagagttgcacccgtttagccctggacccctgtttcttactgtgtgacttggctagaagttgggagttcccccaaaataaaccgtgtcccccattttaccagaacccaaacctcaacacagcgaagctgtactgtctttgtgtggcaaagatgttcccttgtaggcccctttcaggtaaccgtcttcacaatggtattttcatcacagtttaaggagcatcagccgcttctcaagtgggtagggaaagcagaaaaacgttacgcaagaggacatggatccaaaatgatgatgaagcatctcccatggggaggtgatggtggggagatgatgggctaaacaggcaaccttttcaaaaacacagctatcatagaaaagaaacttgcctcatgtaaactggattgagaaattctcagtgattctgcaatggatttttttttaatgcagaagtaatgtatactctagtattctggcgtttttatatttatgtaataatttcttaaaaccattcagacagataactatttaatttttttttaagaaaggtggaaaggtctctcgctcccaaggacagtggctggaagagttggggcacagccagttctgaatgttggtggagggtgtagtggctttttggctcagcatccagaaacaccaaaccaggctggcttaaacaagtggccggcgtgtaaaaaacagacagctctgagtcaaatctggggcccttcccacaaggggccccctgaacccaagccccccactccccttgcttaggggtgaaaagcattaccagagagatgggagcccatcctatccccaagaagcccttcacctcacccttcacctgcctgcctgttgccaactcgggctgttctgggactctgatgtgtgtggaagggatgggggaatagaacattgactgtgtttgattaccttcactatttcgggccagcctggaccttttnaattaactttgttaaaaagcatgtatgtatttatagtgttttagatttttctaacttttatatcttaaaagcaagagcaccctgtttaagcattggtacccctattgttaaagatattgtgtcctctcattccctctctatcctcttgtaagtgcccttctaataaacttttcatggaaaagctcctgtgccaggagctcagtctgaaaaaaaaaaaaaaaaa

SEQ ID NO: 154046 - DNA, 415 bp, Homo sapiens
agaacgcaggccccctctcacctgggcgccgccgtctggcagctgcgggcagcggggagaactggggaacacgtcgaagtcactctcttcctcagcctcaccctcggcccgagggaggctccagggtcccggaggcggccacggttgttccatgtccggctgctccgggtcctacaaccgcccttggccctacaactgccactgccaacagacttggcgtgaatggaacctgctgcgccgagccagaagcccagccgggggtccgggccgttacccagaatccctctactggccgcgacgccgctgcacacccggcgacagcctgggcctcgccaccggcggacggcggaagaaatagtcggcgcgctcttcggcactgcaaacctaaccgctaatggcgctgtgggtggagaaa

SEQ ID NO: 154047 - DNA, 861 bp, Homo sapiens
atgcagaatctgaagctagacagccttttactaaaagccacagacctaataagggagcagccacatttgaatccagcggttccccatctacagcaaaaagaaaggctacctgggttgtcagacaaggcggcagcgccattagcggttaggtttgcagtgccgaagagctgcaagaaaacggggcttgaaacaggaatacaattgcagatccacccactacacgcaaagggcccgggacgcgcctccacagccccgccccaaccggaagtgacgcaccgcgccgactatttcttccgccgtccgccggtggcgaggcccaggctgtcgccggcaggttccattcacgccaagtctgttggcagtggcagttgtagggccaagggcggttgtaggacccggagcagccggacatggaacaaccgtggccgcctccgggaccctggagcctccctcgggccgaggatgtatagccatggaattgaattggcttgccaaaagcagaaagagtttgtgaagagctctgtggcgtgcaaatggaatcttgctgaagctcaacagaaacttggtagcttagcactgcataattctgagtccttggatcaggagcatgccaaagcacaaacagcagtatcagaactgaggcaacgggaagaagagtggcgacagaaagaagaagctctagtacaaagagagaagatgtgtctgtggagcacggatgccattagcaaggatgtttttaataagagttttattaatcaagataaaagaaaagacacagaagatgaagataaatcagaatcatttatgcaaaaatatgagcaaaaaatcagacattttggttttggatatgatgctttataa

SEQ ID NO: 154048 - DNA, 2773 bp, Homo sapiens
cgggtgtgcagcggcgtcgcggccagtagagggattctgggtaacggcccggacccccggctgggcttctggctcggcgcagcaggttccattcacgccaagtctgttggcagtggcagttgtagggccaagggcggttgtaggacccggagcagccggacatggaacaaccgtggccgcctccgggaccctggagcctccctcgggccgagggtgaggctgaggaagagagtgacttcgacgtgttccccagttctccccgctgcccgcagctgccaggcggcggcgcccagatgtatagccatggaattgaattggcttgccaaaagcagaaagagtttgtgaagagctctgtggcgtgcaaatggaatcttgctgaagctcaacagaaacttggtagcttagcactgcataattctgagtccttggatcaggagcatgccaaagcacaaaccagcagtatcagaactgagggcaacgggaagaagaattggcgacagaaagaagaagctcttagtacaaagagagaagatgtgtctgtggagcacggatgccattagcaaggatgtttttaataagagttttattaatcaagataaaagaaaagacacagaagatgaagataaatcagaatcatttatgcaaaaatatgagcaaaaaatcagacattttggtatgttgagtcgatgggatgatagccagagatttttgtctgaccatccataccttgtatgtgaagaaactgctaaatatcttattttatggtgttttcacctggaagctgagaagaaaggggctttaatggaacaaatagcacatcaagctgttgtaatgcagtttattatggaaatggccaaaaactgtaatgtggatccaagagggtgttttcgtttattttttcagaaagcgaaagcagaggaagaaggttattttgaagcattcaaaaatgaacttgaagctttcaagtcaagagtaagactttattctcaatcacaaagttttcaacctatgacagttcagaatcatgttccccattctggtgttggatctataggtttattagaatccttaccacagaatccagattatcttcagtattctatcagtacagctctctgcagcttaaactcggtggtacataaagaagatgatgaacccaaaatgatgggacactgtataatttgggttaagactgctgaggccaagtgctattttgttacaggaaagggaggaacttgggctattttcttggacacttttatgggggtgctggcactttatttttgttcggtttttgatgggagggaaagagtactgaaatgttttgtaaattttttttaatgtgctgctaggttttttgttttgttttgttctgaagagaagagtggtaccatatgttgcaggaagtcaaactggactttttggtggctactaaatttgcttttaatcttattgttctcaattttggaatcaagtatgaaaatctgcacaaatgcaatgtttacaagaactggttgattctgggaggcatctgctacagtctctttttatatggatatgtacatgtcctattctacaaaaatgattaaagataaaaacatacttgtatccccctgcttctttaaatgtcccacttggtgtttcatcacattaaaagcaataaatcagtagttggtaatgtactttactaaataagttggggggtacaatttttaaaagtcttaactcttaaatacttgactttcggcaccatcagttaaatccttgactataatacaaatttgatatatacattacatttaccctcaaattattctcaaaactatattccttagaatttgattttaccctgctgactttaagagttataataatatcaaatgtgatgagctaatatagattttctttttaaataagaataacttcaagctcactctttcttaacatagtctgggatctctcagggagtaagttttaaaaggaatactaatggcttgtaagaacaaacaggaataataatccggattttttaaatttgttagttattttactcatggtgccttttaatttttgttattttgggtttattttttgatgtagccttttaaaaaagggagtcttaaaaatgatttttttttaagggcaagaggaaatcttgtaggtgctaactgccttgagctgccaattacctaatttttgagaatttggtgactcttattggtaatgatggcatttacaacatttggcatttcccctttttcagctcagttaccatagaatacttccaagctttactacttcctcatgtaagtcatttcagttatgccaggatatttgatgattttgtttatggtagaattaggtaacaaagcccaattatgcctaccccttattattgaaggattaatccttatgaccttaacataagcctttggttatatttgggtgtagtctttggcctaagtaccccattaaggctagtagcaaacacttggaaggtgggctaactgggactgggaatacgtgtctcaacttgagaaaccaaatagtgcgaagggactcagggtggccagacctgtgaccttggcctcatttgtatcttgttttcgctgaggtgatcagacacttagtaccctagaaatggactggaattattgaatcttcttctgtaacatcacaatcttcctggttttcagaataaacgtttttgtgcttttgatataaatatatactctataataaaatgtttgactaatttaaaaaaaaaaaaaaa

SEQ ID NO: 154049 - DNA, 485 bp, Homo sapiens
cgaaagcggccaagtaaagctccgtcctgtatcttccgcctcccgtgggctccggccggctaagccgcggcggacaactatgctgaaagccaagatcctcttcgtggggccttgcgagagtggaaaaactgttttgaccaactttctgacagaatcttctgacattactgaatacagcccaacccaaggagtgaggtttgagccctgctggccggccctgatgaaggatgctcatggagtggcgatcgtcttcgatgctgacattccaagccaccggaaggaactggagatgtgggattcctgcttttgccaacagccgtccttacaggacacacagtgtatgctaattgcacaccacaaaccaagctctggagatgataaaggaagcctgtctttgtcgccacccttgaacaagctgaagctggtgcactcaaacctggaagatgaccctgaggagatccggatggaattcataaagtatttaa

SEQ ID NO: 154050 - DNA, 1083 bp, Homo sapiens
atgcgctcgcacttctcagcccttgggtggtcgatgggactgagcgccctggagcagggggtggtgctcgtcggggaggctcgggctgcacaggagcccatggagtgggtgggaggctcaggcatagcgggctgcaggtcccgagccctgccccgcgggaaggcagctaaggctcggtttgagtcctgctggccggccctgatgaaggatgctcatggagtggtgatcgtcttcaatgctgacatcccaagccaccggaaggaaatggagatgtggtattcctgctttgtccaacagccgtccttacaggacacacagtgtatgctaattgcacaccacaaaccaggctctggagatgataaaggaagcctgtctttgtctggcggcggcggtaaccgcaggcaaggcaggagctgccctcggggctggactctcggggtggcaggggctgcagctgcagctgctcagggcaaggaagcccgtgggctccacgtgggctccacgtgggctcctgcaacgccgctggggaatctctcgcccgctgccccctattctggagaccttgattccaaccactgcccggaggaggtagtggaggcgagcccggtgttaatgagccccgaaggcccaagcaaagacctttatttgcactcattttcacagagtggaaaaactgttttggccaactttctgacagaatcttctgacatcactgaatacagcccaacccaaggagtgaggatcctagaatttgagaacccgcatgttaccagcaacaacaaaggcacgggctgtgaattcgagctatgggactgtggtggcgatgctaagtatgtttcctttaaagaaagtcacttcatcaaatggtttaaaaatcagctgcccaagccaggggcggtggctcacacctgtaattccagcactttgggaggccaaggtggcgccatggccacccccgggacgctcagggctgcggctccggagcccgcatttgaatttccccagaaaaccataagcatgcaagtaaaagttgccaaacgcctcgtttgcataactcgcttgaatttagcttttctcatttag

SEQ ID NO: 154051 - DNA, 1066 bp, Homo sapiens; identical to SEQ ID NO: 113531

SEQ ID NO: 154052 - DNA, 420 bp, Homo sapiens
gtcctcatttccaaccatgtgacacctttcgaccacaacatagtcaatttgcttaccacctgtagcaccgtggcttcgtcctgttcatcgccaactaggggaagcgaatgaggagtttgcactccgtgtacaacagctggtggccaaggaattgggccagacagggacacggctcactccagctgacaaagcagagcacatgaagcgacaaagacaccccagattgcgcccccagtcagcccagtcttctttccctccctcccctggtccttctcctgatgtgcaactggcaactctggctcagagagtcaaggaagttttgccccatgtgccattgggtgtcatccagagagacctggccaagactggctgtgtagacttgactatcactaatctgcttgagggggccgtagctttcat

SEQ ID NO: 154053 - DNA, 421 bp, Homo sapiens
  misc_feature (1)...(421): n = a,t,c or g
ttgcgattcggacgagnnnctcgggatccacgtcttcctggtcagctgcgcgctgccagacagcgtccttcgcagattcgtagtgcggaccatgtgtgcggtgctagggctcgtggcccggcaggaggactccggactccgggatcacagtgtcagggtcctcatttccaaccatgtgacacctttcgaccacaacatagtcaatttgcttaccacctgtagcacccctctactcaagagattctgtgcttccacgaggcttccccccactcctctgctgctattccctgaggaagaggccaccaatggccgggaggggctcctgcgcttcagttcctggccattttctatccaagatgtggtacaacctcttaccctgcaagttcagagacccctggtctctgtgacggtgtcagatgcc

SEQ ID NO: 154054 - DNA, 503 bp, Homo sapiens
ttgcgcccccagtcagcccagtcttctttccctccctcccctggtccttctcctgatgtgcaactggcaactctggctcagagagtcaaggaagttttgccccatgtgccattgggtgtcatccagagagacctggccaagactggctgtgtagacttgactatcactaatctgcttgagggggccgtagctttcatgcctgaagacatcaccaagggaactcagtccctacccacagcctctgcctccaagtttcccggcaggagagcctgcaggagcgcaagcaagcactatatgaatacgcaagaaggagattcacagagagacgagcccaggaggcttactgagctcaaaggaacaggattgcacccagagccgcaggacggagacttggggcagcccttaaccaaattacaacaggcttgatgggttggttgttaaaagggaaaggttgaggctccccaaagtcacatttaaatcacaggtttcaattaaaggcaaaa

SEQ ID NO: 154055 - DNA, 525 bp, Homo sapiens
aactgtagacattagtccgtgcggtggaattctgaggagtttgcactccgtgtacaacaggtggtcgggtgcacagacagggtggaggcggggtccctgcttaggaggagagggaggaaagcttgagatcttgacacttccagtcttccaattctccctagctggtggccaaggaattgggccagacagggacacggctcactccagctgacaaagcagagcacatgaagcgacaaagacaccccagattgcgcccccagtcagcccagtcttctttccctccctcccctggtccttctcctgatgtgcaactggcaactctggctcagagagtcaaggaagttttgccccatgtgccattgggtgtcatccagagagacctgggtatgggaaagggtggccccacactgggagatgggcacagggaggaaaagtgggttgtgaaggaagaaagtaagtagggagtggactcccttctcttttctccccagccaagactggctgtgtagacttgactatcactaa

SEQ ID NO: 154056 - DNA, 699 bp, Homo sapiens
cataggcctagacactcggaatgctgctcggatcctaggattgtaaacctgttgcccgtccctcaaccaaggccaagacagatcagagtgggccatttctgtctttactaccccaccgctatctctctctctcactcacacttcggagctccagtcctgagtcgatgacatgttggatggaagggagggagaaggagaagtcagccagccagtgagtgaccacaacctttcgggcatccatgtcctcatacacagcctgaacggctcgtccacagtctgggtgaaggggcagtactcgtggtggaagcccttggagaagcaaggactctacctccctggtcaaggattcacagcacagggaaatttcctcctcactgggcaggaacactagcacatctcctggaagctccttccgacacaattcaagcactgcttggcaggcagcttccacccgatcaggtgggatggtgtcccagtagatgggggaaggtctctcaccaggctctctgggtatatgcacaataggaggattgccccagaaagctcggagcttaagttcaagggctgggtcagtaaccacaaccactctgaggtcccccggaagtttttccagcctggcatcttgcagtagcccctggagtgaatctgatgccaccgaccgctcctgagcctcatctagtaccagcacgccccaagctc

SEQ ID NO: 154057 - DNA, 3566 bp, Homo sapiens
tttcgtccgggcgctcctgaagcagcagttatggagctttcctcatggccggggccggagcggctctttgactcgcaccggcttccgggtgactgcttcctactgctcgtgctgctgctctacgcgccagtcgggttctgcctcctcgtcctgcgcctctttctcgggatccacgtcttcctggtcagctgcgcgctgccagacagcgtccttcgcagattcgtagtgcggaccatgtgtgcggtgctagggctcgtggcccggcaggaggactccggactccgggatcacagtgtcagggtcctcatttccaaccatgtgacacctttcgaccacaacatagtcaatttgcttaccacctgtagcaccgtgagtgagagcgaggccgatagcgccacggtgcggttccctggggcccagctgaaggcccccctgtccccactcgcgttccccatggaggatactgaggccttacccctaaccccgatcctctacccaacatgtcagtttttttttttcattttcctcaatatttttcttcttgctttctcttctcctggttcccagcctctactcaataagtccccccaagcttttgtgttgctggtctcggggcttcatggagatgaatgggcggggggaagttggttgaagtcactcaagagattctgtgcttccacgaggcttccccccactcctctgctgctattccctgagaaaaaggccaccaatggccgggaggggctcctgcgcttcagttcctggccattttctatccaagatgtggtacaacctcttaccctgcaagttcagagacccctggtctctgtggtgagtgtgtgttgaacagggaatctctggggcttgaaggggaaatttcccatccctggccctggcttaggcctcatctcatgccctcccctcagacggtgtcagatgcctcctgggtctcagaactgctgtggtcacttttcgtccctttcacggtgtatcaactggtggccaaggaattgggccagacagggacacggctcactccagcctgacaaagcagagcacatgaagcgacaaagacaccccagattgcgcccccagtcagcccagtcttctttccctccctcccctggtccttctcctgatgtgcaaactgggcaactctggctcagagagtcaaggaagttttgccccatgtggcccattgggtgtcatccagagagacctgggtatgggaaagggtggccccacactgggagatgggcacagggaggaaaagtgggttgtgaaggaagaaaccaagactggctgtgtagacttgactatcactaatctgcttgagggggccgtagctttcatgcctgaagacatcaccaagggaactcagtccctacccacagcctctgcctccaagtttcccagctctggcccggtgacccctcagccaacagccctaacatttgccaagtcttcctgggcccggcaggagagcctgcaggagcgcaagcaagcactatatgaatacgcaagaaggactttcccacaggttactaggtctcacataatttctactgcccttgaggacccctgcctaagtaagatttctactacctgccaacggggtaatagtctcaggtcctgccagagagccaccatgacctctcagcctctcaggctagcagaagagtatggcccaagtcctggggagtctgaactggctgtgaacccctttgatgggcttcccttctcttcccgctactatgagctgctgaagcagcgccaagccttgcccatctgggctgctcgctttaccttcttggagcagttggagagtaaccccactggagtggtgctggtgtctggggagcctggttctggcaagagcacccagatccctcagtggtgtgcagagtttgcgctggccagagggttccagaaaggacaggttactgttactcagccctaccctcttgcagcccggagcctggctctgcgggttgctgatgagatggacctgaccctgggtcatgaggttggatacagcatcccccaggaggactgcacggggcccaacaccctgctcaggttctgctgggacaggctgcttctgcaggaggtggcctcgacccgaggcccgggaaagttggggcgtgctggtactagatgaggcttttgagcggtcggtggcatcagattcactccaggggctactgcaagatgccaggctggaaaaacttccgggggacctcagagtggttgtggttactgacccagcccttgaacctaagctccgagctttctggggcaatcctcctattgtgcatatacccagagagcctggtgagagaccttcccccatctactgggacaccatcccacctgatcgggtggaagctgcctgccaagcagtgcttgaattgtgtcggaaggagcttccaggagatgtgctagtgttcctgcccagtgaggaggaaatttccctgtgctgtgaatccttgtccagggaggtagagtccttgcttctccaagggcttccaccacgagtactgccccttcacccagactgtggacgagccgttcaggctgtgtatgaggacatggatgcccgaaaggttgtggtcactcactggctggctgacttctccttctccctcccttccatccaacatgtcatcgactcaggactggagctccgaagtgtctttttcccctcaggatcctgcctctgcctgtatcctaagtccttcttagaactagaagctccaccattgccacaacccagggtgtgtgaggagaatctgagctccctggtgttactactaaaaaggagacagattgcagagccaggggagtgtcacttcctggaccagcctgctccagaagcactgatgcaagccctggaagatttagactatctggcagccctggatgatgatggggacctgtcagatctgggtgtcatactatcagaattccctctggcccctgagctggccaaagccctgctggcctcatgcgagtttgactgtgtggacgagatgctcaccctggctgccatgctcacagctgcccctgggtttacccgtcctccactcagtgcagaagaagctgccctgcgtcgggccctggaacacacggatggtgaccacagttctctgatccaggtgtatgaagcctttatacaaagtggagcagatgaggcttggtgccaggctcgaggtctgaattgggcagcattgtgccaagcccataaacttcggggagaactcctagaactcatgcaacgaattgaacttcccttgtccctaccagcctttggctctgagcagaatcgcagagaccttcagaaagcactggtgtcaggatactttctcaaggtggccagagacacagacgggactggaaattaccttctcctaacccataagcatgtggcccagctctcctcatactgctgctaccgaagccgcagagctcctgccagacccccaccatgggtgctctaccacaatttcaccatatccaaagacaactgcctttccattgtttctgagattcaaccacagatgtga

SEQ ID NO: 154058 - DNA, 792 bp, Homo sapiens; identical to SEQ ID NO: 126056

SEQ ID NO: 154059 - DNA, 2602 bp, Homo sapiens
ttttttttttttttttttattccagaaatattttaatacaatcgtagtacagttatgaagtcacattcaatccactgaatatattcaagggattaataaaaatattatacatctttattcactatcttaatataattaaagtatttggttcttataggtaagattaattaccatattcattcattatatgcactgctagttcaaacaacatgggaaatggaatgtatgggattatggatagtgggggttcagtcctttttgatctgaagtctaagtttcaaaagtgaatgttttcttttttaaatgtcacaatatttggaatcctaggaaaggaatagggccaacctaatttaagggcaagggtattggaaaccttttatacaactttaatttgaaaaaagaaatgatcaaagatcatacatgccttaacatttagatacctatagattcatataaaggcagtaataaaaatatcagtgcaagttctacattgggttcctcagtaggagaaaataataggttcctttgagtgaaccattatcttcaaatcccaaaacactggcaagaagaaataattcttctgatgcaggacaacatgtagcataattatttttagtcaataaaggtgagtataaaatattgtgattatacataaaaattagtgtcttggccagtttgttaaactttttttagatttactttaatgtcagcttttaaaaaatgcttaaaaatccaactgatttaaaatttattgatagtagtagtgcaaagaggctccactctactttttggtacgggctgaagattagcatttcataaagaaataaactatatgtaaaatgtatgtgtgtttgaatgagtaaagaaggcacaaaatgagttaaattaagagaaaacattaccacttgttctgaactcttaactgtacagtattataatatacacttagatatgaatccagatttcttataatggaagtggacaggacattttttagcctctattatttgtgcctaaaagacactgtcataatagactgcaaaaaggcagtacatgttgagtctaattaacggccccctaccaagacagtttttgtttggtttggtttgttttaaaattacagtggctaagtgataactggtggaatggaattcggtctcaaaagcttaagtgaaaattactagtacatttgcatttgcaaaggtacttacatactttaaggaaatgttaatgatctgtggaaaaagcaaatggtggtgctttgatctgcattttaattaacttattaaatagacaacacattttaacatttaaaaaagacattcatataccatactcatgggtttaactacatatggaccattagtgttaggcaccaaaaatttcaagtctttcccccaccccgtcccagtgatatattatcaactcttctatttcttccctgtaggtatcaccatttacattaaacatttgtgcagttcataaaaattctgttctgggaaactgaattggcgattgtcctttctctcttggtattctttattgcatattttgtcagttttctcacagcaacctgattggtacaatttctattaccatttttaaagtatctgtatttctattctaaccatgagttttttttatatatatgtatatatccaaattaacaaaattgtgtctgaagttgagtaactaataaaaatgaatcttactctttttttctttttttttaagatggagttttgctcttgtcacccaggcgggagtgcagtggcgtgatctcggctcactgcaacctccgcctcctgggttcaagcgattctcctgcctcagccccccaagtagctgggattacagatgcccgctaccacgcctggctaatttttgtagtagagacggggtttcaccatgttggccaggctggtctcaaactcctgacctcaggtgatccgcccaccttggcctcccaaagtgttgggattacaggcaggagccaccgtgcccggccgaatcttattcttactggttactgtagaataatttcagtcctgtcccttatgattctgaatccaattatataaaggaaaataacttttcatggtgaatgtaaaatggtttacacacataagtaagacagtttacaagacaaactgggtctacacagacaaaggtctatattaaagttcaatctgggaccctagaattcttggtcatggggcctccttggtggaagagtctgccctactcaggaatgggcacatgggttaacaattttcacttatttactgagggagtggagtatagatgtagggaggtgaaattaccattcctgggaataaatgtaggattttaatggaatgatagaatttattgtacaatcacattggtgagtcttattcaggtattaggcttaactatttagataactaattcatacatcagaagtaaaggatttttttgtgggaaaaacattagtacatgtacataatttcttgtctttagtaagctgcaagtgagtgaaaactatgtactaattatttatcaaatcaggaaaaaaatcctcgtgccgaattcgtgcagcgcaggcaaaagttgtggccgc

SEQ ID NO: 154060 - DNA, 575 bp, Homo sapiens; identical to SEQ ID NO: 146742
  misc_feature (1)...(575): n = a,t,c or g

SEQ ID NO: 154061 - DNA, 3022 bp, Homo sapiens
gattatttggataagtcctttttaagaaaaaaaaaagaaaatgaaaaacaacacaaaaaaaatagaaaactcttttcttgagtgtggatgagaatgggcacgctcacacttctggccaggagtgaatgtgccttgtgtgtgtgtgtgtgtgtacatgtacgcgtgtgcattgaggagagagagactgaacagagagtactttgctgctaacgaatccatcttggactaaattctgacaaggcctcagtttccccagttgtgcagggagtaggtcagacagggttttcactgtctagatttagctggttagattttcctctaaaatcttaagcagatgctgaatccataaagccaaggagtgctgagggctggagtgggtgggccctccctcccacagccccagggagatacatctggactcctgggaatctggattaagaaagttgggatgaaagaggaggactgctcaggccagttgtgagccagggagaatgttccagtctggttttggtctggtggctcctagaaagggatgtggcccagaagtgggactcaaacagagagatgaagtaggggaggggagtcctccacgggcatctctctcctggcggctggatagctttaccctagggtggggccagccctgacaccctcatcccctcctcagcccagcagcctctagagcagcgtggtgctctcttgatggccaggaatccagaatctgcccttccccaaccttggtttctccttctgtaaagcagagtgatggctgagaagtcctctctagctgcagaagcctgagcttcccggtgtcagtcagctctgcaacgtgggagccttggaggcgggtggcctggctgtgcttcatatgcccaggagtggagaaggaggctgagaagctggtttcccagctctgatctccacaggcacctcctataaccctcctctcacccaccccgctacggtctgagagatctgaaataacctttcccagtgggcagggttgccagggttgaggggacagcacataccacccccacccaacctgttcgaggggccctgcatggcacgggatgagtccctgccctgtgcagctgcctggcagtggctgggacaaggatcttgcagccagcacagaggcctcttcaaaggcctctccctcttggcactccaggcaaggcaggtgcccgcttccccaacacctccaggcagtgaccctagggcatgccccagcaggtctccgagcagccactgggacccgtctcagcacatcctggcctttgaaagtctgatatcctgagaggagggcaggttttagggccgcagttccagccagcgtccccagcctggcttccctgccatggactcagtagctcgtggggcttcttaccacccaccagccccgctggggtgcggcctggctgtgggcaaaggaggacttgcctggagatttgagagaagattccttctaccagggctgctgaggggccaggcctgcatcaggggctaggctctggctgggcccggaggctgagactaaggctttcgaccctggtgcctccatgtggatgctgcctcagacaaaggcagtgagccttccctgccaaagtgcccatcccatgggctcggcctcactggtcactgttagcccatgaacacgtgtgggcctcggtcacgtggctttgagggcagtctgaccaggctagaccacacgtgccgtgacagggggtgccattcccctcgcaggctctaatgtgcccacatgtagcctggcagtccaaagaccaagaatcaacttgcaaatctgccattaaactgctgtgcgacttcaggcatatcactgccttctctgggcttcagtgtccttttcatacctagaagtctgcggtctgaggctctttgggttcagacacactgttctaggcttctgtaggggaccttgtgatctgccgtgcccctcctccctgttcttttctgtcctccccaccccaccctcagaagctgcttgctctgcccccaggacaggagcttgacggatgaagtgcagccagccacccaggtgccatttccagtctgacttccagaaatgtgcaccatgtcctagagcacagacccattggctggagcctcctgggagggttcaaaccatcagctctatgagaaatgcccagaaaggctttgccgactccatccgtctgtggaggctgcctgcctccggggtgggatgggtggtttctcctccaattcagacccaagaggtagcccccgagggcatgtacctggtgggaagcagctcaggtacccttgggggttgcagggcccttacgcaggtatttctctctctctcctctctggggtgcgtgtgtgcgtgcgcgtgtgcgtgcctatgcttttctctgtgggcacatcaggatgtttcctcgtagagcatgtgcaacgtgtcccaacctgaagcgagcgtgtgtgtgtgctcctctgcgtcccaggtttggaacgtctagggtttggtgtgcctgtcttctgccctcccctgagcccacagggtcagtcaatgtaatcttctacgtgcctctcccttctggccttctctcaacaagtgcccccggctccagagcttcaggggtaggggttctccttgagggtgcaaggggatccttctcatctccctggaccctcccagggcacttctggtccctattccccagctccttaggcagctgagccggtgtcccttagggaaaggtgaccaggaagctttggtgcagggagctcttggttggggacaaagggcttggacccctgcacagtgttctgtggacaatggttaatatgcccgggaagaggggggtgacagggcccacagggtatggcccccaatttcccacctctgtttattctgtaaactgcaacctatttaaataacctttagcattcctatttgtaacaaaattaatttttatgaaataaattatatttcctagtctaataaaatccgggttgcatttaaaaaaaaaaaaaaaaa

SEQ ID NO: 154062 - DNA, 10615 bp, Homo sapiens
cagtttggagctcagtcttccaccaaaggccgttcagttctcctgggctccagcctcctgcaaggactgcaagagttttcctccgcagctctgagtctccacttttttggtggagaaaggctgcaaaaagaaaaagagacgcagtgagtgggaaaagtatgcatcctattcaaacctaattgaatcgaggagcccagggacacacgccttcaggtttgctcaggggttcatatttggtgcttagacaaattcaaaatgaggaaacatcggcacttgcccttagtggccgtcttttgcctctttctctcaggctttcctacaactcatgcccagcagcagcaagcagatgtcaaaaatggtgcggctgctgatataatatttctagtggattcctcttggaccattggagaggaacatttccaacttgttcgagagtttctatatgatgttgtaaaatccttagctgtgggagaaaatgatttccattttgctctggtccagttcaacggaaacccacataccgagttcctgttaaatacgtatcgtactaaacaagaagtcctttctcatatttccaacatgtcttatattgggggaaccaatcagactggaaaaggattagaatacataatggcaaagccacctcaccaaggctgctggaagccgggccggtgacggagtccctcaggttatcgtagtgttaactgatggacactcgaaggatggccttgctctgccctcagcggaacttaagtctgctgatgttaacgtgtttgcaattggagttgaggatgcagatgaaggagcgttaaaagaaatagcaagtgaaccgctcaatatgcatatgttcaacctagagaattttacctcacttcatgacatagtaggaaacttagtgtcctgtgtgcattcatccgtgagtccagaaagggctggggacacggaaacccttaaagacatcacagcacaagactctgctgacattattttccttattgatggatcaaacaacaccggaagtgtcaatttcgcagtcattctcgacttccttgtaaatctccttgagaaactcccaattggaactcagcagatccgagtgggggtggtccagtttagcgatgagcccagaaccatgttttccttggacacctactccaccaaggcccaggttctgggtgcagtgaaagccctcgggtttgctggtggggagttggccaatatcggcctcgcccttgatttcgtggtggagaaccacttcacccgggcagggggcagccgcgtggaggaaggggttccccaggtgctggtcctcataagtgccgggccttctagtgacgagattcgctacggggtggtagcactgaagcaggctagcgtgttctcattcggccttggagcccaggccgcctccagggcagagcttcagcacatagctaccgatgacaacttggtgtttactgtcccggaattccgtagctttggggacctccaggagaaattactgccgtacattgttggcgtggcccaaaggcacattgtcttgaaaccgccaaccattgtcacacaagtcattgaagtcaacaagagagacatagtcttcctggtggatggctcatctgcactgggactggccaacttcaatgccatccgagacttcattgctaaagtcatccagaggctggaaatcggacaggatcttatccaggtggcagtggcccagtatgcagacactgtgaggcctgaattttatttcaatacccatccaacaaaaagggaagtcataaccgctgtgcggaaaatgaagcccctggacggctcggccctgtacacgggctctgctctagactttgttcgtaacaacctattcacgagttcagccggctaccgggctgccgaggggattcctaagcttttggtgctgatcacaggtggtaagtccctagatgaaatcagccagcctgcccaggagctgaagagaagcagcataatggcctttgccattgggaacaagggtgccgatcaggctgagctggaagagatcgctttcgactcctccctggtgttcatcccagctgagttccgagccgccccattgcaaggcatgctgcctggcttgctggcacctctcaggaccctctctggaacccctgaagttcactcaaacaaaagagatatcatctttcttttggatggatcagccaacgttggaaaaaccaatttcccttatgtgcgcgactttgtaatgaacctagttaacagccttgatattggaaatgacaatattcgtgttggtttagtgcaatttagtgacactcctgtaacggagttctctttaaacacataccagaccaagtcagatatccttggtcatctgaggcagctgcagctccagggaggttcgggcctgaacacaggctcagccctaagctatgtctatgccaaccacttcacggaagctggcggcagcaggatccgtgaacacgtgccgcagctcctgcttctgctcacagctgggcagtctgaggactcctatttgcaagctgccaacgccttgacacgcgcgggcatcctgactttttgtgtgggagctagccaggcgaataaggcagagcttgagcagattgcttttaacccaagcctggtgtatctcatggatgatttcagctccctgccagctttgcctcagcagctgattcagcccctaaccacatatgttagtggaggtgtggaggaagtaccactcgctcagccagagagcaagcgagacattctgttcctctttgacggctcagccaatcttgtgggccagttccctgttgtccgtgactttctctacaagattatcgatgagctcaatgtgaagccagaggggacccgaattgcggtggctcagtacagcgatgatgtcaaggtggagtcccgttttgatgagcaccagagtaagcctgagatcctgaatcttgtgaagagaatgaagatcaagacgggcaaagccctcaacctgggctacgcgctggactatgcacagaggtacatttttgtgaagtctgctggcagccggatcgaggatggagtgcttcagttcctggtgctgctggtcgcaggaaggtcatctgaccgtgtggatgggccagcaagtaacctgaagcagagtggggttgtgcctttcatcttccaagccaagaacgcagaccctgctgagttagagcagatcgtgctgtctccagcgtttatcctggctgcagagtcgcttcccaagattggagatcttcatccacagatagtgaatctcttaaaatcagtgcacaacggagcaccagcaccagtttcaggtgaaaaggacgtggtgtttctgcttgatggctctgagggcgtcaggagcggcttccctctgttgaaagagtttgtccagagagtggtggaaagcctggatgtgggccaggaccgggtccgcgtggccgtggtgcagtacagcgaccggaccaggcccgagttctacctgaattcatacatgaacaagcaggacgtcgtcaacgctgtccgccagctgaccctgctgggagggccgacccccaacaccggggccgccctggagtttgtcctgaggaacatcctggtcagctctgcgggaagcaggataacagaaggtgtgccccagctgctgatcgtcctcacggccgacaggtctggggatgatgtgcggaacccctccgtggtcgtgaagaggggtggggctgtgcccattggcattggcatcgggaacgctgacatcacagagatgcagaccatctccttcatcccggactttgccgtggccattcccacctttcgccagctggggaccgtccaacaggtcatctctgagagggtgacccagctcacccgcgaggagctgagcaggctgcagccggtgttgcagcctctaccgagcccaggtgttggtggcaagagggacgtggtctttctcatcgatgggtcccaaagtgccgggcctgagttccagtacgttcgcaccctcatagagaggctggttgactacctggacgtgggctttgacaccacccgggtggctgtcatccagttcagcgatgaccccaaggcggagttcctgctgaacgcccattccagcaaggatgaagtgcagaacgcggtgcagcggctgaggcccaagggagggcggcagatcaacgtgggcaatgccctggagtacgtgtccaggaacatcttcaagaggcccctggggagccgcattgaagagggcgtcccacagttcctggtcctcatctcgtctggaaagtctgacgatgaggtggtcgtcccggcggtggagctcaagcagtttggcgtggcccctttcacgatcgccaggaacgcagaccaggaggagctggtgaagatctcgctgagccccgaatatgtgttctcggtgagcaccttccgggagctgcccagcctggagcagaaactgctgacgcccatcacgaccctgacctcagagcagatccagaagctcttagccagcactcgctatccacctccagcagttgagagtgatgctgcagacattgtctttctgatcgacagctctgagggagttaggccagatggctttgcacatattcgagattttgttagcaggattgttcgaagactcaacatcggccccagtaaagtgagagttggggtcgtgcagttcagcaatgatgtcttcccagaattctatctgaaaacctacagatcccaggccccggtgctggacgccatacggcgcctgaggctcagaggggggtccccactgaacactggcaaggctctcgaatttgtggcaagaaacctctttgttaagtctgcggggagtcgcatagaagacggggtgccccaacacctggtcctggtcctgggtggaaaatcccaggacgatgtgtccaggttcgcccaggtgatccgttcctcgggcattgtgagtttaggggtaggagaccggaacatcgacagaacagagctgcagaccatcaccaatgaccccagactggtcttcacagtgcgagagttcagagagcttcccaacatagaagaaagaatcatgaactcgtttggaccctccgcagccactcctgcacctccaggggtggacacccctcctccttcacggccagagaagaagaaagcagacattgtgttcctgttggatggttccatcaacttcaggagggacagtttccaggaagtgcttcgttttgtgtctgaaatagtggacacagtttatgaagatggcgactccatccaagtggggcttgtccagtacaactctgaccccactgacgaattcttcctgaaggacttctctaccaagaggcagattattgacgccatcaacaaagtggtctacaaagggggaagacacgccaacactaaggtgggccttgagcacctgcgggtaaaccactttgtgcctgaggcaggcagccgcctggaccagcgggtccctcagattgcctttgtgatcacgggaggaaagtcggtggaagatgcacaggatgtgagcctggccctcacccagaggggggtcaaagtgtttgctgttggagtgaggaatatcgactcggaggaggttggaaagatagcgtccaacagcgccacagcgttccgcgtgggcaacgtccaggagctgtccgaactgagcgagcaagttttggaaactttgcatgatgcgatgcatgaaaccctttgccctggtgtaactgatgctgccaaagcttgtaatctggatgtgattctggggtttgatggttctagagaccagaatgtttttgtggcccagaagggcttcgagtccaaggtggacgccatcttgaacagaatcagccagatgcacagggtcagctgcagcggtggccgctcgcccaccgtgcgtgtgtcagtggtggccaacacgcccttcggcaccggaggaggcctttgactttgacgagtaccagccagagatgctcgagaagttccggaacatgcgcaggccagcacccctaccgtcctcacggaggacaccctgaaggtctacctgaacaagttcagacagtcctcgccggacagcgtgaaggtggtcattcattttactgatggagcagacggagatctggctgatttacacagagcatctgagaacctccgccaagaaggagtccgtgccttgatcctggtgggccttgaacgagtggtcaacttggagcggctaatgcatctggagtttgggcgagggtttatgtatgacaggcccctgaggcttaacctggttggccctgggttaatgaccaagcggaccagcttgacaacattgccgagaaagcttgctgtggggttccctgcaagtgctctgggcagaggggagaccgcgggcccatcggcagcatcgggccaaagggtattcctggagaagacggctaccgaggctatcctggtgatgagggtggaccccggtgagcgtggtccgcctggtgtgaacggcactcaaggtttccagggctgcccgggccagagaggagtaaagggctctcggggattcccaggagagaagggcgaagtaggagaaattggactggatggtctggatggtgaagatggagacaaaggattgcctggttcttctggagagaaagggaatcctggaagaaggggtgataaaggacctcgaggagagaacggagaaagaggagatgttgtgattctagggggacccggtttatcttatgacaagacagccaggagagaggacccggaggagaaaccggtgacctcggccccatgggtgtcccagggagagatggagtacctggaggacctggagaaactgggaagaatggtggctttggccgaaggggaccccccggagctaagggcaacaagggcggtcctggccagccgggctttgagggagagcaggggaccagaggtgcacagggcccagctggtcctgctggtcctccagggctgataggagaacaaggcatttctggacctcggggaagcggaggtgccgctggtgctcctggagaacgaggcagaaccggtccactgggaagaaagggtgagccccggagagccaggaccaaaaggaggaatcgggaaccggggccctcgtggggagacgggagatgacgggagagacggagttggcagtgaaggacgcagaggcaaaaaaaggagaaagaggattccctggatacccaggaccaaagggtaacccaggtgaacctgggctaaatggaacaacaggacccaaaggcatcagaggccgaaggggaaattcgggacctccagggatagttggacagaaggggagaccctggctacccaggaccagctggtcccaagggcaacaggggcgactccatcgatcaatgtgccctcatccaaagcatcaaagataaatgcccttgctgttacgggcccctggagtgccccgtcttcccaacagaactagcctttgctttagacacctctgagggagtcaaccaagacactttcggccggatgcgagatgtggtcttgagtattgtgaatgacctgaccattgctgagagcaactgcccacggggggctcgggtggctgtggtcacctacaacaacgaggtgaccacggagatccggtttgctgactccaagaggaagtcggtcctcctggacaagattaagaaccttcaggtggctctgacatccaaacagcagagtctggagactgccatgtcgtttgtggccaggaacacatttaagcgtgtgaggaacggattcctaatgaggaaagtggctgttttcttcagcaacacacccacaagagcatccccacagctcagagaggctgtgctcaaactctcagatgcggggatcacccccttgttccttacaaggcaggaagaccggcagctcatcaacgctttgcagatcaataacacagcagtggggcatgcgcttgtcctgcctgcagggagagacctcacagacttcctggagaatgtcctcacgtgtcatgtttgcttggacatctgcaacatcgacccatcctgtggatttggcagttggaggccttccttcagggacaggagagcggcagggagtgatgtggacatcgacatggctttcatcttagacagcgctgagaccaccaccctgttccagttcaatgagatgaagaagtacatagcgtacctggtcagacaactggacatgagcccagatcccaaagggctcccagcacttcgccagagtggcagttgtgcagcacgcgccctctgagtccgtggacaatgccagcatgccacctgtgaaggtggaattctccctgactgactatggctccaaggagaagctggtggacttcctcagcaggggaatgacacagttgcagggaaccagggccttaggcagtgccattgaatacaccatagagaatgtctttgaaagtgccccaaacccacgggacctgaaaattgtggtcctgatgctgacgggcgaggtgccggagcagcagctggaggaggcccagagagtcatcctgcaggccaaatgcaagggctacttcttcgtggtcctgggcattggcaggaaggtgaacatcaaggaggtatacaccttcgccagtgagccaaacgacgtcttcttcaaattagtgggacaagtccaccgagctcaacgaggagcctttgatgcgcttcgggaggctgttgccgtccttcgtcagcagtgaaaatgctttttacttgtccccagatatcaggaaacagtgtgattgggttccaaggggaccaacccacaaagaaccttgtgaagtttggtcacaaacaagtaaatgttcccgaataacgttacttcaagtcctacatccaacccaagtgacgacaacgaaagccggtgactacgacgaagccggtgaccaccacaacaaagcctgtaaccaccacaacaaagcctgtgactattataaatcatctcatttgtgaagccagccgctgcaaaagcccggcccctgcgaaacctgtggcttgccaagcctgtggccacaaagacggccactgttagacccccagtggcggtgaagccagcaacggcagcgaagcctgtagcaagcaaagccagcagctgtaagaccccccgctgctgctgctgcaaaaccagtggcgaccaagcctgaggtccctaggccacaggcagccaaaccagctgccaccaagccagccaccactaagcccatggttaagatgtcccgtgaagtccaggtgtttgagataacagagaacagcgccaaactccactgggagaggcctgagccccccggtccttatttttatgacctcaccgtcacctcagcccatgatcagtccctggttctgaagcagaacctcacggtcacggaccgcgtcattggaggcctgctcgctgggcagacataccatgtggctgtggtctgctacctgaggtctcaggtcaaagccatctaccacggaagtttcagtacaaagaaatctcagcccccacctccacagccatgcaaggtcagcttctaagttcaaccatcaatctaatggtgatgcacagaaccaattggctctcactgaaacagatatatgcaagttgccgaaagacgaaggaactttgcaagggatttcatattaaaatggtactatgatccaaacaccgaaaagctgtgcaaagattctggtatggaggttgtggtggaaacgaaaacaaatttggatcacagaaagaatgtgaaaaggtttgcgctcctgtgctcgccaaacccggagtcatcagtgtgatgggaacctaagcgtgggtggccaacatcatatacctcttgaagaagaaggagtcagccatcgccaacttgtctctgtagaagctccgggtgtagattcccttgcactgtatcatttcatgctttgatttacactcgaactcgggagggaacatcctgctgcatgacctatcagtatggtgctaatgtgtctgtggaccctcgctctctgtctccaggcagttctctcgaatacctttgaatgttgtgtaacagttagcccactgctggtgtttatgtgaacatttcctatcaatccaaattccctctggagtttcatgttatgccctgttgcaggcaaactgtaaatgtctaaaaagagaatgcaagaggggcacgggctacatctatatactttttgcttggttcaattttttttccctttttagttaagccatgactttagatgggaaagcctgtgtatctgtggagaaacaagagaccaactttttcattccctgcccccaatttcccagactaagatttcaagctaattttctttttctgaagcctctaacaaatgatctagttcagaaggaagcaaaatcccttaatctatgtgcaccgttggggaccaatgccttaattaaagaatttaaaaaagttgtaatagagaatatttttggcattcctctcaatgttgtgtgtttttttttttttttgtgtgctggagggaggggatttaattttaattttaaaatgtttaggaaatttatccaaagaaactttttaataaagtatattgaaagttaaaaaaaaaaaaaaaaa

SEQ ID NO: 154063 - DNA, 609 bp, Homo sapiens; identical to SEQ ID NO: 142393

SEQ ID NO: 154064 - DNA, 948 bp, Homo sapiens; identical to SEQ ID NO: 142397

SEQ ID NO: 154065 - DNA, 1007 bp, Homo sapiens
ggggaagtcccggaggatgttccctgctcaggaggaggccgacaggaccgtgtttgttgggaatttagaggcccgagttcgggaagagattctgtacgagctgttccttcagtttcttataggcggggccactaaccaaagtgactatatgcaaagacagagaaggaaagccaaagtcttttggatttgtctgctttaaacacccagaatcggtgtcttatgccatagctttgctgaatggaattcgtttatatggaagaccaattaacgtgcagtatcgatttgggagttctcgctcttctgaaccagctaaccaaagttttgagagctgtgttaagataaattcacacaactacaggaatgaagaaatggtggtgggcagatcttcctttcccatgcagtattttccaattaataatacttctttacctcaagaatattttctctttcagaagatgcagcggcatgtgtataatccagtgctgcagcttccttaccatgaaatgacagctccacttcctaatagtgcatccgtgtcttcctcactgaatcatgttccagatcttgaggctggacccagctcatataaatggactcaccaacaaccaagtgactctgaccttttatcagatgacagctccacttcctaatagtgcatccgtgtcttcctcactgaatcatgttccagatcttgaggctggacccagctcatataaatggactcgccaacaaccaagtgactctgacctttatcagatgaataaacgaaagagacaaaagcaaacaagtgatagtgatagtacgcacagacaacaacagaggcaacgaatgtagccaaaagttccgaaagtctaagaagaagaaaagatactagtattacctacaaatgaaacttacctacactgatcttagttctcttatgaaaaaaaataagatgttatcccatcaaataaacaatgtcatggctaaaaaaaaagtcgacgcagccgcgaatttagtagtagtag

SEQ ID NO: 154066 - DNA, 805 bp, Homo sapiens
tttttttttttttttaagcacagcaataaagttttaatggaatagctttggcccaggcagaggcagttcccagatgtctcaggacgcgtgtgaaccccaagaagttgggggcgttatctgggcccttgggatccattcccctgggtataaagtgttggtacgtggctccaggcctggcccactcagcctcccccaggaaggcttctcaagtggagaaggttcttggcctcagaactcacggcgctgctgctcacgctgaccccccactagatgcagatcggtgtagaaaggcctgccagggcagggcatgagggccccaagctggaagcagcccagaaatccttttaccagaggacaactccctaatccgctgggcaggggcggggtgtcacacgcaggattccgcgacgactgtcactgcctcctgggcgcccctctgtgcgggagcggggagggaagaggatggaacgccctgtgtctgcctcgggcgcagtgcgaggcccaagctggtctttgggcggcccttgcgcacctctgcagcgctgcgacctggtgcctgtatcccccacggcctcctctgctacccacgagagccggttgattttcggccgggctcagggagggcgtggcctccgcgttccccatccccctccaggacccacgcccttctcggagcgcaccagggtcagagccgggatggtccccgatcccccagcgcccccacgcctggtgaccttgggtcgggcgtcccctcacctgacgctcccgcggcgagcggctcccccgccgtgcaggtggcggccgc

SEQ ID NO: 154067 - DNA, 3333 bp, Homo sapiens
  misc_feature (1)...(3333): n = a,t,c or g
acatggagatgtgtcacccagatgcctcttcaaggaaggatctgctgcccagctgcagaccctagagttagcaggcagcctccatctgtcagctccttcaggatctgccaaagccactaaagtggaatcacttcagtcgagaatatatattcacctgctcgttgtcttgatggcagtgacagcctgtctggagcagctgctgaggggatgccagctgcagtatggaaggcgtggccagagctgcccactcctcagagacagcgggcgccaggaacatgcaagagccccgtcccctaccacgtcagcgaggcgggagacccatgttcctgggcacagctgcagccgtccagccgcagctctgcacccagccatccctgcactcttgggggcccaggaaaccccctgcccctgcaggctgaaagtgcctgctcctgaggttgcagttcacagcatgtccgcctcggcccctgctgcggagggggagggaacccccacccagcccgcgtccgagaaaagaccccgaaatgcccggtcccagagaggagagcgaggaggaagaggacgaggacggacgaggaggaggaggaggaggaaaaagaaaagagtctcatcgtggaaggcaagagggaaaagaaaaaagtagagaggttgacaatgcaagtctcttccttacagagagagccatttacaattgcacaaggaaaggggcagaaactttgtgaaattgagaggatacatttttttctaagtaagaagaaaaccgatgaacttagaaatctacacaaactgctttacaacaggccaggcactgtgtcctcattaaaagaagaatgtgggtcagttcagtggctttccatttgaaaaaggaagtgtccaatataaaaagaaggaagaaatgttgaaaaagtttagaaatgccatgttaaagagcatctgtgaggttcttgatttggagagatcaggtgtaaatagtgaactagtgaagaggatcttgaatttcttaatgcatccaaagcgttctggcaaaccattgccgaaatttaaaaagtcttgtagcaaaggcagtaaaaaggaccggaacagttctggaatggcaagtaaggctaagcgaaccaaatgtcctgaaattctgtcagatgaatctagtagtgatgaagatgaaaagaaaaacaaggaagagtcttcagatgatgaagataaagaaagtgaagaggagccatcaaaaaagacagtcaaaagagaggaaacctaaacagagggctacttctaaaagtaaaaaatctgtgaaaagtgccaatgttaagaaagcagatagcagcaccaccaagaagaatcaaaacagttccaaaaaagaaagtgagtctgaggatagttcagatgatgaacctttaattaaaaagttgaagaaaccccctacagatgaagagttaaaggaaacaataaagaaattactggccagtgctaacttggaagaagtcacaatgaaacagatttgcaaaaaggtctatgaaaattatcctacttatgatttaacttgaaagaaaagatttcataaaaacaactgtaaaagagctaatttcttgagatagaggacagagaagatgactcgttccctatagatttgaagatctgatttataccattataccagcaaagagaatgtatttccttttctaaatccttgttaagcaacgttagtagaacttactgctgacctttttatcttgagtgttatgtgaatttgagtttgctgttttaaattgcatttctatgccatttttagtttaaaatcttgcatggcattaattgttccttgcttttatagttgtattttgtacattttggatttctttatataaggtcatagattcttgagctgttgtggtttttagtgcacttaatattagcttgcttaaggcatacttttaatcaagtagaacaaaaactattatcaccaggatttatacatacagagattgtagtatttagtatatgaaatattttgaatacacatctctgtcagtgtgaaaattcagcggcagtgtgtccatcatattaaaaatatacaagctacagttgtccagatcactgaattggaacttttctcctgcatgtgtatatatgtcaaattgtcagcatgacaaaagtgacagatgttatttttgtatttttaaaaaacaattggttgtatataaagtttttttatttcttttgtgcagatcactttttaaactcacataggtaggtatctttatagttgtagactatggaatgtcagtgtttagccaaacagtatgatggaacacgtgaaagtcaattcagtgatggcaacactgaaggaacagttaccctgctttgcctcgaaagtgtcatcaatttgtaattttaagtattaactccgtaaaagtgtcctgtaggtacgttttatattatataaggacagaccaaaaatcaacctatcaaagcttcaaaaactttggggaaagggtgggattaagtacaagcacatttgggcttacaagtaaatgaactgatttttaataaactgcttttgcccatattaaaatgctggataattactgggaaaccctaaccaagcttcacgattaatgactaaagtaccagattataatgccagaatataatgtgcaggcaatcgtgggatgtctctgaccaaggggtgtctcaaaaataatattactttttacattaaaggaaattttaatgttttttctgggagttgggggctcatggcttttcagagtttggttaatccagtgttgattctagatgatcaaacataatggaccactcctgaatgagaccttaattttgtcctttcaaatttacctgtccttaaatcagtttattaaatctgaattttaaaacatgcctgtttatgacacaatgacacattttgttgcacccaattaagtgttgaaaaatatcctttgcatcatagaacagaaatatataaaaatatatgttgaatgttaacaggtattttcacaggtttgtttcttgatagttactcgaaaggcnaccatctagggaaaggtaaatacaagtgaacaaaataagcaactaaatgagacctaataattggccttcgattttaaatatttgttcttataaaccttgtcaataaaaataaatcataaatcaaaaaaaaaaaaaaaaagggggggccgttttaaagaatccttgggggggccaaattttacccgggcttgcaaggtaaaatttttttccttatagggagccgaattaaaacctacttggggatttttggaaaagaacctttttttgggggggggaaaaaattggaaaaac

SEQ ID NO: 154068 - DNA, 494 bp, Homo sapiens
ttttttgattaaatgttctttatttgatgcttttgtgtgcacaacactataaggagttgcccaattcaccaagtcagcccgttcacacccttagttaaggtggccattaaggggccagggggtggcaatcagtaagctgcctcctgcctaactctctttctccaaccattctctataggctccagcgtagttgcgagccctgtggagacaaagaagcgtgagagactgacaggaatgacaggcagtccccatcacctcccaggttagagccacacctccccgtacccagtgtatccaagactccgggccagctgcgtgggcctggaggccccgcttgcccatctgacagaagaaaacgagatgctcatcttccagctttggcttctcagcagaatataaagcctggaaggcagctggctccatctgcagagcactctccaactcggacactggaggagtggagagggtagaagggaaagccagcaatttggcac

SEQ ID NO: 154069 - DNA, 1243 bp, Homo sapiens
tttcgtgggcgggccagggccgcactccggagactcgcggttgctacgcgcaccatggctggaggtacctgcgggggattcctggggccgcggttctcttggtcctctgggttgaggcgtggcagggagtggggtggcggagcgaaggggcgtggctgaggggtcttcgtgcacaccctaccgggaggggcgctgccaggtgaggggatgccatggcggccgtgactcctaggccccctcttcctgaaggctgtcgcgccccttcctcagcgcccacggtctcgcttcctgaactccgttcactcctagcctccggacgggcccggctcttcgacgtgcgctctcgcgaggaggcggcagctgggaccatcccaggggcgctcaacatcccgggtatagggtggagaggggacgcccaggtggtggaatagagaccgttcaggaggttctttgccaatgggacctcatttaggatggaatggggaaggcactgattatgggggtcctgcattcccgggagccagccctcagcttccgtaggaaggactgatggggggcggatcttggcatcggaactggcccatccagtttgagaagacagcaggcggagaggagaggggcagaccagcttctcttgacctccccaaatctggacgcctgagggggcatcccgccccgcctcctcacagcttagggagtggcttgcattcaaaagttgtcggtttctgttccttgaaattggggtgggggtaggggatggttatcatatgttgtttgggggcccccaggacccagcccttccaggcccagcttccgaacctgagtgccaaattgctggctttcccttctaccctctccactcctccagtgtccgagttggagagtgctctgcagatggagccagcctgccttccaggctttatattctgctgagaagccaaagctggaagatgagcatctcgttttcttctgtcagatgggcaagcggggcctccaggccacgcagctggcccggagtcttggatacactggggctcgcaactacgctggagcctatagagaatggttggagaaagagagttaggcaggaggcagcttactgattgccaccccctggccccttaatggccaccttaacctaagggtgtgaacgggctgacttggtgaattgggcaactccttataagtgttgtgcacacaaaagcatcaaataaagaacatttaatcaaaaaaaaaaaaaaaa

SEQ ID NO: 154070 - DNA, 851 bp, Homo sapiens
ccggaaggactggggacacctgggatgttcaggagaatagaaatggccagatgtgtgttagtggagaaaagaagtgacacatagaccaggcacctggggtctaatatcttgagctggtcccgactccttctgcaacttctctgtctgtcctagttccaccagcactgcttggatactggtgctggcacagttccttctgtcaccaactttgctccccagccccagaatgttgacagtcgctctcctagcccttctctgtgcctcagcctctggcaatgccattcaggccaggtcttcctcctatagtggagagtatggaagtggtggtggaaagcgattctctcattctggcaaccagttggacggccccatcaccgccctccgggtccgagtcaacacatactacatcgtaggtcttcaggtgcgctatggcaaggtgtggagcgactatgtgggtggtcgcaacggagacctggaggagatctttctgcaccctggggaatcagtgatccaggtttctgggaagtacaagtggtacctgaaggaagctgggtatttggtaccaaccaagggccccctttttgtcttttgggaaaagcaaggggcccaagtttcaatgccgtccccttgcaccccaacaccgtcgtccgcttcatcagtggccggtctggttctctcatcgatgccattggcctgcactggggatgttttacccacactagctgcagcagatgctgagcctcctctccttggcaaggggcactgtgatgaggagtaagaactcccttatctctaacccccatccaaatggctcaatgaaaaaataggatgggtcatacaaggtttcaaaa

SEQ ID NO: 154071 - DNA, 1818 bp, Homo sapiens
tcagccccactgctccagaaggtacacgccataagctttggcaatgcccgtgtggtatttagtctgagaaccaggggtgcactggatctgcagagcagactcttcatacgcatctccaactatcagaggtgggatggattgggacctcttcctcctcctggcaaaatcttctgcatgaatgaaggtggagagagccttagtgaggtgactatctgatgtctcagtgctactcccaaagtcatagtttttcaggcaagggcacaagcagtggacaatggcccggcggatgtagctgtcgaagatatagtaaatgaaagggttgacacagctgttggcaaatgccaagggtccactcacctccataccaagctgaagaatagctgagggtaaatagtgttcttgccgcaacccagagacaatggccaggaacttgaaagtattgaagggcagccaggagacaagaaaggctgccacgacaataaagatgatctttatagatttcttcagctttttgttgtgctttcctgattgctggtaatgggcacacagcttccttgcaatgcaacagtagcaggtcacaatgctcaacaaagggacaaaaaaggtgaaaattaaggccaccagggaccatatgagtttaattggagttgcctttttctctgcacagtatggcttatcatcaatcagcgtgagctccctggacagaagagtaggcaaccccagcaggcaggagataaaccagatgctggcacagactacatatgcacagtctgtccttctgaatttcctggatacgactggccacacaatggccaggtagcggtcaacactcatgcaagtgagcaggaggacactgcagtgcatattgacggagatcatgtaggagctccctttgcacaggaaggagcccgtcctccacagtcctagagatgcttctttatccacccagagaggcaatgtgacaagaaaaatgaagtcagaggcagccagattgatgataaagatgtcgatcagtcttcggctgccgggtttgaaatgcaacgctcccatgagaacaaggttccccagcactccagtcaggaacacagctgtgtaaaagacattcaaggagccaatgtgggagttctgccagctgctaagtatgtctatgccattatgcattctggcactgacttttactggcagaccacagtgacattttgggtaccctggaatcaatgtcagctcagagccagtgtccagtagtctccaaaatgtctgatcatttcccttttcccaatgcacagttaccctggtaaaaggctgtaagtctccttgcctttgacagtttagtgctgccacctgccccctgccaccttgggatccaattattctcattgtatttaaattttgtagttgagggactgtggttcccactgttagatctgacataaagaaaagagcaattacagggatcttcaaagatgcaggtgctgctctcgcaaacctattttgcaaggcattggtcaagggtatatcttctggaccctcccagcagcgatgagtaggtctaaagcgactaatccactccaccatcctaatctccctaagcctttccattccttcctctacattaacccaagggggatcaggcacttccagcttactcacagtgggccatcttttaatccatacttcagctaacaaagcaaataagcctttagaacctcttttaactccctgagcttttgtgagtttaggtttgatgtgctttggggctttgatcggactttgtgcttgcatttgccgaagcttatatcccaccattgccacgggcat

SEQ ID NO: 154072 - DNA, 2130 bp, Homo sapiens
cgcggggagagtagggtgctgtggtctgagctagagggtgaagctggcggagcaggaggatgggcgagcagtctgaatgccagaatggataaccgttttgctacagcatttgtaattgcttgtgtgcttagcctcatttccaccatctacatggaaggactccattggcacagacttctggtatgaatatcgaagtccaggtcaagaaaattccagtgatttgaataaaagcatctgggatgaattcattagtgatgaggcagatgatgcgacttataatgaatgcactttttccgatacaatggcacagtggggtttttgagacgggtgtattcaccatacccaaaaacattgcattgggtattagcccaccacgaaaggacagagtcatttgatgtggtcacaaaaatgtgtgagtttcacacttaactgagcagttcatggagaaattttgttgatcccggaaaaccaccaatagccggggattggatctccttaggacctatcttttggcgttgccagttccttttaccttttggtgagtttagggtttgatgtgctttggggggctttgatcggactttgtgccttgcatttgccgaagcttatatcccagcattgccacgggcattctccatctccttgcaggtctgtgtacactgggctcagtaagttgttatgttgctggaattgaactactccaccagaaactagagctccctgacaatgtatccggtgaatttgggatggtccttctgcctggcttgtgtctctgctcccttacagttcatgggcttctgctctcttcatctgggctgctcacaccaaccggaaagaagtacaccttaatgaagggcatatcgtgtgggcatgagcaagaaacctgcctgcttttaacaattgccatttttaatttttttaaaataatactggtattttccccacctctcaattgtttttaatttttatttgtggatataccattttattatgaaaatcatattttatttatacaccattcaccactaaataccccccttaataccactaaaatttatgtggtttactttaagcgatgccatctttcaaataaactaatctaggtctagacagaaagaaatggatagagacttgacacaaatttatgaaagaaaattgggagtaggaatgtgaccgaaaacaagttgtgctaaatgtctgtttagacttttcagtaaaactaaagtaacctgtatctgttcaactagaaaactctatatttagtttctttggggaaacctctcatcgtcaaaactttatgttcactttgctgttgtaggatagccagtcaaccaggcagtattaggtgctgttttcaaagatttaaggctctattaaattggggaaattatctagggtgccattttcccctaagcattggacacataggcttcatctgagggtgagatatggccgctgtttgtatctgcactgtgtctgtctacaaaaagtgaaaaatacagtgtttacttgaaattttaactttgtaactgcaagaattccagttcagccgggcggggattagtattatttttaactctcccgtaagatttttcagtaccaccaaattggttttggattttttttccttcctcctcacataccaggggttaattaaaagtgtgctttctttttaccattatattacagttacaaggtaaaattcctcaactgcgcatttatttattccagcgccagtgactataaagaacgtttcacccataatggacccctcccagagcctgggaaaccctacccacaagatcctaaagttcctggcctgtcccattaacctcccaactatgggtctttatttcttgtgggtaatatgatgtgccctttcccttgccctaaatcccttccctggtgtgtatcaacattatttaatgtcttctaattcagtcattttgtttataagtatgtctatgaaacattggaactttaaaaaaacttatttatttattccactaactgtaggcaattggacagattaaaaaaatgttaacctccataatttctataccataacctcaatgtcttttttaaaaaataaaattaaaaatgaaaagagactcaattgtaaaaaaaaaa

SEQ ID NO: 154073 - DNA, 924 bp, Homo sapiens
ggcggactatgtccgaagcaaggatttccgggactacctcatgaggtgacgagcgccgcaggccgaacccctcaactctggcccctgggccttcagcagctcctcctacatgagcaggcccagtgcccacatcagctccttgattgtctcccgagtgggcagcagcagcaccagcttccagggtggcctgggtgccggcatgggtctgccactgcactccagcctggctaacctgtatgtggatttttatagaggttttattcataactgccaaaatttggaagcaaacaagatgtcctttggtaggtgaatggcaaaataaattgtggtacacctggttccaactacacaacgttctggaaaaggcaaaattatggagctagtcgaaagatcggtggttgcaagggttgaggtggggcacagaggatttttagagaggggtcttcccattgctgccatcaatgatatgaaaaagtctccagagattatcagtgggcggatgacatttggtaagaatgcagatttggataattgggccttgtcggccagcccaggtggaagcctgcagtgcaccagggaccaggagcagatactgcaggtgattcgagcaggaacaggccctgataaaaaccaaggcaacagtttggttcagtggacttttctggtactcccgaggagagaatatggagagatagaggccagtaaggtcattcctgctggccaaaacttggccaataggacacacccaaatgagacttcagtttggaagtgtcacaaggaagcaggctctctgtggaacatcccttttgccggtctacctgcagcttctgtgatggagaagcggtggttctttccagcagcagaagtccaggcattaactgggggacagcagcagtgagggcaggttcagtcccacagcatgga

SEQ ID NO: 154074 - DNA, 1667 bp, Homo sapiens
aggataactaaaaggggtgtttagccaacaagatgtggttcctttcagatttgaaaatattatttccaaattctaaattaatgaaacaatttttcatctttaatgaacaaaagccacaagccttattttatttcagcctctaaaattaaattgattgtggctgctgtcaaacacagacgacttcactttgggtatccttgggatgagtgtagttgtgggaatgaaaaacttattgggttcatttctttaatattaatataagtttttgctattatgtcaaaagtactttcccaaccttaaatttccttagtgtctggggtccctgggcattgatttcccaagttattttatcttagaatagctcatatgagctgaaaaacaatttattctcttattaagcttctttcttcagaaaagtacccaatttagggtctgcattttaagaattattaacaaatatcttcataaaaatttgggaaaaggagtgtggatagatttaaacataaaaatatggagaatagttctaacagggtttgaattatattaacaatgtattgtgtaagaagtgaatcttatttttatttttaaatgttctaaataggacaatcagagatgacttggttgtagtgtgggaaaccagtagggaccttggggaagctgccaaaccctttctagctctggggctcagctgttaaggaactgctggtttcctacaggaacacttgggacattccattacctaaatgttaaccatcaattaacccagtaaacctgcaagatggaaacgaagatttgttctcacgagtttcacgtgattatttaaacacttctggggcccagtagccaactggggtcttcccattgctgccatcaatgatatgaaaaagtctccaggagattattcagtggggcggatgacattttgccctctgtttgctattcttttgacattcatggagattttgccttacaaggtacagccttcgggaacttgggcttcttgttttgcatgccacggaacaaatgaagttaggcccagcttcatccagggggaggggcggcttattccaaacacgaggatggacttaaaacgggcatctggcattaaccaatggggaaaagggaagaacaaggtctttgaaggggacagcctttgcccaggttgctgctgagttcacagattttcattattaattaggcttccctaagggaaaatacactggaatgctatttttacctaacccattctattttttaataggaaatagctggagagtttcctaaaccccaactcttctggctggccttaccaagtaattaaaatattttaccttccttttcccataaagagttagcttcaaaatatggcaattaatttaaatacctttcctgatggatgggttttatcctgcagtaatatgtatatccaccctattagaatttcccttaatgaaaaactgaagagaacaaaatttgtaacccactagcacttaaggtactcctgattccttaacattgtctttaatgaccacaagacaaccaacagctggccacgtacttaaaattttgtccccactgtttaaaaatgttacctgtgtatttccatgcagtgtatatattgagatgctgtaacttaatgtcaataaatgatttaaatatttgttaaa

SEQ ID NO: 154075 - DNA, 369 bp, Homo sapiens
cccaccccctgacccgtgctagtttggtatctatgcctgtagctttgctttggggcatcatctgaatctcatactgcacggcctttcagatctggcttcctgcactcaatgtcatgcacgtctcttagtgccgtgttcccttaatgctgagtcatgctccattgtatggatggaccacatgactgatttgcctcctgtccttagtcctctcagcctccaactctccttcctgcaggcattgatgttgaacaagtgtctgtcgtcatcaactttgatcttcccgtggacaaggacgggaatcctgacaatgagacctacctgcaccggatcgggcgcacgggccgctttggcaagaggggcctggcagtg

SEQ ID NO: 154076 - DNA, 451 bp, Homo sapiens
cttgtagtggggctggagcagagcctgccgcgaacccccggagcccacgatccctcgtgccatccctcgaatccaccagcacgagcgtcccacccgcgcctgggaccatggccactgactcatgggccctggcggtggacgagcaggaagctgcggctgagtcggtgctgttgtcaagaccaatgccaatgcagagaagacagatgaagaagagaaagaggacagagctgcccagtccttactcaacaagctgatcagaagcaaccttgttgataacacaaaccaagtggaagtcctgcagcgggatccaaactcccctctgtactcggggaagtcttttgaagagcttcggctgaaaccacagcttctccaaggagtctatgccatgggtttcaatcagccatccaagatacaagagaacgcattgccactgatgcttgctgagccgtat

SEQ ID NO: 154077 - DNA, 471 bp, Homo sapiens
tggttcccggtcccgatttctgcagagcctgccgcgaacctctggagcccacgattcctcgtgccatccctcgaatgcaccagcacgagcgtcccacccgcgcctgggaccatggccactgactcatgggccctggcggtggacgagcaggaagctgcggctgagtcggtgagttggcttcagccctaaaagggtcaggggactagttctggtcggagacttggtccctgggaaagaatgtttcccaggttgattaaaggctggatggggtggcggggaggatagggatggagcctggaccctgagctggctttgtttacgcagccgcctccgcgttacgtaagcgcaggtgagtgctcctatcggtaaagcgctcagctgcctgtctgtcttcctggaaccaggaagaatcatagattgcacccatcaccctagattgtgttttggttgtttttaattgaaatagagaca

SEQ ID NO: 154078 - DNA, 701 bp, Homo sapiens; identical to SEQ ID NO: 153276

SEQ ID NO: 154079 - DNA, 2616 bp, Homo sapiens
atgcccagccagactcgcaaaacagctagttggctggcagcagagctctcaaaagaaggccaccaggtggctctgctgagtggggagatgatggtggagcagagggctgcggtgattgagcgcttccgagagggcaaagagaaggttttggtgaccaccaacgtgtgtgcccgcggagtgaagctgcagaccttcacggtgagagttacagctcttaaggtagtgcgtcgggagttgttggttcctctcggtgggctcctagtcttgctagcgtcaagactagaagctgtagacctttgcgcctatgtctccagcggcagctacagctacatgacctcctcagccagtgagttcctgctcagcctcacactccccggggctcctggggcccagattgtgcactcccaggtggaggagcagcagcttctggcggccgggagctctgtggtcagctgcctgcttgaggcctgtccactgggtcctgggaacgttctgcagcactgccacctgctagtgaagcctgaacgtgtgggcacattggggctaggcatggccacgctcccctacctggactcaggggccctggatgggacgcaccgggtgaagctggtgcccggctatgccggcctgcagcgcctcagcaaggagaggctctcgggcaagagctgtgcctgtcgccgctgcatgggcgatgccggtgcctccgactggtttgacagccactttgacggtaacatttcccccgtctggacccgagagaacatggatcttccaccggacgtccagaggtggtggatgggttttttttttgtccccagaatgaagcccaagggtagttcatggtccacggcaccttcaatttcgtgggctaaagtactcttcctgcttcagcttcttaagaagttgggatacaggatgaatcaggcgccaaccgtgggctttgagcaggatgttggcagccgaaccacccaccatttcatgtaccctgagagtgccaagaacctgcccgccaacgtcagcttcgtgctggtgcccttcaaggtcctggaccttctgtggatcgccagcgccttgtccacggggcagatccgattcagctgcatacaaggcctctcaggctctgtgttcaagaaacgtagctgcccctccatttgtggccacaaagccagcagggaatggaacgagcatattgcagtaaggacattattctggagacagggggcaggcacatatctcaacgtgccctggagtgaattcttcaagaggacaggtgttcgggccattattaattatcccacacaagggccatccttgaaagaggataccggtgtgttagcagcaaacaccaacagcagaggttatcatgttatcaagagcatgtccaagtctgtgctcgccctcactctgcacacaaagatgctatgcagacaaggtgaccggatgctgcagccccagttcaagtcacacaacaccaatgaggtgctggagaagctgttccagatagtgcctggcgagaacccctaccgcttccgggaccccccaccatgccggcgctgtgccgtggtggggaactcgggcaacctgcggggctctggctatgggcaggacgtggacgggcacaacttcatcatgaggcttcctttttgtttgcaagggacattagtagaatatggaatctcccctgccctcccacagaatctgattgcccagtctcagtctggcactggtaaaacagctgcctttgtcttagccatgctcagccgagtggagccttcagacagatacccccagtgtctgtgcctctccccaacatatgagctggcgcttcaaacaggaaaagtgattgagcagatgggcaaattttacccagaactgaagcttgcctatgccgttcgaggcaataaatcagggtattggggtcctatgttcacattacccagtcggattttgcctcttccaagcacccttgggcctgtgagcaccagatcagttggagaggaagccttaacaagggaatgtcagagccagaagtgtgtctcagctgccaggacttcacgaatggagctcacggcggtatcgacaaaatcgtacaatatacgaatatccgattatcatccaatattccatatatcacgaattcgcactatacgcagattcacgctatctcgatattcaccatttctcgagattccacaattcccgaatctccacttacacacgattccgatgtatgcagtgctacgaatacacagagtcaccatatgggtatcagcaattaccaaatacagatatcccaattatctcaatccgaatgaatggattcccatattccacacgtccagattaagattaccaaatacgctatatacctatccagtgcacatagcagtatccaattcgccattcgtatcacattttcttaaaccaagtacggtacacatccggtttgcagaccctaatagcctatcaccattgtcgtttactatcccatttcgacattccaatacatttcgaattccattgcccaataacaaacaattccaggtgaccatttcggttccagtctcggaatccggagcaatgacctccttgcatttggagcgcaatttccagtaa

SEQ ID NO: 154080 - DNA, 564 bp, Homo sapiens
gtctgtgcagcagcagagcgagaagttcaaggccttgtgtaacttaccgggcccatcaccatggctcaagccatgatcttctgccatactcgcaaaacagctaggttggctggcagcagagctctcaaaagaaggccaccaggtggctctgctgagtggggagatgatggtggagcagagggctgcggtgattgagcgcttccgagagggcaaagagaaggttttggtgaccaccaacgtgtgtgcccgcggtgagcagaggacgtgtcccacctggtctgccaggctcggggtcccaggcccaattagagccagaaatccttgtatacagggaagtcggatggtctcagggagatgggtggggttggtgacactattcctttctaggagagactgtttggatttccctgaggtggtaagaactcacacatgccaggtgcggtggctcatgcctgcaatcccaaggcaggaaaattgcttgaaccctggagacagaggttgcagtgagccgagaatgtgctatagcactccatcctgggtgacagagtgagactctgtctccaa

SEQ ID NO: 154081 - DNA, 2442 bp, Homo sapiens
tgtcgtggggctggagcagagcctgccgcgaacccccgtagcccacgatccctcgtgccatccctcgaatacaccagcacgagcgtcccacccgcgcctgggaccatggccactgactcatgggcccatggcggtggacgagcaggaagctgcggctgagtcgttgagcaacttgcatcttaaggaagagaaaatcaaaccagataccaatggtgcctgttgtcaagaccaatgccaatgcagagaagacagatgaagaagagaaagaggacagagctgcccagtccttactcaacaagctgatcagaagcaaccttgttgataacacaaaccaagtggaagtcctgcagcgggatccaaactcccctctgtactcggtgaagtcttttgaagagctttggcttgaaaccacagctttcccaaggagtctatgcgatgggtttcaatcgtccatccaagatacaagagaacgcattgccactgatgcttgctgagcccccacagaacttaattgcccaatctcagtctggtactggtaaaaccagcctgcctttggtcttagcccatgctcagccggagttgagcccatcagaccagataccccccagtgtctgtgcctcttcccaacattatgaagctgggggcttcaaacaaggaaaagtgattgagcagatgggcaaattttacccagaactgaagcttgcctatgccgttcgaggcaataaattggaaagaggccagaagatcagtgagcagattgtcattggcacccctgggacctggggttgaactggtggcttccagctcaagttcattgatcccaagaaaatcaaggtgtttgttctggatgaggctgatgtcatgatagccactcagggccaccaagatcagagcatccgcatccagaggatgctgcccaggaactgccagatgctgcttttctccgccacctttgaagactctgtgtggaagtttgcccagaaagtggtcccagacccaaacgttatcaaactgaagcgtgaggaagagaccctggacaccatcaagcagtactatgtcctgtgcagcagcagagacgagaagttccaggccttgtgtaacctctacggggccatcaccattgctcaagccatgatctttttgccatactcgcaaaacagctagttggctggcagcagagctcgtcaaaagaaggccaccaggtggtcatgctgagtggggagatgatggtggaacagagggctgcagtgattgagcgcttccgagagggcaaagagaaggttttggtgacccacccaacttgtgttcccgcggcattgatgttgaccaagtgtctgtcgtcatcaactttgatcttcccgtggacaaggaccgggaatcctgacaatgagaccttacctgcacccggatcgggcgcacggcccgctttggcaagaaggggcctggcaagtgaacatggtggacagcaaagcacagcatgaacatccttgaacagaatccagggagcatttttaataagaagatagaaagatttggacacagatgatttggacgagattgaggaaaattagccaacttgagaagctccaccagccacttgatgccagccgctgggactttcccttgcacagggagacaagtgcatttaggggcacaggccccggacattcaccccaagggacaacggcagaagtagagagaaactacctaccttcactttcaaatttatgtttgggacttgacaaaaataggtgcaaattgatggggggcattagaagaaaaattttgcattttgggaaaattgggtcctttcccccacttttttaaagccacattcccccatctttataataatctggtcaacaagtggtaagtcgctgggccccccaggacccccctccctgattttgggccaaggcatcgtggaacccagctcccagccccctgaaagaaacgatagatgtgcaggttgtgcggaagaggctgagtggaaaatggtgtgagcccccaccgctgtgcatcgaatgagggaagtggcagcagagaggccagagctgccccctctctgtctcttcaatggacccttcacaagtggtttctcctggccctggggtggtcttccttctcctgaaatccagagactttcttgctcatcccttctccctttcacttctgttctctgctgcagaaagcagacttgcatatccctgatgagcagctcggctgacttttgtaaactttcagatttggagagaaacacgaaagtctggaatcctgaccccttgagagagagtgatctgggcgagggccgatgaaggggctgggcctggtcttgccttctcttctctcggttgctccctctgcctaggcccctggtactcagtcacggcagccaggagaccccaggtgagtttctgagcgcatacgtagttggttcttacg

SEQ ID NO: 154082 - DNA, 422 bp, Homo sapiens
  misc_feature (1)...(422): n = a,t,c or g
agcagaacaccatagacaatatgtcgctcttgggacccaaggtgctgctgtttcttgctgcattcatcatcacctctgactggatacccctgggggtcaatagtcaacgaggagacgatgtgactcaagcgactccagaaacattcacagaagatcctaatctggtgaatgatcccgctacagatgaaacagttttggctgttttggctgatattgcaccttccacagatgacttggagtgctgggatgagaaatttacctgcacaaggctctactctgtgcatcggccggntaaacaatgcattcatcagttatgcttcaccagnttacgacgtatgtacatcgtcaacaaggaaatctgctcttgtcttggctggaaggaacacgaagctatgaaagaagaactttgccggtcgaaggcn

SEQ ID NO: 154083 - DNA, 435 bp, Homo sapiens
caagcatgagccaccgtgcccagcctattttatatttcataacggacaattctagaaagactttattcctagaagtgctctcagagattattttatccacttctacttccaagtagggaagcgccaaaacttcatttagtcaattccctcttgctgtgtttttggtggacggaaaggatgtagcccaatttataatgattctctgtagagattactctgtatttttttcctactctatctatccttcccaattccttcaatccttcatttatgctgcttctatttggacctccttatttttttgtattgggcttcctcagagtgctgggatgagaaatttacctgcacaaggctctactctgtgcatcggccggttaaacaatgcattcatcagttatgcttcaccagtttacgacgtatgtacatcgtcaacaa

SEQ ID NO: 154084 - DNA, 1938 bp, Homo sapiens
attccagcctcattgtaacacacattctacgcctagcctggctttcttgctctccctcatctcattgtttcagccggaggccaaatctgaagtcctttccagggagtggctctgttcatggttaggcgccagccaaagtaagaacagcgcaagaggacagagacacattcagcagccaaaggactcggtggaaagagcagaacaccatagacaatatggcgctcttgggacccaaggggctgctgtttcttgctgcattcatcatcaccctctgactggatacccctgggggtctaatagtcaaccgaggagacgatgtgactcaaggcgactccagaaacattcacagaagatccctaatctggtgaatgatccccgctacagatgaaacagttttggctgttttggctgatattgcaccttccacagatgacttgggcctccctcagtgaaaaaaataccactgcaagagtgctggggatgagaaatttaccctgcacaaggctctactcctgtgcatccggcccggttaaccaaatgcatttcattcagttatgctttcacccagttttacggccgtatgtacatcgtccaaccaagggagatcttgctcctccgtcttggtctgtaagggaacaccgaagcctatgaaagatgagctttgcccgtcagatggctggtctgccccccctaggaagactcccgtcgcccccaattacttcccgacttccctccctgtgaaaatgtggatttgcagagacccaatggtctgtgatcaattgaaaaagaggaaagaagaaaaaatgtatgggtgagaggaaggaggatctccttcttctccaaccattgacagctaacccttagacagtatttcttaaaccaatccttttgcaatggtccagcttttacccctactctctactttttcacccaaactgataacatttatctcattttctagcacttaaaatacaaagtctatattattgcataattttgctgcttctcaatatcatagacacagtgaatagatgatgactatatggcttatatacaaacattctatgtacaatttcaagggagactaaactttaggctaataatctttactattgaatctgtctgatatagatcttagggttgaagaagctatctttgtctatttgggctaaccatagaatttcatttattttcctcacaatattttcctagaccaactccccatcattcacgtgttcctctttactcttactttaactattttgctggcttgcccgaaaatttgcctggcaagtcttccttataagacacatcatggtaagttttgtagtcctgtaagattctgcaacacaggtcaagaattatacaatcctactagcaatatataaggacccaaaatgtcttctgctaagctcagaggctggggctaaagcatgaggactatgccagctatagaacttggactcataattcgctatccaatttttcatgcagttgtctagtcgggaagtaaggttggaaactaagtctcatttactgattcgtttatgggtagtaccgggatgaacccacccaccacaaagccaaattggacaacttaatgtgaaatcataccattggttgacgtttccttgagttgctacttcgttcatcttcacaacttaacaagtgcacggtcgaattattgtgcaagtggcttttggatatcctgattggggcctaagaagggcattcagacttgaattttaataggcagacagaaaagtttgcctaatagttaatacgaaagagtgaaagaaacacaatattcagacaacccacattcttatcctggctctagcagtaaccacgtagccttggataagccattttccttcattaggtcctggtttaatttcctcatctttaaaatgagaaggttaaatttatcttagtact

SEQ ID NO: 154085 - DNA, 218 bp, Homo sapiens
tttcccgctccgccgcgcactgttgtcatggaggaaccaagatggcggctctggcctacaacctgggcaagcgggagatcaaccacagttgtatgatgcataaatacaaaatcagtgaagcaaagaactgccttgtagataaacatattgcatttattggagattccagaattcgtcaattgttttattcttttgtaaaaataattaatccccaattc

SEQ ID NO: 154086 - DNA, 1627 bp, Homo sapiens
cctaaggctcgcgtccgggccaggcgggtacccctagtactctctccccacacccccatggctctgccgcagccgccgccgcccgccggggcgcgtgacccggtgaccccggagcactgggcatccggacccccctcgcaggcgcagccgctattaaggcaggaggctaaagaggaggaggaaggggaggagacaggcgtccagggcgcctggggaaccggcacggcggagcagcggcggcggggctggggggaggccgccgagtcggccgcgaccgagaaggggcaggcggaggtcgggggcgccgcggccgcggggtcaggttccccggcgggaggcgcaggtggcggcctggggagctggcggccgctcctcgcctggctgcagcggcggcagccccagtgctgcccctgtgcggcgcccctttcccgctccgccgcgcactgttgtcatggaggaaccaagtatggcggctctggcctacaacctgggcaagcgggagatcaaccactacttcagcgtgaggagcgccaaggtgctggcctcggtggccgtgctgctgctcgcagcgtgccacctcgcctcccgccgctaccgaggcaatgattccgtgtgaataccttctctcaagtggcagatttcttggagagaaagtttggcaacctcacagttgtatgatgcataaatacaaaatcagtgaagcaaagaactgccttgtagataaacatatttgcatttattgggagattccagaattcgtcaattgttttattcttttgtaaaaataattaatccccaattcaaagaagaaggaaataaggattttctgtggcatcctgaagttaatggttctatgaaacagtgtatcaaagtgtggactgaggattccattgcaaagccacatgtgattgtagcaggagctgccacatggtccatcaagattcacaatggtagcagtgaagcgctttctcaatataaaatgaacatcacctccatagcaccacttttagaaaaattggcaaagactagtgatgtttattgggtcttacaagatcctgtttatgaagatctattaagtgaaaataggaagatgatcactaatgagaagatagatgcttacaatgaagctgcagtcagtattttgaatagtagcaccagaaattctaaatcaaatgttaagatgttcagtgtttccaaattaattgctcaagaaaccatcatggaatctttggatggcttacatcttcctgaatcgagcagagaaactaagctagctgcttgttttttcactttatctattatcggatatttaattttttacataattcatcgtaatgctcatcggaagaataagccgtgtactgatttggaaagtggagaggaaaagaaaaatattatcaatacccctgtgtcttcattagaaatacttttacaatctttctgcaaacttggcctgattatggcatatttctatatgtgtgaccgtgcaaatctgttcatgaaggaaaacaaattttatacacattcatctttctttattccaattatctacattttggttttgggagtattttataatgaaaatactaaagagaaaaaatatccgtccaaaaagaaacatgaatga

SEQ ID NO: 154087 - DNA, 928 bp, Homo sapiens
caagaacgtcccagtgcccttggctcctttcggagtgtgaccccgtgcttgcacgggacacgttacccagctcgggtgagaagggtatcttccgggaacctcgcctttaatagcacaacgagcgcagagtccactggatctgcgagaagaaaccgcgctaactagtttgtccctacggccgcctcgtagtcactgccgcggcgccttgagtctccgggccgccttgccatggctgcccgtggtgtcatcgctccagttggcgagagttttgtcgctacgctgaggtaccttgcagcccctcggccaaacggccagacgccgacgtcgaccagcagagactggtaagaagtttgatagctgtaggtcagggtgttgcagctcttgcatttgcagggtcgctacgcattaacggatctggaaacctctagaaacaagttatcacagaaactgccaaaggaagatttcaaactcctagcttttcatcctactataaagtgaggatttgaccagaaaaatgagtatggcgagaagctgcgtcttattttaggtgtaagcccagtctgctggcaaggctaaggattagaacaagctcataggagcagtcatgattttggaatcaccccagataaagggtggatctcccttacgtagcagccaaaataaatgaagcaaaagactttgctagaaacaacccccccaacattgatgcttaaggaccacactgaaggaaaaaaaaacgaggggacttcaaaaaaaaaaaaaagccctgcaaaatattctaaaacatggtccttcttaattttctatatgggatttgaccacagtcttatcttccgaccattaagctgtataacgaataaaatgttaatagtcttgctttttattatcttttaaagatctccttaaattctaaaaaaaaaaaaaaaaa

SEQ ID NO: 154088 - DNA, 826 bp, Homo sapiens
cggacgcgtgggtagaagcacatagtgataggcgaggggaaacttaaatcatcatcctggggcagccgtggtggctccatgcgtgaggctggtgccatgcagtctcctggtgttggcattgtctccaggccttctcctcagttctgcacacagctacaaaacaaaagaacagttgccagcacttggaagaggatgtggatccaaaccaaatggaggacagatactccctctatggacaagatactcatggaagaagtcaagttagaagagcagctgaaggaggctgtggaagaagataagcaagcactggcagatactgagggctcagagcagagcagccaaaaattggtggaggagggaaatatgtatagcattcagggcttctgcaaggactcgttagaggttgcagatgttttggagaaggcaacacagtgtgttccagaagaagaaattaaagacaataaccctcacctgaagaacctctctctatgggaccatctagttgcaggaaaagaaggtcaagactcccagtcattctacattatgtctatggaaaaactgtcttccacaaaactggtccctgctcccccaaaaattggggaccgctgcactcaacacagagagaaaaacaaaaagctcaagtctttacctctcagccctcagccaagatgtctcaccccactctctctgatgcaacaagaagcccctggagaacgtttcagtcccattttgtacttctgtcatgtgctcatcacagtctggtaagtgctggcatacgattcctaaattagtccattttgcattgctgtaaggaaatacctcaggc

SEQ ID NO: 154089 - DNA, 426 bp, Homo sapiens; identical to SEQ ID NO: 146578
  misc_feature (1)...(426): n = a,t,c or g

SEQ ID NO: 154090 - DNA, 436 bp, Homo sapiens; identical to SEQ ID NO: 146579
  misc_feature (1)...(436): n = a,t,c or g

SEQ ID NO: 154091 - DNA, 474 bp, Homo sapiens; identical to SEQ ID NO: 146580

SEQ ID NO: 154092 - DNA, 2817 bp, Homo sapiens; identical to SEQ ID NO: 146581

SEQ ID NO: 154093 - DNA, 506 bp, Homo sapiens
agcatgtctggctccccagcaggtgagctcaggagataagatggaagatgcaacagccaatggtcaagaagactccaaggccccagatgggtccacactgaaggccctgggcctgcctcagccagacttccacagcctcatcctggacctgggtgccctctcctttgtggacactgtgtgcctcaagagcctgaagaatattttccatgacttccgggagattgaggtggaggtgtacatggcggcctgccacagccctgtggtcagccagcttgaggctgggcacttcttcgatgcatccatcaccaagaagcatctctttgcctctgtccatgtacacacacacaactcagggaaggaggtcctgggactccaagttcagcgctccaggtctgggacagggcctgcatgcagtcaggctggcagtggcgcggtacagggagggaactggtgcatattttagcctcaggaataaagatttgtctgctcaaaaaaaaaaaaaaaaa

SEQ ID NO: 154094 - DNA, 12436 bp, Homo sapiens
gatttcacacagtaccccctcccagagctatgagaacgctcatgggcaccaaaatttcagaccaaaatccgggacacggttcagaactagtggtcaggaagggggaacaagagatctggaaggacagaaaaaggctgggagacggagctgggacagcgccctagaaggagggagccaggaggagctggggggcggtgggcaccagggctgggacccaggcttagctgccactacggggccaagggcgcatatcggtggcggagccttagctctttgtccggagtcttccggggtccgggaggatggggggcctggcctgggggtcagggagcctatcttcgtggggctccgagggagaaggcaaagcgcccggaatagtcgagggccccctgagcagccgaatgaggagctggggattgaacacggcgtccagccattgggcagccgcgaacgagagacaggacagggaccagggtctgtgttatactggcgcccagaggtctcctcttgcgggcggacaggacctttgcaaagaggtagtctgtcaccaggggctctgtcctcaggggtcccgggctcggggaacagctcgcccctcccttcagactttttgattcggcaccacggtcccaagccggtgtcctcccagcggaacgctgggacaggctcccgcaaaagagtgggcaccgcgcgctgctgtggggaattatgggcaacagggagcaagggtcagggcgagagagccacgacatccggagcagaaaggacagccccccggcggaactgtcttccaggggcctcgggatctggccccgagctggattcagcaccacgcacggcgaggacagctcctgcatcaggttcagcaccccgcgagtctcggacagctcccgagccggcgcccaagcgcatgcgctcccggggtctcttccgctgccgcttcctcccgcagcgccccgggccgcgtcccccgggactcccggcccgtcctgaagccaggaaagtaacctcggcgaaccgggcacgctttcgtcgcgccgcaaaccgccacccgcagtttccgcagtacaactaccagacgctggtgccggagaatgaggcagcaggcaccgcggtgctacgcgtggttgctcaggacccggacgccggcgaggccgggcgcctagtctactcgctggcggcactcatgaacagccgctcgctggagctgttcagcatcgacccgcagagcggccttatccgtacggcggcagctctggaccgcgagagcatggagcgtcactacctgcgtgtgaccgcgcaggaccacgggtcgccgcgcctctcggccaccacgatggtggccgtgacagtagccgaccgcaacgaccactcgccggtttttgagcaagcgcagtaccgggagacccttcgcgagaatgtggaggagggctaccctatcctgcagctgcgtgccactgacggcgacgcgccccccaacgccaacctgcgctaccgcttcgtggggccgccagctgcgcgcgctgcagctgccgccgccttcgagattgatccacgctccggcctcatcagcaccagcggccgagtggaccgcgagcacatggaaagctatgagctggtggtggaagccagcgaccagggccaggaacccgggccgcgctcggccactgtgcgcgtacacataactgtgctagacgagaacgacaatgctcctcagttcagcgagaagcgctacgtggcgcaggtgcgcgaggatgtgcgcccccacacagtcgtgctgcgcgtcacggccactgaccgggacaaggacgccaacggattggtgcactacaacatcatcagtggcaatagccgtggacactttgccatcgacagcctcactggcgagatccaggtggtggcacctctggacttcgaggcagagagagagtatgccttgcgcatcagggcgcaggatgctggccggccaccgctgtccaacaacacgggcctggccagcatccaggtggtggacatcaatgaccacattcctatttttgtcagcacgcccttccaagtttctgtcttggaaaatgctcccttgggtcactcagtcatccacattcaggcagtcgatgcagaccatggggagaatgccagattggagtactccctaactggtgtggcacctgatactccttttgtgataaacagcgccactggctgggtctctgtgagtggtcccctggaccgtgagtctgtggagcattacttctttggtgtggaggctcgagaccatggctcacccccactctctgcctcagccagtgtcaccgtgactgtgctggacgttaatgacaatcggcctgagttcacaatgaaggagtaccacctacgactgaatgaggatgcagctgtgggcaccagtgtggtcagcgtgaccgcagtagaccgtgatgccaacagtgccatcagctaccagatcacaggcggcaacacccggaatcgctttgccatcagcacccaggggggtgtgggtctggtgactctggctctgccactggactacaagcaggaacgctacttcaagctggtactaactgcatctgaccgtgcccttcatgatcactgctatgtgcacatcaacatcacagatgccaacactcatcggccggtctttcaaagtgcccactactcagtgagtgtgaatgaagatcggccaatgggtagcaccatagtggtcatcagtgcctctgatgatgacgtgggtgagaatgctcgtatcacctatctcctggaggacaacctgccccagttccgcattgatgcagactcaggagccattacattacaggccccattagactatgaggaccaggtgacctacaccctggctatcacagctcgggacaatggcatcccacagaaggcagacactacttatgtggaggtgatggtcaatgacgtgaatgacaatgctccacaatttgtggcctcccactatacagggctggtctctgaggatgccccacctttcaccagtgtcctgcagatctcagccactgaccgggatgctcatgccaatggccgggtccagtacactttccagaatggtgaagatggggatggagattttaccattgagcccacctctggaattgtccgtacagtaaggcggctagaccgggaggcagtatcagtgtatgagttgactgcctacgcagtggacagaggtgtgcccccactccggactccagtcagtatccaggtgatggtgcaggatgtgaacgacaatgcacctgtcttcccagctgaggagtttgaggtgcgggtgaaagagaatagcattgtgggctcagtggtggcccagatcactgcagtggaccctgacgaaggccccaatgcccatataatgtaccagatcgtggaggggaacatccctgagctgttccaaatggacatcttctctggagaactgacggcactcattgacctagactatgaggctcgccaagaatatgtgattgtggtgcaggccacatctgctcctttggtcagccgggccactgtgcacgtccgcctggttgaccagaatgacaacagccctgtgctcaacaacttccagatcctcttcaacaactatgtatccaaccgttcagacaccttcccgtcgggcattattgggcgcatcccagcttatgaccccgatgtctccgaccacctcttctactcctttgagcgtggcaatgagctgcagctgctggtagtcaaccagaccagtggggagctgcgactcagccgaaagctagacaataaccgcccactggtggcctccatgttggtgactgtcacagatggcctgcacagcgtgacggcgcagtgtgtgctgcgcgtggtcatcatcacggaggagttgctggccaacagcctgaccgtgcgccttgagaacatgtggcaggagcgcttcctgtcaccgctgctgggccgcttcctcgagggcgtggctgcggtgctcgctacgcccgctgaggacgtcttcatcttcaacatccagaacgacacagacgtagggggcaccgtgctcaatgtgagtttctcggcgctagctccacgtggggccggggcgggcgctgcagggccctggttcagctccgaggagctgcaggagcagttgtacgtgcgccgggcggcgctggcggctcgctccctgctcgacgtactgcccttcgacgacaacgtgtgcctgcgagagccctgtgagaactacatgaaatgcgtgtccgtgctccgctttgactcgtccgcgcccttcctggcctcggcctccacgctgttccgacccatccagcccatcgctggcctgcgctgccgctgcccgcccggattcacgggagacttttgcgagaccgagctcgacctctgctactccaacccatgtcgcaacggcggagcctgcgcgcggcgcgagggaggctacacgtgcgtctgccgcccgcgcttcaccggagaggactgcgagctggacaccgaggccggccgctgcgtgccgggcgtctgccgcaacgggggcacctgcaccgacgcgcccaacggcggctttcgctgccagtgcccggcaggcggcgccttcgagggcccgcgctgcgaggtggctgcgcgctccttcccgcccagttcgttcgtcatgtttcgcggcctgcggcagcgattccaccttacgctgtccctctcgttcgcgacagtgcagcagagcgggctgctcttctacaacgggcgcctgaacgagaagcacgacttcctggccctggaactcgtggctggccaagtgcggctcacatattccacgggtgaatccaacaccgtggtcagccccacagttccagggggcttgagtgacgggcaatggcatacagtgcatctgagatactacaacaagccccggacagatgccctagggggtgcacagggcccctccaaggacaaggtggctgtgctaagcgtggatgattgtgatgtggccgtggctctgcagtttggtgctgagattggcaactactcatgcgcggctgctggtgtgcaaacaagctccaagaagtccctggacctgacgggccctcttcttctgggaggtgtccccaacctccccgagaacttccccgtatcccataaggacttcatcggctgtatgcgggacctgcacattgatggccgccgagtggacatggcggcttttgtcgcaaataatggcaccatggcaggctgccaagccaagctacacttttgtgactcaggcccctgcaagaacagtggcttctgctcggagcgctggggcagcttcagctgcgactgccctgtgggcttcggcggcaaagactgtcagcttactatggcccatccccaccatttccgtggcaacggcacactgagctggaactttggaagtgacatggctgtgtctgtgccatggtacctggggctggcatttcggacacgggcaacgcagggggtcctgatgcaagtgcaggctgggccacacagcacgctcctttgccagctagatcgggggttactgtctgtgacagtgaccaggggctcgggccgtgcttcccatctccttctggaccaggtgactgtcagtgatggccggtggcacgatctgcggctggagttgcaggaggaaccaggtggccggcggggccaccatgtccttatggtctcactggactttagcctcttccaggacaccatggcggtggggagtgagctgcagggcctgaaggtaaagcagctccacgtgggaggcctgccccccggcagtgcagaggaggctcctcagggtctggttggctgcatccagggggtgtggctcggctccacaccctctggctccccggccctgctaccccccagccaccgagtgaatgcggagcctggctgtgttgtgaccaacgcctgtgcctctgggccctgcccacctcacgcagactgccgggacctctggcagaccttttcttgcacctgccagccaggttactacggcccaggctgtgtggatgcctgcctcctgaacccctgtcagaaccagggatcatgccggcacctgccaggagccccccatggctatacctgtgactgtgtgggtggctatttcgggcaccactgtgagcacaggatggaccagcagtgcccacggggctggtgggggagcccaacctgtggcccctgcaactgtgatgttcacaaaggttttgatcccaactgcaacaagacaaatgggcagtgtcactgcaaggagttccactaccgaccgcggggcagtgactcttgcctcccatgtgactgctaccctgtgggctccacctcgcgctcatgtgcaccccacagcgggcagtgcccctgtcgcccaggagcccttggccgccagtgcaacagctgtgacagtcccttcgcagaggtgacagccagcggctgccgggtgctctatgatgcctgccctaagtccctgagatctggtgtgtggtggccccagacaaagtttggcgtcctggccacagtgccctgtccccggggggccctgggtgctgctgtgcggctgtgtgatgaggcccagggttggctggagcccgacctcttcaactgtacctcccctgcctttcgagagctcagtctgctgctggatggcctagagctgaacaagacggcactggataccatggaggccaagaagctggctcagcggctacgggaggtgactggccacactgaccactattttagccaagatgttcgagtcactgcccgcctgctggcccacctgctggccttcgagagccatcagcagggcttcgggctgacagccacacaggatgcccacttcaatgagaatctgctgtgggccggctctgcactgcttgccccagagacaggggacttgtgggcggcgctggggcagcgggcccctgggggctccccaggcagcgcgggactggtgaggcacctggaggagtatgcagccacactcgcaaggaatatggaactcacatacctgaatcccatggggctggtgacgcctaatatcatgctcagcattgaccgcatggagcaccccagttctccccggggggcccgtcgctaccctcgctaccatagcaacctctttcgaggccaggatgcctgggatcctcacacccatgtgctgctgccttcccagtccccacggccatccccatctgaagttctgcccacaagcagcagcatagaaaactccaccacctcaagtgtggtccccccaccagccccgccagagccagagcctgggatctccattatcattctcctcgtttaccgcaccttagggggactgctccctgcccagttccaggcagaacgccgaggtgccaggcttcctcagaaccccgtcatgaactccccggtggtcagcgtggctgtgttccacggacgcaacttcctaaggggaatcctggagtcccccatcagcctagagtttcgcctgctacagacagcgaatcggagcaaggcgatctgtgtgcagtgggacccacctggcctggcggagcagcatggtgtgtggacagcacgggactgcgagctggtgcacaggaatgggtcccacgcacggtgtcgctgcagccggacagggacctttggggtcctcatggatgcctctccccgtgagaggctggagggcgacctggagctgctggctgtgttcacccacgtggtcgtggctgtgtctgtggctgcgctggtgctgactgcagccatcctgctgagcctgcgcagcctcaagtccaatgtgcgtgggatccatgccaatgtggcagccgccctgggggtggcagagctcctcttcctgctggggattcacaggacccacaatcaggtgcaggatcagggccagggaacttgtgtcctgatgaccctactggcccaggaggcctggggccaaaactcagggtcagagctggtgtgcactgcagtcgccatcctcctgcactacttcttcctcagcaccttcgcgtggctcttcgtgcaggggctgcacctctaccgcatgcaggttgagccacgcaacgtggaccgcggcgccatgcgcttctaccatgccctgggctggggcgtccctgctgtgctgctgggccttgctgtgggcctggaccctgagggctatgggaaccctgacttctgctggatctcagtccacgagcccctcatctggagctttgctggccctgttgtcctggtcatagtgatgaacgggaccatgtttctcctcgctgcccgcacatcctgctccacagggcagagggaggccaagaagacctctgcactcaggacccttcgcagctccttcctgctgcttctgctggtcagtgcctcctggctctttgggctcctggcagtcaaccacagcatcctagccttccactacctccatgctggactctgcggcctccagggcctggcggtgctgctgctcttctgtgtcctaaatgcagatgctcgggctgcctggatgccagcctgtctgggcaggaaggcagcgcctgaggaggcaaggccagcacctgggctgggacctggggcctacaacaacacggctctctttgaggagagtggcctcatccgcatcactctgggcgcctccaccgtctcctctgtgagcagtgcccgctccggccggacccaggaccaggacagccagcggggccgcagctacctcagggacaatgtcctggttcgacatggctcagccgctgaccacactgaccacagcctccaggctcatgctggccccactgacctggacgtggccatgttccatcgagatgctggcgcagactccgactctgacagtgacctgtccttggaggaggagaggagtctctccattccatcttcagaaagcgaggacaatggccggacgcgggggcgcttccaacggccactctgccgagcagcccagagtgagaggctcctcacccaccccaaagatgtggatggcaatgacctcctgtcctactggccagccctgggggagtgcgaggcagccccctgtgctctgcagacttggggctctgaaaggcgcctggggctggacaccagcaaggatgcagctaacaacaaccagccagacccggccctgaccagtggggatgagacttctctgggccgggcccagcgccagaggaaaggcatcctgaagaaccggttgcaatacccactggtgccacagacccgaggtgcccctgagctgtcctggtgccgtgcagccaccttgggccaccgtgcagtgccagctgcctcttacggtcgcatctatgctggcgggggcacgggcagcctttcacagccagccagccgctactcttctagagaacagctggacctgctcctccggcggcaactgagccgtgagcgactagaggaagcccctgcccctgttctacgtcccctgagccggccagggtcccaggaatgcatggatgctgcaccaggccgactggagcccaaagatcggggcagcaccctgccacggaggcagccacctcgggactaccctggcgccatggctggccgcttcgggtcacgggatgcgctcgacttaggggcacctcgagagtggttgagcacgctgcctccgccccgccgcacccgggaccttgacccacagcccccacctctgcccctgtctccccagcggcaactctcaagggaccccctcttgccatcccggccgctggactctctgtctaggagctcgaactctcgggagcagctggaccaggtgcctagccggcacccctcacgagaagcccttgggccactcccgcagctgctcagagctagggaggactcggtcagtggccccagccatggcccctccacagaacagttggacattctttcctccatccttgcctctttcaactcctcggccctctcctctgtgcaatcttcaagcacacccttgggccctcacaccactgccacaccttctgccacagcctctgtgcttgggccctccacgccacgttctgccacgtctcacagcatctcggagctgtcgccagactcagaaccgagggacacacaggcactgctgtctgcaacacaagcaatggacctgcggaggcgagactaccacatggaacggccgctgctgaaccaggagcatttggaggagctggggcgctggggctcagcacctaggacccaccagtggcggacctggttgcagtgctcccgtgctcgggcctatgcccttctgctccaacacctcccggttttggtctggttaccccggtatcctgtgcgtgactggctcctgggtgacctgttatccggcctgagtgtggccatcatgcagcttccgcagggcttggcctacgccctcctggctggattgccccccgtgtttggcctctatagctccttctaccctgtcttcatctacttcctgtttggcacttcccggcacatctccgtggagagcctctgtgtcccgggaccagtagacacagggacctttgctgtcatgtctgtgatggtgggcagtgtgacagaatccctggccccgcaggccttgaacgactccatgatcaatgagacagccagagatgctgcccgggtacaggtggcctccacactcagtgtcctggttggcctcttccaggtggggctgggcctgatccacttcggcttcgtggtcacctacctgtcagaacctcttgtccgaggctataccacagctgcagctgtgcaggtcttcgtctcacagctcaagtatgtgtttggcctccatctgagcagccactctgggccactgtccctcatctatacagtgctggaggtctgctggaagctgccccagagcaaggttggcaccgtggtcactgcagctgtggctggggtggtgctcgtggtggtgaagctgttgaatgacaagctgcagcagcagctgcccatgccgatacccggggagctgctcacgctcatcggggccacaggcatctcctatggcatgggtctaaagcacagatttgaggtagatgtcgtgggcaacatccctgcagggctggtgcccccagtggcccccaacacccagctgttctcaaagctcgtgggcagcgccttcaccatcgctgtggttgggtttgccattgccatctcactggggaagatcttcgccctgaggcacggctaccgggtggacagcaaccaggagctggtggccctgggcctcagtaaccttatcggaggcatcttccagtgcttccccgtgagttgctctatgtctcggagcctggtacaggagagcaccgggggcaactcgcaggttgctggagccatctcttcccttttcatcctcctcatcattgtcaaacttggggaactcttccatgacctgcccaaggcggtcctggcagccatcatcattgtgaacctgaagggcatgctgaggcagctcagcgacatgcgctccctctggaaggccaatcgggcggatctgcttatctggctggtgaccttcacggccaccatcttgctgaacctggaccttggcttggtggttgcggtcatcttctccctgctgctcgtggtggtccggacacagatgccccactactctgtcctggggcaggtgccagacacggatatttacagagatgtggcagagtactcagaggccaaggaagtccggggggtgaaggtcttccgctcctcggccaccgtgtactttgccaatgctgagttctacagtgatgcgctgaagcagaggtgtggtgtggatgtcgacttcctcatctcccagaagaagaaactgctcaagaagcaggagcagctgaagctgaagcaactgcagaaagaggagaagcttcggaaacaggcagggccccttttgtctgcatgtctggctccccagcaggtgagctcaggagataagatggaagatgcaacagccaatggtcaagaagactccaaggccccagatgggtccacactgaaggccctgggcctgcctcagccagacttccacagcctcatcctggacctgggtgccctctcctttgtggacactgtgtgcctcaagagcctgaagaatattttccatgacttccgggagattgaggtggaggtgtacatggcggcctgccacagccctgtggtcagccagcttgaggctgggcacttcttcgatgcatccatcaccaagaagcatctctttgcctctgtccatgatgctgtcacctttgccctccaacacccgaggcctgtccccgacagccctgtttcgccctcactcgctgtctcctcagatgtgaaacagttggaaccagagctgcttctcaggaataatttgctctcaggaatacccgagaaggtacagggcagcgtgggtgccaatgggcagtccctggaggatacagagtga

SEQ ID NO: 154095 - DNA, 1037 bp, Homo sapiens
actactctgtcctggggcaggtgccagacacggatatttacagagatgtggcagagtactcagaggccaaggaagtccggggggtgaaggtcttccgctcctcggccaccgtgtactttgccaatgctgagttctacagtgatgcgctgaagcagaggtgtggtgtggatgtcgacttgctcatctcccagaagaagaaactgctcaagaagcaggagcagctgaagctgaagcaactgcagaaagaggagaagcttcggaaacaggctgcctcccccaagggcgcctcagtttccattaatgtcaacaccagccttgaagacatgaggagcaacaacgttgaggactgcaagatgatgcaggtgagctcaggagataagatggaagatgcaacagccaatggtcaagaagactccaaggccccagatgggtccacactgaaggccctgggcctgcctcagccagacttccacagcctcatcctggacctgggtgccctctcctttgtggacactgtgtgcctcaggagcctgaagaatattttccatgacttccgggagattgaggtggaggtgtacatggcggcctgccacagccctgtggtcagcccagcttgaggctgggcacttcttcgatgcatcccatcaccaagaagcatcttctttgcctctgtcccatgatgctgtcaacctttgccctcccaacacccgaggcctgtccccgacagcccttgttcggtcaccaaaactctgaacatgctacatcctgcccaatgactgcacctctggaggtgcagggcacccttgagaagcccctcacccctaggccgcctcccaggtgctaccccaggagtcccctcccatgtacacactacacaactcagggaaggaggtcctgggactccaagttcagcgctccaggtctgggacagggcctgcatgcagtcaggctggcagtggcgcggtacagggagggaactggtgcatattttagcctcaggaataaagatttagtcagctcaaaaaaaaaaaaaaaaa

SEQ ID NO: 154096 - DNA, 279 bp, Homo sapiens
aaagggaagcttagatttattgagcgcctactgtgtgccaggcagtgtgcaaggcgctttacatacattatcgcattaaatcctcacaacaaccctgcgaggtaggtgtttataaacccccatttgacagatgaggaaactgaggctcagggaggtgaagtgatgtggccaagttcacatggctaataaatggcagacagaggaggtgagccctccttctgctttgttggttgttgctggacctatgcctcttctcccaagaacccctctgtcatctga

SEQ ID NO: 154097 - DNA, 3774 bp, Homo sapiens
ggggcagaatgctggatggcccactgttctccgaggggcctgacagcccccgggagctccaggatgaggagtctggcagctgcctctgggtgcagaagtccaagctattggtgatagaagtgaagactatttcctgtcattatagacgccgcgccccttctcgacagcccatggacttccaggccagccactgggctcgcgggttccaaaaccgcacgtgtgggccgcgcccgggatccccacagccgccgccccgccggccctgggcctacagggtgctgcaggaggcgaccaactggcgggcggggcccctggccgaggtccgagctcgggagcaagagaaaaggaaagcggcgtcgcaggagcgggaggccaaggagaccgagcgaaaaaggcgcaaggctggtggggcccgacggagccccccgggtcgaccccgcccggagccccgcaacgcccctcgggtggcccagctggcagggctccctgctcccttgcggccggagcgcctggcgcctgtggggcgagcgccccgtccatccgcgcagccgcagagcgacccagggtcggcgtgggcggggccctggggaggtcggcggcccgggcccccaagctacgaggctcacctgctgctgagaggttctgccgggaccgccccacgacgccgctgggaccggccgccaccctacgtggctccaccttcttacgaaggcccccataggaccttggggactaagagaggccccgggaactctcaggtgcccacttcatcagccccagctgcgactccagccaggacagacggagggcgcacaaagaagaggctggatcctcggatctaccgggacgtcctcggggcttggggtctccgacaggggcaaggtctcttggggggatccccaggctgtggagcggccagagcaaggccagagcccggcaagggggtcgtggagaaaagcctggggctggctgctgctgacctgaacagtggtagcgacagccatccccaagccaaagctacagggagcgcaggcaccgagatagctcctgcggggtctgcaactgcggctccctgtgccccgcatcccgctcccagatccaggcaccacctcaagggctcgagggaagggaaagaaggagaacagatctggtttcccaaatgctggattccctcccctaaaaagcagccgccccgccatagccagacactccccagaccctgggctcccggaggcaccggatggagagaatctctgggtcttggagagggggcaggaccggagaccctggagggttggaaggcgacccgccgtgcccacaccttgccccgcagttcccagggcctgtcccgtggggaaaggcgtctttgtcattgacgccacgtgcgtagtgatacgatcccaatatgttccaaccccccgaacccagcaggtgcagcttttgccctctggggtgacacgcgtggtgggggattcccccagccaatcgaagcccggcaaggaggagggtgaaggggccacggtctttccttccccttgtcaaaagcggctgtcgagcagtcgccttttacaccagcccggcgggggccgcgggggcgaagctgagggcgggaggccgggggactccacactggaggagcgcactttccgcatcttggggctcccggcccccgaagtaaacctgcgggacgcccccacgcagccaggtagcccagagcaccaagccttaggcccagcagcttcgggagcccagggcagagccgaggggtcggaagtggcggtggtccagcggcgcgccggccggggctgggcgcggaccccagggccctacgccggggccctgcgagaagccgtgtcccgtatccgccgccacacagcccctgactcggacacggacgaagctgaggagctcagcgtccatagcggctcctctgatggaagcgacacagaagccccgggcgcctcctggcggaatgagaggaccctgcccgaggttggaaacagttcgccagaggaagatgggaagacagcggaactgagcgacagtgtcggggagatcctagatgtcataagccaaaccgaggaggtcctcttcggggtgagggacatcagagggacccaacagggaaataggaagaggcagtgagaggccccttcttgtatttgtgtccccaacgcatccatccttgggtccactggtccccattcttccccacagacttcctttgcttctcttttccttgtatctttacccatacctgttctcatccttgaaatataaatgaaaggaagggaagcatatgcccattaatgattttgtttcaggagaggtgagaatgagcagatttaattaatgtctgttatgttcagggcacaagggtgagctcttcgcaggggctgatgcactgggtgtggagctgagcagagaggcctaaccaggatcaggcaggagggcagggatggtggcagccataggagggcagggtagggtagggcctctgaggaggagggaaaaagtgaaggagaggctttggacctggtgacagagtgatcagatgacagaggggttcttgggagaagaggcataggtccagcaacaaccaacaaagcagaaggagggctcaccttggtgtcacaagtcttggatttcaatcccaactctgccactgagttgctggttgactgaggccagtcactttccctctccagggcctccaggcttcctgggtatataaaatgatggtattctaaggtccatccttccgtctcttgacatttttgagatctttgggaaaggactctatcttcatcctccccttcgacaagccaagaatgagaatttgggattaagtgaacagagtttgagggtttctgggcggcctccgtgtcacccaaagtcatgatcaattcaggagactgcccaaggcttgcagaagaggtaagggagtgaggcactcctattcccagtctcccagggtttggttgaggggctccccaaggcagggcaagatagcggccctgtcactgaccctggcctgtggtggtctgagctggggagggaaggacaccaatgaatcagcttgggacctctttaggccttccccttttcctccaccccgatgctccttagtgatgctctgaggcgtggccacgatctccctcccaggtggtattcgcccacctgaaaaaatcctgagaatttctttccatcttgggcctctttccagaaaccggccaggcaaggaaagaggccggtcaccagaagccagcaggcgttggggtgtgatactctctatagccactacagggcgcgcgcaggtcgggaatctcccccagttgctaaatcccggctctgccacttcaatccgatccctagttcccgagcgcgggttcccccgctttgcagttcttccagccgtgcggggccggggaaagaccgaccggcctcccagacttcctaaggacgcgccgggccccatctttgtactcatccacccccagcccgcttggggactcagacaccgaagtctttttttttttcctctccgatccttggacacctcctctgtctgcccatttattagcccatgtgaacttggccacatcacttcacctccctgagcctcagtttcctcatctgtcaaatgggggtttataaacacctacctcgcagggttgttgtgaggatttaatgcgataatgtatgtaaagcgccttgcacactgcctggcacacagtaggcgctcaataaatctaagcttccctttaaaaaaaa

SEQ ID NO: 154098 - DNA, 419 bp, Homo sapiens; identical to SEQ ID NO: 146789

SEQ ID NO: 154099 - DNA, 474 bp, Homo sapiens; identical to SEQ ID NO: 146790

SEQ ID NO: 154100 - DNA, 1293 bp, Homo sapiens
gcttggggtcttgcgtttcgccaccatctcctggggacagggtggagcgatatcgggaacgggggaggttgcggtgccctcagcggtacctctcaagagtgctatcatttccgtaggccagatcagaaaagggagctcaggtaccttgcagagagtgagacccagcgcccttgtctcgcacccagtaggctttcatccccgccatggcggagctgatccagaagaagctacagggagaagtggagaattatcaacagctacagaagggtaagggaacagggtcggtatggtctcgcccaatgcacttacaacccaaagccattaccgagataaggtttgttgccccatctgggccctcgcgtgcagagacttccccgcctcagtctcagtactcttgcctgtggactcacccgcggcccccatccttttctgcttcctcagatccatatccacctgactaggattgtggggataggtggcacatttgatgtttctaaattgcctttcctctcatccccagacttaagtaaatccatgtcggggaggcagaaacttgaagcacaactaacagaatataatatcgcgaaagaggtgagggactgggatttgtggggcgaggagggacctgtactagccatggttctgatcacatatgtcccatccctccatcaggaactggccctgctggatgggtccaacgtggtctttaaacttctgggtccggtgctagtcaaacaggagctgggggaggctcgggccacagtagggaagaggctggactatatcacagctgaaatgtgagtttttattccaccaccgtgtgctgcaccctgtgatgcaagtgaaccattggagtagaggtgttgaaccattgcagaacagctctccatagtggcccctagtcctccagttcctccaaccctttccttccctttttaaccccccttcttctccctcccctggatctcaaggttttccacctatctctttcttgcgtttagcactctccatagtgagtcctactaatttctccctttctgcttgtctcccttgtctctccttagtaagcgatacgaatcccagcttcgggatcttgagcggcagtcagagcaacagagggagacccttgctcagctgcagcaggagttccagcgggcccaggcagcaaaggcaggggctcctggcaaggcctgacctccatggtggggggaggggaggggaggggagggaatgaggcagctctaggatctatactgtagctaataaaatgtaaaaacacctggcaaaaaaaaa

SEQ ID NO: 154101 - DNA, 710 bp, Homo sapiens
tggaggaccgggtcgagccacgcgtccggcgtttcgcccaccatcttctggggacagggtggagtccatatccgggacgggggggaggtggcggtgcccctcagggctacctctcaagagtgctatcatttccgcaggccagatcagaaaagggagctcaggtaccttccagagagtgagacccagcgcccttgtctcgcacccagtaggctttcatccccgccatggcggagctgatccaagaaaaagctacagggagaagtggagaaatatcaacagctacagaaggacttaagtaaatccatgtcggggaggcagaaacttgaagcacaactaacagaaaataatatcgtgaaagaggaactggccctgcttggatggttccaacgtgggtctttaaactctctgggtccggtgctagtcaaacaggagctgggggaggctcgggccacagtagggaagaggctggactatatcacagctgaaattaagcgatacgaatcccagcttcgggatcttgagcggcagtcagagcaacagagggagacccttgctcagctgcagcaggagttccagcgggcccaggcagcaaaggcaggggctcctggcaaggcctgaccccatggtgggggcagcccaagggaggcgagggaatgaggcagctctaggatctatactgtagctaataaaatgtaaaaacacctgaaaaa

SEQ ID NO: 154102 - DNA, 717 bp, Homo sapiens; identical to SEQ ID NO: 137889

SEQ ID NO: 154103 - DNA, 900 bp, Homo sapiens
aggattggctgttagcggcgttgtagttaagctcgtgtaacggcggcggtgtcggcagctgctgtagcgaagagagtttggcgcgatggctttgactgctcaggttattacagtctcacgaccattttgctggtacagcctaccaagaggcccagaaggcagaacttatgctgactacgaatctggtaaatgaatgcatggaagggtgtttgtaaaatgtatgaagaacatctgaaaacgaatgaatccccaacggtccctccatccacataataccacaagtcagttgtttgatttcatcgatggatctggcagacctcagctgcctggtttaccgagcttgatacccagacatacccagccttataaccaaagactggattaaagacgaagatcctacggtgctcctttcgtcgggcaaggcccaacaggctcgggaaataattgtcgttggaagccactgggggggttggggtggggcttgggacacaggtgtgtaacagcgtgcctgttagtggaagttttgtattcatagtaaatccctgtttcccactttgttatactctagccaagattgactgtagttagatgaaatgtgaggttcttgttcaatcgggaaacccccgttacctcctcctttttctttcctcctttctattttttcttttttaccttaaacatcttttatgatgatttagatggaagttgttcttcgtcgacttaatgttggttccagtccttcaactgttcatatctactttataacattcacatactaacccttctggggttcaagatggggtggggggtggaaatgcagttttagccatgtcctcaagataaagtaattggtaaaaataaataaatggtcctttagttataaaaaaaaaaaaaaaaaaa

SEQ ID NO: 154104 - DNA, 927 bp, Homo sapiens
atgttgcagcaggatagtaatgatgacactaaagatgtttcactgtttgatgcggaagaggagacgactaatagaccaagaaaagtcaaaatcagacatccagtagcatcgtttttccacttattctttcgagtcagtgcaatcatcgtctgtcttctctgtgaattgctcagcagcagctttattacctgtatggtaacaattatcttgttgtcatgtgacttttgggcagtgaagaatatcacaggtagactaatggttggcctacgttggtggaatcacgttgatgaagatggaaagagccactgggtgtttgaatctagaaaggagtcctctcaagagaatgaaactgtgtcagaggctgaatcaggaatcttttggttgggacttgttgcctgtccagtgctgtgggtgatacttgccttcagtgcacgcttctccttcagagtaaaaagtggttggcggtggttatcgtgggtgtggtgctacaaggtgccaacctgtatggttacctcaggtgtaaggtacctagtgtcagaattgaatcattggacacccagttgggcatccagaattggagaattggttggtatgagggaaaagcccacacatctggtgtcagaagtgttggaaatagaaacagatcagaatgacacgcatccgtgtttgctccagctgaggctgcaacaaaggaggacgagagaacaactagtggaccagggcatcatgccacaaacatttgcagagccatccctgcaggctactcagatgaagttgaaaagagctcgactagcagatgatctgaatgaaaagattgctcaaagacctggtcctatggagctggtagagaaaaacatccttcctgtggactccagtgttaaagaagcaattataggcaagactctaaaaatttactatttggggtga

SEQ ID NO: 154105 - DNA, 774 bp, Homo sapiens
atggtcacagacacctttagccaccccatcgtgagtattccaggcccacgaactcataccggagaaaaaccctacaagtgtaaagaatgtggtgaagccttcagtcagagctcaactcttacaaaacatataaaggtctacactggagagaaaccctacacctgtaaagactgtaggaaagccttcagccagagttcatctcttacccagcatcagagggttcatactggaaagaaaccatttgattgtcaggagtgtgggaaagccttcagtagaagcgcccatgttacccaacatcagaggatccacactggagagaagccctgtgtatatacacatacgtatgtgtatgtatacatacagcagcagcctcagccttcagaggaagaatctaatgagtacaacctgtggactgcataccagaacgaggaaacgcagcaggtcctgatggaggagagaaatgttttctgtgggacctacaatgttcgcattctctctgacacgtgggatcaaaaccgagtcatccactattccgggggagatctgatagctgtgtcatctaatcgaaagatccatcttctggacatcatacaagtgaaagcgatacccgttgaattccgaggccatgctgggagtgtccgggccctcttcctgtgtgaggaggaaaactttctcctaagcgggagctatgacctaagtatcagcgcagcagcgtacgggtccgggtcggaactgacgcgacccgtcaccaagggccagcagggaccactgtaa

SEQ ID NO: 154106 - DNA, 2169 bp, Homo sapiens
atgcctttccctttcgctcctgctccaggctccgcctccgccgtgtccgggctgctcgccccgcccccgctcgccccgcccccgctcgccccgcccccgctcgccccgcccccgctcgccccgcccccgctcgccccgcccccgctcgccccgcccccgctcgccccgcccctggatttgctccctcaaagcggaggtgaggccggactgaggctcttacagtggtccctgctggcccttggtgacgggtcgcgtcagttccgacccggacccgtacgctgctgcgctgacgtggctcctggaagcagggctggcgtagggccgccatgttgcagcaggatagtaatgatgacactgaagatgtttcactgtttgatgcggaagaggagacgactaatagaccaagaaaagccaaattcagcattccagtaagcatcgtttttccacttattctttcgagtcagtgcaatcatcgtctgtcttctctgtgagttgctcagcagcagctttattacctgtatggttacaattatcttgttgttggtcgtgttgacttttgggcagtgaagaaagtgccaaggatacctattgggttggcctacgttggtggaatcacattgatgaagatggaaagagccattgggtgtttgaatctagaaaggagtcctcttcaagagaataaaactgtgtccagagggctgaattcaagaatctttttggttgggacttattgcctgtccagtactgtgggtgatatttgcctttagtgcactcttctccttccagagtaaagtgggttggcgggtgggttatcatgggtgtggtgctacaaaggtgccaacctgtattggttacatcaggtgtaaggtgcgcagcagaaagcatttaaccagcatggctaccttcatacttttggaaagcagctttttaagacaaaacacgtggagatgatcagacttcctgaatagagaaagcttatgtgctttgttacattgcgggaacaactgaagagattcttgactcaaccttttagagcttagtccatgttgcaacgaggagtgttggctttgtttttccacttaaaaactttatttataaaaaggaaaagtagttttcatattaagtttttatttcctttccagcagttggggctagaaagtatgtgttggcactaggaaacattgtcaagatttgttcctgtggtgtagggtatgcacattccataggtatgcacacggccatgtaatatcagtatatcccaagtctaatgaaagtgttcatttacataggcaattggagacctttgcattttgatccataggaacatagggagggatgttcttaggtctgtcttcaaagctctattatgttttacatattatttctgtaggattgttttcaggagaaagttttgcttctatgggtaaggagtgaggcactttgggcttatgtattaagttaggaaataattgttagtttttaatatgcacttcgtggggaaatttcttagacgtatgccagccaagtggaaaccaattagggcccagtggtattaacctactttataaaattttatttttgtttgtaagaagtcatctatttaaggccccagttaatataagtggaatcatcatagtttaaggaatacccagagattgctgctgttctatttattttacagaaaggatagctgagattgaaagcctctccagtggacccttgagcctaatggaatccttttacccactaaaagagcattattctcatgtccataatgagaataataatttacatacttgggcataataaatgccctaaaaagaccattttattttctgaatctatttttttcctgcctataaagggggatattgtaaattatgccatttgtattaatggtatttcttaaagcaatctatgtaactgtaaattaaaccgaatctacaaactattgtagggcatctgtaaattctgttgtaggtattataaactttgttgaagtcttaatcagcagattatgttgtgaatatatttgtacattgttaaaatagtttttaagattatttgttttaattgaataagtgtcttattggagtgatagctttgaaggtgcaaaactttatatttgtataaaattctactatttccaaggcaaaaaaaaaaaaaaaa

SEQ ID NO: 154107 - DNA, 389 bp, Homo sapiens
  misc_feature (1)...(389): n = a,t,c or g
aaaaataaggacaacgtgaagtttaaagttcgatgcagcagatacctttacaccctggtcatcactgacaaagagaaggcagagaaactgaagcagtccctgccccccggtttggcagtgaaggaactgaaatgaaccagacacactgattggaactgtattatattaaaatactaaaaatcctaagtgtctttcgtctttgcggatgggaaagggaaaaatgctacctcgtagtggcttctgatgggaacaggacgcgggttctgttgctgccttcctgggncannnnnnnnnnnnnnnnnnnnnnnnnaaaacggagctttgttttggggttaatctggaacccaaggggggcaatataagttaattaccccctccgcctcgggggt

SEQ ID NO: 154108 - DNA, 648 bp, Homo sapiens
  misc_feature (1)...(648): n = a,t,c or g
gggtgagaaaggtaatctggggcaatccactgccaggtgaaatctggggaccccaggtccgcgtggagggtgtcggggaggagaaggggagtgcgatggggccgatatttcgggggagagcgggaaaacggggttcgctgccagcccccgcgccgtgttaacgccgaggactgtttcccgcaggtcctggtccgcgccaagagcccagccgcgcctcgtcgcccatgccttcggaaagattgaggaacatcaaggaccttcctgctcacagtcccgacgaaaggatgccaaatctagtcaagatcaagaaaaataaggacaacgtcgaagtttaaagttccgatgcagcagatacctattacacccgtggtcatcacctgacaaagagaaggcagagaaactgtaagcagtccctgcccccccggtttggcaagtgaaggaacctgaaatgaaccacgacacacctgattggaacctgtattatacttaaaatacctaaaaatcctaagtgtctttcgtctttgcggatgggaaagggaaaaatgctacctcgtagtggcttctgatgggaacaggacgcgggttctgttgctgccttcctgtgtctttnnnnnnnnnnnnnnnnnctttttttaaaacgggtcttgt

SEQ ID NO: 154109 - DNA, 229 bp, Homo sapiens
gccatgtaattggaagtggaatatctctgctctcaattgataattaggaatcttcttagatcagccttacaggtgaagaattgtggcacctgctcaggagcacatcactcggcattgcctcccctccaatgcatgaggtcccatttcttgaggttgatggagacaggactaaaacccaggtcttccctttaaccaacctccgacgtgcgtgttaaccgcggtgacagca

SEQ ID NO: 154110 - DNA, 794 bp, Homo sapiens
acaatggctatggaatgaaagatgcagagaaacactgctttaaagagtatgtagagagttacagagtttagggatgcagtagcgtgaacacttctgagtttaccaggatttaacctcatggccccatcttaaaatcttgcggggctgcaaacctggagtaaaatctgttcaggggaagctcaatatgcttttcttacaagttcattgggtgatatgtctggagttttccctttttgcaactgacttggatttgtcggaatttcttcccagcacctacaggctgaactaaacccagtatccagtacatttctgggctgataaatggacatcattttgggaaggcatttgttgcttttttgcttgtttttgccttgcttttggttttgggatatgcgtgcaactccctggtatggacgttgtctagacctgttgtaggaggaaaaaaagttctttctctttatttcttcccttgtagagccaacacttagatctttatgtttctgaaatgtagttgagtgtctttttaaagatgctcttcctcaattatcagcagatcgttttttggctagcagcattctcttaggagaccttggggtggaggaggtctcacttttctgtcagcaatcttacaggtgaagaattgtggcacctgctcaggagcacatcgctcggcattgcctcccctccaatccatgaggtcccatttcttgaggttgatggagacaggactaaaacccaggtcttccctttaaccaacctccacgtgcgtgcccacgcgtccgcccacgcgtccg

SEQ ID NO: 154111 - DNA, 2712 bp, Homo sapiens
cgccagaaagtagagaggtatttagcactctgccagggccaacgtagtaagaaatttccagagaaaatgcttacccaggcaagcctgtgtaaaacaccaaggggaagcaaactccagttaattctgggctgggttggtgactaaggttgaggttgatctgaggttgagaccttcctctttggatcaccagctttcagctcagggcctgccaatgagtttaaatgatagttaacaggtcctggaggggaatcagctgcccagatcaaagatgggattcaggtggcagatggacccgaagaggacatggagagaaagaggaagaggaagctcctacagacacctgggtttccactcattctcattccctaagctaacaggcataagccagctggcaatgcacggtcccatttgttctcactgccacggaaagcatgtttatagtcttccatgtttatagtcttccagcagcaacgccaggtgtctaggcacagatgaacccctccttaggatccccactgctcatcatagtgcctacctttgttaaagtactagtcacgcaggttcacaaggaatgtttacttttccaaatccccagctagaggccagggtgggtcatctatttctatatagcctgcacccagattgtaggacagagggcatgctcggtaaatatgtgttcattaactgagattaaccttccctgagttttctcacaccaaggtgaggaccatgtccctgtttccatcactccctctccttctcctgagtatggtggcagcgtcttactcagaaactgtgacctgtgaggatgcccaaaagacctgccctgcagtgattgcctgtagctctccaggcatcaacggcttcccaggcaaagatgggcgtgatggcaccaagggagaaaagggggaaccaggccaagggctcagaggcttacagggcccccctggaaagttggggcctccaggaaatccagggccttctgggtcaccaggaccaaagggccaaaaaggagaccctggaaaaagtccggatggtgatagtagcccaggctgcctcagaaagaaaagctctgcaaacagaaatggcacgtatcaaaaagtggctgaccttctctctgggcaaacaagttgggaacaagttcttcctgaccaatggtgaaataatgacctttgaaaaagtgaaggccttgtgtgtcaagttccaggcctctgtggccacccccaggaatggctgcagagaatggagccattcagaatctcatcaaggaggaagccttcctgggcatgcctgatgagaagacagaagggcagtttgtggatctgacaggaaatagactgaccctacacaaactggaacgagggtgaaccccaacaatgctggttcctgatgaagattgtgtattgcctactgaaaaatgggccagtggaatgactccccttgcttccacctcccatctggccgtctgtgagttccctatctgaagggtcatatcactcaggccctccttgtctttttactgcaacccacaggcccacagtatgcttgaaaagataaattatatcaatttcctcatatccagtattgttccttttgtgggcaatcactaaaaatgatcactaacagcaccaacaaagcaataatagtagtagtagtagttagcagcagcagtagtagtcatgctaattatataatatttttaatatatactatgaggccctatcttttgcatcctacaattaattatctagtttaattaatctgtaatgctttcgatagtgttaacttgctgcagtatgaaaataagacggatttatttttccatttacaacaaacacctgtgctctgttgagccttcctttctgtttgggtagagggctcccctaatgacatcaccacagtttaataccacagctttttaccaagtttcaggtattaagaaaatctatttttgtaactttctctatgaactctgttttctttctaatgagatattaaaccatgtaaagaacataaataacaaatctcaagcaaacagcttcacaaattctcacacacatacatacctatatactcactttctagattaagatatgggacatttttgactccctagaagccccgttataactcctcctagtactaactcctaggaaaatactattctgacctccatgactgcacagtaatttcgtctgtttataaacattgtatagttggaatcatattgtgtgtaatgttgtatgtcttgcttactcagaattaagtctgtgagattcattcatgtcatgtgtacaaaagtttcatccttttcattgccatgtagggttcccttatattaatattcctcagtggcatccattctattgttaataggcacttaagtggcttccaatttttggccatgagggaagagaacccacggaacattcctggggacttgtcttttgggtgggacatgggtgcactaaatttccactacctatccaggagtggaactggtagaggatgaggaaagcatgtattcagctttagtagatattaccagttttcctaagtgattgtatgaatttatgctcctaccggcaatgtgtggcagtcctagatgctctatgtgcttgtaaaaagtcaatgttttcagttctcttgattttcattattcctgtggatgtaaagtgatatttccccatggttttaatctgtatttcccca

SEQ ID NO: 154112 - DNA, 949 bp, Homo sapiens
cttgtgacatggggctgtcctgggccaagacaggctgatcaactatgccaccaatggtgccaagttcctgaagcggcacatgtttgatgtggccagtggccgcctgatgcggacctgctacaccggccctggggggactgtggagcacaggttgggggctgggtagacacgtagggcccgtctccccaacgcgtccccagcctacctctggcctacttctcccgctccatgtggactccagtcctggctctgcagggtgcttgctgtgagtttgtagattccgtgggcccatttactcatctgggaagtgggctgatggcacctgcctaagagggttcatctggagggttaagtgaacaaatgcgtgaaagggcctcctctgggaaaggccctctctcctgaggctctccccagcccctcccctaatgcctgtcccccagcaacccaccctgctggggcttcctggaggactacgccttcgtggtgcggggcctgctggacctgtatgaggcctcacaggagagtgcgtggctcgagtgggctctgcggctgcaggacacacaggacaggctcttttgggactcccagggtggcggctacttctgcagtgaggctgagctgggggctggcctgcccctgcgtctgaaggacgaccaggatggagcagagcccagcgccaattccgtcagcccacaacctgctcaagtgcccatcactgatccctgtgaattacgaaaactactacatccatgactgccccaacccccttgggatggggcagaaggtgaagcatcccaactgactagagactcaggccatgcagggccctatagaacctgtggccatccctgagcaccctgccaccaggtgacctcggccatactcactgccccccttgggcacccactcaccctagaataaacttaacagtgtcacataaaaaaaaaaa

SEQ ID NO: 154113 - DNA, 558 bp, Homo sapiens
  misc_feature (1)...(558): n = a,t,c or g
aaattaagagcccactaggccagcgcggnggaattcgtccctcactctgagaagatgctctatgaccaggcacagctcgctgtggcctatttgtatgccttccagctctctggtgatgaattctactctgacgtggccaaaggcatcctgcagtacgtggctcggagcctgagccaccggtccggaggcttctatagcgcagaagatgcagactcgcccccagagcggggccagcggcccaaagagggcgcctactatgtgtggacggtcaaagaggttcagcagctcctcccggagcctgtgttgggtgccaccgagccgctgacctcaggccagctcctcatgaagcactactgcctcacagaggctggtaacatcagccccagtcaggaccccaagggggagacttgcagggccagaatgttgcttgaccgtccggtacttcgctgggagctgactgctgcccgttttggtttggatgttggaaggccgtgcggaccttgctcaatacagggctggagaagctcttccaggcccggaagcatcggcccaagccgc

SEQ ID NO: 154114 - DNA, 575 bp, Homo sapiens
acaagtgtgtgtgcctattgaccgccttttccgagcgcatgcgtcgtgtcccggtggcgttgcccgagatggtccgcgccctctcagcccagcagcagaccctcaagcagatcgtgatctgtggagaccgtcaggccaaagaacaccaaaggccctggtgcagtgcgtccactctgtctacattcctaacaaggtgctgattctggctgatggggacccctcgagcttcctgtcccgccagctgcctttcctgagtaccctccgacggttggaagaccaggccactgcatatgtgtgtgagaatcaagcctgctcagtgcccatcactgatccctgcgaattacgaaaactactacatccattgacatgcccataccccttggggtggggcagaaggtgaagcatcccaactgactagagactcaggccctgcagggccctatagaacctgtggccatccctgagcaccctgccaccaggtgacctcggccatactcaactgcccctccttgggcacccactcaccctagaataaacttaacaggtgtcccgtggtaaaaaaaaaaaaaaaaaaa

SEQ ID NO: 154115 - DNA, 3612 bp, Homo sapiens
aaacgtagcagccatgctgggcgcgcgggcctggttggtccgtgttcttctgctgccccgcgccggtgcaggcctcgccgcgagccgcaggggtagctcctcccgggacaaggaccgaagtgcgacggtcagtagttcagtgcccatgcctgctggagggaaaggaagccatccttcatctacaccccagagggtccccaaccgcctgatccacgagaagtcaccatacctcctacaacatgcctacaatcctgtggactggtacccctggggacaggaagccttcgacaaggccaggaaggaaaacaagccgattttcctctcagtcgggtactccacctgccactggtgccacatgatggaagaggagtccttccagaatgaggagattggccgcctgctcagtgaggactttgtgagtgtgaaggtagaccgtgaggagcggcctgacgtggacaaggtgtacatgacgttcgtgcaggccaccagcagcggcgggggctggcccatgaatgtgtggctgactcccaaccttccagccctgtgtcgggggcacctatttccctcctgaggatggcttgacccgagtcggcttccgcacagtgttgctgagaatacgagaacagtggaaacagaacaagaacaccctgctagaaaatagccagcgtgtcaccactgccctgctggcccgatcagagatcagcgtgggtgaccgccagctgccgccctctgccgccaccgtgaacaatcgctgcttccagcagctggatgagggctatgatgaggaatacggtggcttcgctgaggcccccaagtttcccacgccggtgatcctgagcttcctgttctcctactggctcagccatcgactgactcaggatggctctcgggcccagcagatggccttgcataccctgaaaatgatggctaacgggggcatccgggaccatgtggggcagggctttcaccgctactccacagaccgccagtggcacgtccctcactttgagaagatgctctatgaccaggcacagctcgctgtggcctattcgcaggccttccagctctctggtgatgaattctactctgacgtggccaaaggcatcctgcagtacgtggctcggagcctgagccaccggtccggaggcttctatagcgcagaagatgcagactcgcccccagagcggggccagcggcccaaagagggcgcctactatgtgtggacggtcaaagaggttcagcagctcctcccggagcctgtgttgggtgccaccgagccgctgacctcaggccagctcctcatgaagcactacggcctcacagaggctggtaacatcagccccagtcaggcgtgtgagctcgcagacaaaggccattctcctcaggaccccaagggggagctgcagggccagaatgtgctgaccgtccggtactcgctggagctgactgctgcccgctttggcttggatgtggaggccgtgcggaccttgctcaattcagggctggagaagctcttccaggcccggaagcatcggcccaagccgcacctggacagcaagatgctggctgcctggaatggcttgatggtgtcaggctatgctgtgactggggctgtcctggggccaagacaggctgatcaactatgccaccaatggtgccaagttcctgaagcggcacatgtttgatgtggccagtggccgccttgatgcggacctgctacaccggccctggggggactgtggagcacagcaaccccaccctgctggggcttcctggaggactacgccttcgtggtgcggggcctgctggacctgtatgaggcctcacaggagagtgcgtggctcgagtgggctctgcggctgcaggacacacaggacaggctcttttgggactcccagggtggcggctacttctgcagtgaggctgagctggggggctggcctgcccctgcgtctgaaggacgcccaggatgaagcagagcccagcgccaattccgtgtcagcccacaacctgctccggctgcatggcttcacgggccacaaggactggatggacaagtgtgtgtgcctattgaccgccttttccgagcgcatgcgtcgtgtcccggtggcgttgcccgagatggtccgcgccctctcagcccagcagcagaccctcaagcagatcgtgatctgtggagaccgtcaggccaaggacaccaaggccctgggtgcagtgcgtccactctgtctacattcctaacaaggtgctgattctggctgatgggggacccctcgagcttcctgttcccgccagctgcctttccttgagttaccctccgacggttgggaaggaccaggccactgcatatgtgtcccctcctggggatccgggctctgcggtccagcgcgacctgcctggggccacgtgttcaagcacgaagcccctgcgtggagtccacgcccttcaaaaggtccctaggggcaaagggatgaagcccaggagcgtcaatgcccgcccagagctgagctccgtcctccggctgctgcccaaatcaggggtcgtggacaaaggatgcctggggcctgcggccctacgccaggaccccgcgccgaatactctgattcttcgggctccctccaagggagtcccaaagaccccaatggccaataggaaagttgcttatggaaccacagagaacagtcccgtgacattcgcgccacttccctggaggacactgtggagcagaaggcagaaagcgtgggcagaattatgcctcacacggaggcgcggatcatgaacatggaggcagggacgctggcaaagctgaacacgccctggggagctgtgcatgacgagggtactgacgtcatgctgggctactggggtgagcctcagaagacagaggaagcagtggatcaggacaagtggtattggacaggagatgtcgccacaatgaatgagcagggcttctgcaagatctgtgggccgctctaaggatatgatcatcccggggtggttgagaacatcttaccccgcagagcttcgaggacttcttttcacacacacccccgaaggtgccaggaagtgcatgtgtgtgggagtgaaggacgatcggatgggggaagagatttgtgcctgcattcggctgaaggacggggaggagaccacggtgggaggagataaatagctttctgcaaagggaagatctcttcactttcaagattcccgaagttacattcgtgtttgttcacaaactaccccccttcaccattttcagggaaagatccagaaattcaaacttcgagagcagatggaacgacatctaaatctgtgaataaagcaagcaggcctgtccctggccgggttggctttgactctctcctgtcagaatgcaacctgggctttatgcaccttagatgtccccagcaacccagtttctgagccaaggcacatcaaatgtcaaggaattgactgaacgaactaagagctcctggatgggtccgggaactcgcctgggcacaaggtgccaaaacggcaggcagcctgcccaggccctccctcctgtccatcccccacattcccctgtctgtccttgtgatttggacataaagagcttctgttttctttggc

SEQ ID NO: 154116 - DNA, 418 bp, Homo sapiens
atgaaacacattttactgggaacgaagttggttttttcaagcccatatcttgccgaaatgtaaatggctattcctacaaagtggcagtcgcattgtctctttttcttggatggttgggagcagatcgattttaccttggataccctgctttggattgttggaccttcagatggaagtagttacattatagattactatggaaccagacttacaagactgagtattactaatgaaacatttagaaaaacgcaattatatccataaatattttttaaaagaaacagatttgagcctccttgattttaatagagaacttctagtgtatggatttaaagatttctctttttcattcatataccattttatgagttctgtataattttttgtggtttttgttttgttgagttaaagtatatta

SEQ ID NO: 154117 - DNA, 341 bp, Homo sapiens; identical to SEQ ID NO: 123992
  misc_feature (1)...(341): n = a,t,c or g

SEQ ID NO: 154118 - DNA, 415 bp, Homo sapiens; identical to SEQ ID NO: 123999
  misc_feature (1)...(415): n = a,t,c or g

SEQ ID NO: 154119 - DNA, 502 bp, Homo sapiens
  misc_feature (1)...(502): n = a,t,c or g
caaatattattggtaggngntnntnntnnntccccactttttcaaccagcaagggtatggaggttnnnnnnnnnnnnnnnnnnnnnnnnnnnnnnnnnnnnnnnnnnnnnnnnnnnnnnnnnnnnnnnnnnnnnnnnnnnnnnnnnnnnnnnnnnnnnnnnnnnnnnnnnnnnnnnnnnncaggtaggttattattcggccccctataaggaaaaaactatttcgttgcctgcccgggtaaacttgggcccccccaaggatcctttaaaacgggcgccccnnnnnnnnnnnnnnnnncaaaattacaaaaggaaatttatttcaaaagcataaggggacatttacatttaaacaagatgataaacaggtgtcttgcaaaagaaaaaaatccatggcattaagtttttcattcaaattcggaagcaaaaataacctaagttgtgcactattgccttaggaaagggaaggggaagggtgagggataagggaacagtcaactcag

SEQ ID NO: 154120 - DNA, 764 bp, Homo sapiens
aatgaaacacattttactgggaacgaagttggttttttcaagcccatatcttgccgaaatgtaaatggctattcctacaaagtggcagtcgcattgtctctttttcttggatggttgggagcagatcgattttaccttggataccctgctttgggtttgttaaagttttgcactgtagggttttgtggaattgggagcctaattgatttcattcttatttcaatgcagattgttggaccttcagatggaaggtaggttacattatagattactatggaacccaggacttaccaggactggggtattactaatggaaaccatttaggaaaaacggcaattatatcccataaataattttttaaaaggaaccagatttggagcctccttggattttaataggagaacttcctagtgtatggatttaaagatttctctttttcattcatataccattttatgagttctgtataatcttttgtggtttttgtcttgttgagttaaagtatattattgtgagatttatttaataggacttcctttgaaagctgtataatagtgtttctcgggcttctgtctctatgagagatagcttattactctgatactctttaatcttttacaaacggcaagttgccacttgtcgatttttgtttctgaaaaataaaagtataacttaattcacaaaaaattatacagaactcgtaaaatggtatatgaatgaaaaagagaaatctttaaatccatacactagaagttctctatta

SEQ ID NO: 154121 - DNA, 1441 bp, Homo sapiens
  misc_feature (1)...(1441): n = a,t,c or g
aaaattttcattaatcaaactccgtaaagaaaactttccaacagcaaggatatgcaggttggtttaccccctataccctttaaaaatttttattttccctaaagccttaaatttctgtagggaggttgggccaatttgtcccccccccaaaaaaagggtccttccccaaaattcccaaggtggcttttaatcggccccccttaaggaaaaaaataataccttcccagcccgcgttaaattggggccccccaagggtcccttaaaacggccccccccnnnnnnnnnnnnnnngtgaataagttatacttttatttttcagaaacaaaaatgacaagtggcaacttgcctgttgtaaaagattaaagagtatcagagtaataagctatctctcatagagacagaagcccgagaaacactattatacagctttcaaaggaagtcctattaaataaatctcacaataatatactttaactcaacaaaacaaaaaccacaaaaaattatacagaactcataaaatggtatatgaatgaaaaagagaaatctttaaatccatacactagaagttctctattaaaatcaaggaggctcaaatccctaaaacaggaaagaaggaataccgttaaaacacaatattttttaagagtcccaatggagggttattggcagatggtacattttaaccatttccatttgcctccatggtatttttttctcattcttggagcacttctggtataatggtagagagattacatgaatgataatgccagatactggccttctcaatgggcctttcaggttttaagtttcaaatctgaatctggaatcccacctaaatgtttacataataggctaccaagaatgagattcctcttaaaattacatttgcttaatttttacacactatggtttagaaacaatctacttttgaaagagacacaatttacagtatgaataataaaagttacatgaaactacacaatccttctcataaaataggagaaacaatttccaaaacaaaaatgcctaatacaaaatgatacagttgactggagctggggtaggatgggaggaagagaacaaccatgtgacagaatgtatggaagacctagattctagtttcagttttgcactaattagttgcgtatcttactctcaacttccttaggtcttgatttttttcctggtaagaagaggtagatggatctctaagctttattctaattttaaggctcaatgacttacagtttataagatttggaaaaccttttggacaatcagttgaataaattccttacatcttgagggtgtgtcactgttcaatcccatgacaataactacaaggcatatccataattttactgttagaaaagaaaaaaatccacctaaagggcaaaagtatacttcatatcctgtttctgttctacaagacagaaag

SEQ ID NO: 154122 - DNA, 1557 bp, Homo sapiens
tcagtcatctttgtcttttactccatgtttcaggatgcttgtgaactcgatgtaattgaaatttccctttttgtcaataggtgcttctctgtgcagctcatccacttcctcatctgtaaactgatcccccatggttgtcatcagctctctcaggtaatcttcctgaatggtgcctgttgcttcttcatcaaagcaagcagaagcatttctgatgacatcttcaggatctgtgccatttaacttctcaccaaacatagtgaaattaatgggccctggtgcctcattcatcgtggcatcaaggtatgcatcagtgggattcttccccaaaaagaaaggatgaacaacatctgctgtatctttttctagtttcaggagttcaatttccaggtttttctggtagatttcagcttgaatatttgtgatctgctgtagtctggtgaagttcacaaaacaagaaactgttttcttagacatgtttaacatctcctgcggagccttacggcagctgagcggtgggaggcgagtccggggctccctgatcttccgtaggctcccagaggcgcctggcctccgcagagctgcaaaggcggcagggcttggtggtcgggctgtgtgttcttccgattcttccttgtcgctcttgggtcgggccccaggagccagggatcggcgggagttgagagctggggcaggagccccagccgggaggccgaccgggtggactgggcggtgacagcagcgcttccttcccgcagggacctgagccgcggcgctaggatgggaaacagtgcgctccgcgctcatgtggaaacggcgcagaaaactggtgtctttcagcttaaggaccgagggctgaccgaggtgagacttgtctgtgattcgttttatttgtggattttgagcatcaatctcattgcctatgttcagggccatgtcttttagatttcccaggatactgcccacttgagtcaggttctcttccatttcatcttctctggcatcattagttatgcgtttaatgtatccaccactggctgctcccgttgttggttgctgaagctgaccatttgtcaccgggcctggctgtttagatactacattgcaaggtgagttttctccaccatctccccatgttgtcttataagccttgccagactcaaagttctttgttctattacatgggcagacacaaaggccacagcatttgttgagttctgttaaagtcttctctgtctctctcatgtccttatttatttggtccaagccttcttctatgcggtttagttgttccttttgttcatccagcatagtgatggtcttgattcctgcatcctgagaggtcaatgacacagataaactctggttcttattacagatttgaccccaggaatctggcaatgtctggagttgcttgattgtcacaacttgggccaggtgatggggctggttaatggcatttttaagttcagcattctctttggcttgatagaagtctacgtccatggtaaccaatgcatccgcagcaagaggaaacttctgtttatagcaggatagcat

SEQ ID NO: 154123 - DNA, 1817 bp, Homo sapiens
  misc_feature (1)...(1817): n = a,t,c or g
ttgtggggaattcccgggtcgacgatttcgtgctactgcgggtcctgggtcttcacctgcggagccttacggcagctgagcggtgggagggacctgagccgcggcgctaggatgggaaacagtgcgctccgcgctcatgtggaaacggcgcanaaaactggtgtctttcagcttaaggaccgagggctgaccgaggtgagactgggagggacacgaccagggaacttaaagggagagggacggcgggggcggcgaacttagtcggtgcgggattccccacgctgtgaactcctttctccagttccccgcagacttgcagaagctgacgagcaatctcaggaccatcgacttgtccaacaacaagatcgaaagcctaccgcctttgctgataggaaagttcactctgctgaagagcctctccctgaacaacaacaaactgactgttctgcctgatgagatatgcaatctgaaaaaacttagagacgctaagcctaaacaacaatcaccttagagagctgccgtctacctttgggcaactctctgccctcaagaccctgagcctctctgggaaccaactgggagcattacctccccaactttgtagcctacggaacctggatgtgaaggatctctctaagaacctagattcgaaggtatacctgactcagtgggagagctgcaagtcatcgatctcaacctcaaccagagtcagatatctcagatctcaggggaatttacaaattcttgctggccccgccttaaaattctttgcctgggaaaagaattgtcttgagctcagcatgcttccccagagcatcctcagtgattcccagatctgtctgcttgctgtggaaggcaatctttttgaaataaagaaacttcgagaactggaaggctatgataagtacatggagaggttcacagccaccaagaagaagtttgcgtgaagttctccaggactatggaaaccttacaggatactgacttagaacctctgttggaatgtggctgagtcaaagcctcctgttgttgttaggggtatctacagtaaggagatgatacttcaggagattatatttcactcaatgatcttttctcatttcagggctcttctcaaataagctaaaagaaaaaggatcaggagacaggaaaagtcttccgttttgagtcatgagtagggcaatagacaaggttctcttcaaaaccatcattagtttggctttaagaaaccagtagctagctgctatttatatggtgagggggtgctgcctggtaacagaatagctccacaccacagctggagattttgtttagtttcactgtgtgagctttcataaagtctgttgccattccatctctgtgttaacacttcatatttttatgaaattcagataatttgtgagaggctggcatggatctaaggatttattatttttattctaggccatcagttcagtcgcagtttttatactaggactttaggatgtacataaatgtgtgactgtttgtcttgattaaaagtgcactttggcctgggcatggtggctcatgcctataatcccagcactttgggaggccaaggcgggtggctcacttgaggctaggagttcaagactagcgtggccaacgtgaggaaaccctgtctctactaaaaatacaaaaattagctgggtgtgttggtgcatgcttataatcccagctacttgggaggctgaggcaggagaatcgcttgaacccaggaggtggaggttgcagtgagccgagattatgccactgtactccagcgtgggtgacagagtgagactctgtctcaaatt

SEQ ID NO: 154124 - DNA, 577 bp, Homo sapiens
cggacgcgtggggtcggattcatgtcaacgacaacaacagggggacacaaaaaggcggcggcttagctcctacccctggcggcggaggcagcggtggcggaggcgacggcacctcctccaggcggaagccgcagtttctcaggcagcggcagcgcccccggcaggcgcggaggcggtggcgcgcaaccagatttgcctgaagacctggataatctccatttttgtcatggactgttaaaacgtttgaagttccaattctggtcttgatttcccagttaaagatgttcttcacccggaatgcagtctttcctgttggtaaaataagacaacccatcaacattgcctgtttgtctgcttttgaatctcttaaggatggatgtttgtaagatgttgcttaataccagcctggaaatccccgtgcccatgtgtggatttgaaaatgacgttcaaatgtgcaagttctgttaaatacaaagagaacctctatgggtaacttttgtgttgaagaagtcatttgtcaaccatggtaaaacttgcaaacccactttatacagagtggattcttgaagctatacag

SEQ ID NO: 154125 - DNA, 1745 bp, Homo sapiens
tcaggttttaaatacttacagctttattaggagaaggctgtggtcacctcagcagccagctcccttgtatacacagtatacacagcccagccagcacccaggtccttccatcctttctgcagtacatggagtgcaaaagaaccaaacacaacggctggggagggagggtctaccaatgagtgtcagtgtcttagtgctttccgggagccaactgcccaggcttagggacactcaaatcccctcaaaactgtccatccagctccctgcccagacccccactcccagcatgtcgaggttcatatgagagtgtttgggccagactcctccaatcagtgcacgcgattgggcagaggaggctaagggaatcctggagcccaaagctgtattgggtccatccccctcaagaagttgttggagctttcagaacgttcctcttccttgtgtagacatgagataccgctgtaactttactccatcaccagaaacctgtgccttgagtctagtctctgctcagccctcgagagcatggttggattaaggaaatagtcaaaggcaagcaagacaaactccctaggttgtcttggtcatgcgtcttttaaaaagggaaagaagaaaagccacctcaacagataaaagcaccgaggcctggcttgtgtcaggagccagagaggttgtccttccttgaaatggtttgtaaagtgactgatggcaaaagctgctctcctctactggaggccagcctcctaccgatggcacctctgttgccacccacccaatccccctgccctcccgccacagaccccatgccgccctctcatacaagaaaaagggagtgcaccaagcacagggcgcagtgctgtcgtcagctatcaaggatctgcttctgcctggtaccctggtcctttttgtccctttagccccacagtggtcactggcacagaggggttcctgttcacttagttcttcaggggtgactgcagccctgcctcagagactggcaccccctctgcccccgcatgaactctgtccaaggtttccagcccagcgttagaccggatgagaacatcatcgcagaggcttggctggctggctggctggcttgtggattctgactattagggaaacccacataaaagaacggaactcttctctcccaggaagacacatgctttgatcttagctccagaaaattctccactgaggacctggattcatcacctacactcagaagcagaatatcccatgtacacagtggggcatctgaaccttcaagaaacaccctgcttagccaaagaagctgtgaccccaaaatatctccccacttggagctagagaaaatgcctgtttctattttcctgacatgtctataagacagacaggtctccagcagttcatactagtggctgccaggccccctgggtcagtcattgattcttggtgcctcctgaaacctactcccaaggagtctgaagaggccctgtcttcggctttggagccccaacagggggctgggctgtggggagcaggaagccacgcaccacaccctcatttctgtggctggacagctcgctctccaaagactgagtgtggtggaaggaccaggtcaccactgtcctaggggagggatacggctgggttcccagaggcgcataatctgaggtagcaaacagtggagaagctaaggcctaggatgcaccgtgacgtgcccagggcagacagcagtagtcggtcgcgtgggtagttcc

SEQ ID NO: 154126 - DNA, 1245 bp, Homo sapiens
ctttgcagataaatatggcacactagccccacgttttctgagacattcctcaattgcttagacatattctgagcctacagcagaggaacctccagtctcagcaccatgaatcaaactgccattctgatttgctgccttatctttctgactctaagtggcattcaaggagtacctctctctagaactgtacgctgtacctgcatcagcattagtaatcaacctgttaatccaaggtctttagaaaaacttgaaattattcctgcaagccaatttttgtccacgtggttgagatcattgctacaatgaaaaagaagggtgagaagagatgtctgaatccagaatcgaaggccatcaagaatttactgaaagcagttagcaaggaaaggtctaaaagatctccttaaaaccagaggggagcaaaatcgatgcagtgcttccaaggatggaccacacagaggctgcctctcccatcacttccctacatggagtatatgtcaagccataattgttcttagtttgcagttacactaaaaggtgaccaatcatggtcaccaaatcagcctgctactactcctgtaggaaggttaatgttcatcatcctaagctattcagtaataactctaccctggcacctataatgtaagctctactggagggtgctatggttcttagtggatggttctgacccctgcttcaaatatttcccctcacctttcccatcttccaagggtactaaggaatctttctgctttggggtttatcagaattctcagaatctcaaataactataaggtatgcaatcaaatctggttttttaaagaatgctccttaccttcaggggactccaagtcccatcttcccaaggggcccaaatttcttcaagtgcctccttccatacaattccaaacacatacaggaaggtagaaatatctgaaaatgtatgtgtaagtattcttatttaatgaaagactgtacaaagtagaagtcttagatgtatatatttcctatattgttttcagtgtacatggaataacatgtaattaagtactatgtatcaatgagtaacaggaaaattttaaaaatacagatagatatatgctctgcatgttacataagataaatgtgctgaatggttttcaaaataaaaatgaggtactctcctggaaatattaagaaagactatctaaatgttgaaagatcaaaaggttaataaagtcattataactaaaaaaaaaaaaaaaaaaa

SEQ ID NO: 154127 - DNA, 2333 bp, Homo sapiens
gaacttgctaatctcttttgtcacattcggattgctcctgctgccccacacacactaacccaaccatgttggggtggactccctgccagcccaactgttgtattttcagttcttccagtgtgaatcagttaatattctcgggaacgaggcgagaggttgatcctatgaggaaatcaaccacagtgaaaaggcttgggccgcttttgttttcacctgcttttgttgaacaaatttgatttcccggagtcagtcattttactgtcaagacatttcttcggcattctgcaacagtttccaacatggccagatccatcagaaactgaagccgtggagaacgctctcggggcctttgccacttcttggagtagaagccgacagagagctgttttggaaacttctccttcacacaccagttgaagactaggctttggaggttttcaaagcagacggtgcttgggatgggcagggagaagtaacattctgcaaatcgccgtcagaggtcctgaggacacagacctacctggcttgcattccccttgctgaatggcgtgtgctgcagctgcccactgagggctcttttccctgggattctggacttcagagtaggacagcaggctgggaagatgctgagttccatcaagtgcgtgttgggtgggcgactctgcggtggggaaaacttttctggtgggtgcgtttcacctccagaaccctccgggaaggctacagccccccagtgtacgagaacacaggggtggacgtcttcatggatcggcatccagatcagcctgggccctctgggacacagcggcaaatgacgctttcagaagcatccggcccctgtcctaccagcaggcagacgtggtgctgatgtgctactctgtggccaaccataactcattcctgaacttgaagtaacaagtggattggtgaaattaggagcaacttgccctgtacccctgtgctggtggtggccaccccagactgaccagcggggagatgggcccccacaaggcctcctgcgtcaatgccctggaaggggaagaaactggcccaggatgtcagaggcaaggggctacctggagtgctcagcccttagccaatcggggagtacagcaggtgtttgagtgcgccgtcccgaaactgccgtcaaccaggccaggagacgaaacagaaggaggctctttctccatcaaatgagtgcaagatcttctaaaccccaagagactttcacacaacacttatgtatgcaccccaaagactaatggggagagggagggccgggaagccaggaaagcttggtgttttctctgggtacaccccaagcgagcgtctccgttttggatacagttattgatgaggcttggccactggatgttttcactaactacactctacaagtgaactccttgcccaggcccagttagaaaatcccttggggaactgtgatgaatattccatctttgattaaaaaagtgaaatagtctccataattttggccgatgaagtgagtttttcaaagaattcccatatttagagacaccaattttatttaactaataacaaaatgtattgcttttgtatatatttagttttcacactttgggaaatcttttcctacatccctcgaaaacataaaactcctctgtgagtgaaatgcttgtacgaaggctctgccatatgtttgtagtgttattattttcacctcaagtagaaaggtctgttgaaaccacttgggctgctggatttaaatgggtaatcaaatttaaaaatgaccataaatgaatctttgcaatttgttttctacttacctgttattcacagttggatataaaatacagttccataagatatcctaatactgcctaatgattttaaagttatcactatatttttctgaaatgataaaacatcattcatttatttactatattgtctttcactcaactccagttatgcactaaatattctcctctcattcaccaagattgattgaaacaccatctttcaggtagagaatcagactgctccaagcaatggcaacagaacttggaacagaagcgagagagtgtcactttcacttctggtagggtggttcccaggcgactgcaggtcttgtgaaagacaggggtctcaaagttctgttaatttcacaaatttgttataaatttgtctaaactgagctgttgtggcaacataatttatgaatcgtaaggtctagttaggcttattggggggatatctacatatatatgtgtatgtaagggaaaaaaggtagaatttacagccttcaaaaaagaaaaatcaaattccaagcacaggaataagaaagctat

SEQ ID NO: 154128 - DNA, 497 bp, Homo sapiens
  misc_feature (1)...(497): n = a,t,c or g
gctcgccggggctgcggccgcccgaggctgccctgaggatctgtgtttggtgaaaaggagccaaattcacctgcagggcaggcggctctagcagcttcagaagcctggtgccctggcgacactggacctgccttggcttctttgatcccaaccccacccccgatttctgctctgctgactggggaagtcatcgtgccacccagaacctgagtgcgggcctctcagagctccttcatcgggactttgaacatgtcggggatcgccctcagcagactcgcccaggagaggaaagcatggaggaaagaccacccatttggtttcgtggctgtcccaacaaaaaatcccgatggcacgatgaacctcatgaactgggagtgcgccattccgggaaagaaagggactccgtgggaaggaggcttgtttaaactacggatgcttttcaaagatgattatccatcttcgncaccaaaatgtaaattcgaaccaccattatttca

SEQ ID NO: 154129 - DNA, 871 bp, Homo sapiens
ggtgaaaaggagccaaattcacctgcagggcaggcggctctagcagcttcagaagcctggtgccctggcgacactggacctgccttggcttctttgatcccaaccccacccccgatttctgctctgctgactggggaagtcatcgtgccacccagaacctgagtgcgggcctctcagagctccttcgtccgtgggtctgccggggactgggccttgtctccctaacgagtgccagggactttgaacatgtcggggatcgccctcagcagactcgcccaggagaggaaagcatggaggaaagaccacccatttggtttcgtggctgtcccaacaaaaaatcccgatggcacgatgaacctcatgaactgggagtgcgccattccaggaaagaaagggactccgtgggaaggaggcttgtttaaactacggatgcttttcaaagatgagtatccatcttcgccaccaaaatgtaaattcggaccaccattatttcccccgaattgtgttacctcgggggccagttgccttttccttcttagaggaggacaaggactggaggccagccatcacaatcaaacagatcctattaggaatacaggaacttctaaatgaaccaaatatccaagacccagctcaagcagaggcctacacgatttactgccaaaacagagtggagtacgagaaaagggtccgagcacaagccaagaagtttgctccctcctgccgctcctctctagaaccttctagaacctgggctgtgctgcttttgagcctcagaccccaggtcagcatctcggttctgcgccacttcctttgtgtttatatggcgttttgtctgtgttgctgtttagagtaaataaactgtttatat

SEQ ID NO: 154130 - DNA, 3628 bp, Homo sapiens
ggatgggaagcgagcatggtgagtcctcaagtcgcagctgggcctgctccacgtgggagtggagggtggaggaacgtgtggagtttcggagtccagcccagtgcggagacagccttgaaaccgtggttggcgggcgctccactccgctctgggctcgaaccctgcctgaccatagctgtgccccccactttctccctgtctggcccctggctccccgccccctcacttagaggagggcacggggaagggcaaacggtccagagggcgggcggcctgcgggctcctctgcatcatgtgaggagggcgtggggaaggacatcccggtggggcccggtctggggctgcctccagcccgggctgcctgtcttggacttagtcgtggacctggaggccagtgcccggctggcccctgtcaccctctcgctgtgacgccagcgcctgctgactggaggacccaggttccttcgcctgctttttctcaggctgccctgaggatctgtgtttggtgaaaaggagccaaattcacctgcagggcaggcggctctagcagcttcagaagcctggtgccctggcgacactggacctgccttggcttctttgatcccaaccccacccccgatttctgctctgctgactggggaagtcatcgtgccacccagaacctgagtgcgggcctctcagagctccttcgtccgtgggtctgccggggactgggccttgtctccctaacgagtgccaggtgaggctgcggcggctccgacgcaggtggagctgctgacctggcccctttctgcggctgcgagggactttgaacatgtcaggggatcgccctcagcagactcgcccaggagtatgaaagcatggaaggaaagaccacccatttggttaataatgctgtcccaacaaaaaatcccgatggcacgatgaacctcatggaactgggagtgcgccattccaggaaagaaagggactccgtgggataggaggcttgtttaaactacggatgcttttcaaagatgattatccatcattcgccaccaaaaatgtaaattcgaacccaccattattttcaccccgaattgtgtacccttcgggggccaagtgtgcctgtccatctttagaggaaggaccaacggacttggaggccaagcccattcacaattcaaaccagattcctattaaggaattacaggaactttcttaaatggaacccaaatatcccaagaccccagcttccaagcagaggccttacacgatttactggccaaaacagagttggagttacgagaaaagggtcccgagcaccaagccaaggaagttttgcgcccctcataagcagcgaccttgtggcaatcgtcagaaggaaagggattggtttggccaagaacttgtttacaacattttttgcaaatctaaagtttgctcccatacaatgactagtcacctggggggggttgggcgggcgccatcttcccattgcccgccgcggggtgtgcggtctcggattcggctgaattgcccggtttccatacaagggtcttctttccttcggtgcttttgtatttttggattgttatgtaaaactcggctttttattttaatattgatgtccagtatttcaactgctgtaaaattataaacttttatacttgggtaagtctcccccaggggcggagttcctcgcttctgggatgcaggcatgcttctcacccgtgcagagctgcacttgggcctcagctgggctgtatgggaaatggcaccctcccttcctgccgctcctctctaagaaccttctagaacctgggctgtgctggcttttgagcctcagaccccagggcagcatctccggttctgcgccacttcctttgtgtttatatggcgttttgctctgtgttgctgtttagagtaaataaatctgtttatataaaggttttggttgcattattatcattgaaagtgagaggaggcggcctcccagtgcccggccctccccacccacctgcagccccaccgcgggccaggaccaggctctccatctgcttcggatgcacgcaggctgtgaggctctgtcttgccctggatctttgtaaacagggctgtgtacaaagtgctgctgaggtttctgtgctccccgcatctgcgggctgtagagcgctgggcagctaagatctgcataggtcgggattggcatcgagaccctggcaactgcaccggtgccagctgtcttgggggccacaaggccaggtccagaccagggctgggggctgcctgaggactcctatccgggcagcctgctggcgggggttcccctcttcagtggccaggtcacagggatggagctgcgctgtgcatagggtgccacctcaggtgtctgtcccttgtgtcctcaggaggcagccttgctaccacccgtggcaaacgccaggtgctttttctgggagagcccacagccgtggccctccagggcttccccgacccttagcgccaggtagagggccctgggcagcctgtgtctggaattcttcgtcctgaggccacctgagtgtggtctgtcctggggaggctgtgcgcctcagcagccgtcctgacgctgagccctctgcaaaggttgggccggccaggcctcttggggctgcctgagccactgcaggaagtggcctggctgggaagttgggtgccggtcacctcccagcaggaaggcacagtggacagagatgggaagccctgggggacacagcccggtgctcccagccctccaacctctggctcccaacccagtctccccatcctagcgagcttggccctcctcagtttcgtttcaagccttggggctggagctggccctgctgccctggcaccccccggtggctggagctgggtccccgtggcccaagtgcagggtcccaagagggcagggcggggctccccaaaggagcaaagaatgcagggagggcggtccagggccctgggaaggggagctcggcaccctccaggtccgtgtgggactccagccgctgttggctgggaatcgaagttagaggtgacttccaaaggccccccgagccggcagtgccccccaccacccctccagcgactctgcggtgccagtgccttgttggcttttccggctacgcaccctgccagtcactgagctctcggtctgacgtctgatgtttgtggtttgtttataaccacggggccttacctggggaattccagctgggtttgaatattttgtagcccgctccccagaatgtcttattttgtaatgactgaactacatttagtaatagttacacatgtatatggttaatacatatgggaaattcaatatattttgtagttaacgtattcctgaagtaaccggatgtttctccgccaatccgtagtgacttcagctaaccgaaatgttcttttgtaagtaccatggtcctccggcctaaccgaaggaccgtgaaccttgtaaagaggagagctcctgaaaccgtggtcacctttgtttaagtggaagggaaagtgtgttcctgggccatgaggtgcctccggaattaggtaaaagaattgtggggcaatgggatttaaccactggtatctaagaaatcccaccaattaaagcatttgcacagac

SEQ ID NO: 154131 - DNA, 407 bp, Homo sapiens
  misc_feature (1)...(407): n = a,t,c or g
nacacacactgggtggcgcaggtgggagaagagtctgagagcccggggagacttcagggccagaggctcgcccagccncagcacatggtagtatacctgcaaggccagggcctcatacctgcaaggccagggcagtgcaggccacatacagtgacctctgaaggaccccaaagtaccgggatgtccatgccttcactctttcagctgccatgaggctgtgctgcccaacaaatagaagcaggagccccagatcccatgccaggggggcaaggatgctgcggtcctgcagggcagccagccatccctggcgggcatccggaccaccagactccgggatccctccaagaagtggccgaagggaggtaaagcgcacgaactccactccggtgccaaaggccaggacgaaa

SEQ ID NO: 154132 - DNA, 1444 bp, Homo sapiens
acccctccatttctcgccatggcccctgcactgctcctgatccctgctgccctcgcctctttcatcctggcctttggcaccggagtggagttcgtgcgctttacctcccttcggccacttcttggagggatcccggagtctggtggtccggatgcccgccagggatgggctggctgccctgcaggaccgcagcatccttgcccccctggcatgggatctggggctcctgcttctatttgttgggcagcacagcctcatggcagctgaaagagtgaaggcatggacatcccggtactttggggtccttcagaggtcactgtatgtggcctgcactgccctggccttgcagctggtgatgcggtactgggagcccatacccaaaggccctgtgttgtgggaggctcgggctgagccatgggccacctgggtgccgctcctctgctttgtgctccatgtcatctcctggctcctcatctttagcaatcttcctcgtctttgactatgctgagctcatgggcctcaaacaggtatactaccatgtgctggggctgggcgagcctctggccctgaagtctccccgggctctcagactcttctcccacctgcgccacccagtgtgtgtggagctgctgacagtgctgtgggtggtgcctaccctgggcacggaccgtctcctccttgctttcctccttaccctctacctgggcctggctcacgggcttgatcagcaagacctccgctacctccggggcccagctacaaagaaaactccacctgctctctcggccccaggatggggaggcagagtgaggagctcactctggttacaagccctgttcttcctctcccactgaattctaaatccttaacatccagggcctggctgcttcatgccagaggcccaaatccatggactgaaggagatgccccttctactacttgagactttattctctgggtccagctccataccctaaattctgagtttcagccactgaactccaaggtccacttctcaccagcaaggaagagtggggtatggaagtcatctgtcccttcactgtttagagcatgacactcttcccctcaacagcctccctgagaaggaaaggatctgccctgaccactcccctggcactgttacttgcctctgcgcctcaaggggtcccctttttgcacggctggtttccactccaagaaggtggaccagggtctgcaagttcaacggtcatagctgtccctccaggccccaaccttgcctcaccactcccggccctagtctctgcacctcctttaggccctgcctctgggctcagaccccaacctagtcaaggggattctcctgctcttaactcgatgacttggggctccctgctctcccgaggaagatgctctgcaggaaaataaaagtcagcctttttttacataaaaaaaaaaaaaaaaa

SEQ ID NO: 154133 - DNA, 2191 bp, Homo sapiens
ccgagctccgggcgggcggcggctgctgcagcgggacccgggagcggggcccggcgccgcccgggccgcggggcgatgtgagccccaggtgtatcccagagggatccgggtgacttctctgcagactgtttgccatgacagcccaccaaggacggggggaataaagtgggaacccttccccatgcccctcccacggtcagctccccgatggcctgggtgagggcaggctggctgctctgacaccatggggagctgctgcagctgcctgaacagagacagcgttccagacaaccaccccaccaagttcaaggtgacaaatgtggatgatgagggggtggagctgggctctggggtgatggagctgacgcagagtgagctggtgctgcacctgcatcggcgtgaggccgtccgctggccttatctctgcttgcggcgctatggctacgactccaacctcttctcctttgagagtggccgtcgatgtcagacaggccatggaatatttgcatttaagtgttcccgggctgaggaaatcttcaacctccttcaggatctgatgcagtgcaacagcatcaatgtgatggaagagcctgtcatcatcacccgcaatagccaccccgctgagcttgacctccctcgagccccccagccacccaattgctctagggtacaatgtcttccagcttttccaatggctgccctggagagggcccacgattctcagctccccagcggctctcgacaagcagcctgcggcacccctcgcttggggaagagtccacccatgccctcattgctcctgatgagcagtcccacacctatgtcaacacaccggccagtgaagatgaccaccgcaggggccgccactgcctgcagcccctgcctgagggtcaggcacccttcctcccgcaggcccggggacctgaccaacgggacccacaggtgttcttgcagccaggccaggtgaagtttgtgttgggcccgacccctgctcggcggcacatggtgaagtgccagggcctctgtcccagcctgcatgaccccccacaccacaataataacaatgaggccccttctgagtgtccagcccagcccaagtgcacctacgagaacgtcaccggggggctgtggcgaggggctggctggagactgagcccagaggagccgggctggaatggccttgcccaccgccgggccgccctgctgcactatgagaacctgcccccactgccccctgtgtgggaaagccaagcccagcagctgggaggggaggctggggatgatggggactcgagggatgggctcacaccctcttccaatggcttccctgatggtgaggaggacgagaccccactgcagaagcccaccagcacccgggccgccatccgcagccacggcagctttcctgtgccactgacccgccgccgcggctccccaagggtcttcaactttgatttccgccggccggggcccgagcccccaaggcagcttaactacatccaggatgaagctaaagggctggggtggagaccgccctaaggggccccgagaacccctcgagcccccaagcccccatgcccaccacccaccctgcccgaagctcagactcctacgccgtgattgacctcaaaaagaccgtggccatgtccaacctgcagagagctctgccccgagacgatggcaccgccaggaaaacccggcacaacagcaccgacctgcctctgtagggacttcccggtcctcaccaccctctgccccaccatgatccagcctctgcctcacactcctgtcctctgaacccaccctccccaagggttcagggttgctttgcagaaggcatggaggtgggaccagatgcttccctgtgctggctggagtccccagagatatcagccaccgagtctcctggtctgtctccaggctgggaagagaaggggtgaccaggcgaggagggagccgagacgtcaactgtgaagggttcctgtgattgcgtttagcgccctcccgttctgtccatttgtcttgtctgccgactgtccgtgtgtgttttttttggttggaattttgaaacattttgtacctgttgattttatttatcagtttatttttctatttattgttttaaatgtaatttaacatatttattattaatataattatttttaaattctgaaaaaaaaaaaaaaaaaaa

SEQ ID NO: 154134 - DNA, 2149 bp, Homo sapiens
ccactgttattggtaattttttaataggaacactttccattaatgcttgaaaactacgaactacattttattttatatcttgtcaaattagttggagaatatctattgtaaagcctgtcagcaacatctctaacattactttgtcaggatccacctgctctatgctgcccactataggaaatgcaatatggtaataagaaatgtaatagaaggttactttatgtacaatctcataaaaaacaatctctgactcatacttggatgctaaatgtggtgtttttgcaagagatacagactgattagtggcaatcaaatttattaactgtaaaggacatcaataaaaacaaacaggaccaaaaattgtattttggggatccacatgccaggagtagcgcggcagaggatggagaggggaacttaacgattgaggcgcaccctgcaaaaagctgcacttctgccctagaaattaaataaggagggtcaaaatcaacataaactaaaccctttttcaaagtcatgtaaacacaaatgattggctgcaactgggaaaaccaacattgaaaataaatgattccgtgtgatgcatatcagatttcaaccaaacctttcctttaaaccttttaacgttactcttaccaggcaaataccggtaatagcttacttctgtcttaatttttctaaccaccgggaaaattgaaacataagtaatctgataaacatcaagttttacgttgatgcttttgaccacagggtatatacagtgttaagaatttaaattctatccatcagatatactttaggactccattttgaagatagcctcttctacagaaaagaaatttttaaaagtcaattctccagtttctcatcacatcttaatttttttaaaaaggcttttaaacactagtatcactcccaagtctttagcctttgatacttgctctgaaaacacactatcgtatgtttgtgtatgtacacacacacacacaacagtgacttaaaagtggcaaccgcctcttgaaaagtaaaaatatgtcatccctccattctgcccttaaatgagaaataaagacaatagatttgcccactgcagactgggataccagaaaagacgttctaagtctcgcctgagacaatattaacctgctatcttaagtcccaacttggatgacttaaatttcagtgtacgtgcctccgttcccactcttgccccatcagctccatcagcatcgtcatccccggctcggatcccggccgcgacccgccagggccgccggagtccgcgaataccgcccgctcccagcaacgaagcttcccccgctcccggccgaccgcgagttcctggagcagcagcctccaaggttcccaaagcccacgattcaggcgagcggtgccgaccgggccgtggactgtggcattttaaaactacagaagtctcactgcacgactggcgcggccgaggtggcccaggagaccctccaagagattctggtcagctgccgggagcgtggaagagcaaccaaagccaccaaaggcgccgcggccaagtccccggagcagtcacctcagctttccgttctccctctagctacaattactccacaggcttacggcgcttccttcgagaaaatgaaaaacctaaaaacgcgtagaggtggtagaagtcgttggcattttccgtttaatgtgatcccccaggctccatcccttaagtggggtttccaaacatcggatgcatcctcagcagaggttttccatgttgacagatctctcgcctcccacaaaatggggccggggaggcggccgcggtctcctctatgggcgccgccattttggaatccccggcactgacggttacgtaaggggctgtgcgcaagtgcggcgtttagggaatccgcacagcccgggccacgcagctccgaggcccacatctccacttcccctaagaggaccgatgggggaagggacagctgaccgggtcttcctcgcagcagcctcacccctagtcttccgcggccggcgagcttctccacctccccgggccgggtctccgcccctcacaggcttccgagacactcactggccctgggttgtcaggatcttcctagccacaaccttattccgaccccacttaagagacaaactttag

SEQ ID NO: 154135 - DNA, 422 bp, Homo sapiens
  misc_feature (1)...(422): n = a,t,c or g
nnnnnnnnnnnnnnnnnnnnnnnnnnnnnnnnnnnnnnnnnnnnnnnnnnnnnnnnnnnnnnnnnnnnnnnnnnnnnnnnnnnnnnnnnnnnnnnnnnnnnnnnnnnnnnnnnnnnnnnnnnnnnnnnnagtcttcctaaaaagaagaatccagacctacatggctttgttggtaaattctatcaaacatttaaggaaaaaataccaannnnnnnnnnnnnnaacaaatttcacaagacatttatgaggccagcattaccttgatcccaaaccagaccaagactttaggaaaaaagaaaactgtagctcagtatccctcattatttttccagaaataattaacaaaatattagaaaattgaatctagcagggaataaaaacataactaattggattatcccagttgcaaagttgatttagca

SEQ ID NO: 154136 - DNA, 423 bp, Homo sapiens
ccggggtagtggtcgtcgtggttttccttgtagttcgtggtctgagaccaggcctcaagtggaaacggcgtcaccatgatcgcacggcggaacccagataccttacggtttctgccggatgaggcccggagcctgcccccgcccaagctgaccgacccgcggctcctctacatcggcttcttgggctactgctccggcctgattgataacgtgaatccggcggaggccgatcgcgacggctgataagaaaacatatggtgaaatttttgaaaaattccatccaatacgttgaagtcttcaaaatgcttgctccagtttcactgatacctgctgtttctgaatttgatggaacatgtttcttatgacagttgaagcttatgctaatctgtatgttgacaccttgtaattaaaatacgtaccatg

SEQ ID NO: 154137 - DNA, 554 bp, Homo sapiens
  misc_feature (1)...(554): n = a,t,c or g
gaactataaacctattatttattgcagaactaataaaaaatccaaagccttgtatttgtacatctttattatttctaaagcactgtcctcaaccctaattccagttttcacaattggtactcaagaaaatagagacagaaatcatttgattttgcccagaaacccatctgcttatatttataaggccacctaatttgaaatcacatatagaccaggcgcggttgctcacgcctgtaattccaacaccttggaagcccaaggcaggtggatcacaaggtcaagagatcgaagaccatcttggccaacatgggtgaaaccccgtctctacttaaaaacacaaaaatcagctgggatttacagggcatgagccaccgcatcgggccaggacaagcatttgataagccataaaaagtaacctnattccagttaggtacagtcttttgcttctaattgcaccaagctccactgtagacagtattagctcctgagtccattttctccaggataacccacctaagagcaaagacaacttggcaacataagatttctgtttt

SEQ ID NO: 154138 - DNA, 1951 bp, Homo sapiens
agattttatggaatttcaattaattacgtttataaaaactacgcatcatgcccatttgtgggtattggatgaaaagataaatctttccagaaggggcaggggagggagaggcaattctggttggggaagttgggagaaaagaaaatcagtatctcctagtcttcgcccagtttggctcgtttggggtactcctcgaccccgcgttaccaggcccgtgaatcccactcccaccagagaattagcgcgggcggacagagcaaagtgaaacttagtagcccggaacttcgcgtgccgggttcccgcagcaacacgtaccgggaagcgtttgggcgctgcaccgcgcatgcgccgttgcccgtgagtccggcgcgcagaggaggaggagaaagctgaccgcttaggcccgggtagtggtcgtcgtggttttccttgtagttcgtggtctgagaccaggcctcaagtggaaacggcgtcaccatgatcgcacggcggaacccagaacccttacggtttctgccggatgaggcccggagcctgcccccgcccaagctgaccgacccgcggctcctctacatcggcttcttgggctactgctccggcctgattgataacgtgatccggcggaggccgatccgcgacggctggttttgcattcgccagcttctatatattaacggccttttttttttgctgggatattatcttgtaaaaacgtgaagactacctgtatgctgtgagggaccgagaaatgtttgggatatatggaaatttacatccagaggattttttcctgaaggaagataaggaaaacatatggtgaaatttttttgaaaaattcccatccacatacgttgaaagttcttcaaaaatgcttggctcccagttttcattgattacctgctgttttctgaatttgatgggaacatggtttctttatgacagtttgaaagcttatgcctaatctgtatgtttgacaccttgtaattaaaaatacgtaccatgagtactctgactctttattgttgtaagaaaaatagttcatcattcagagaatgggtcagtttccatttcacccatctgaaagattttaaggtgagggttggattctagtttaggagttaggcagactaccccaatctgggcccactgccaataaagtctcattggaacacagccatgctcatttgtttacatgttgtttatggcgactgccatgcatgcaagagcagaattgagtagttgtgatagagacctatggcctgcaaagccataattaatatgtagccctttcagaaaaggtttgcctgccccatgtcctagtgcaaagtgaatttagagtgagccagattatggaggattctgtgactcttgccaaataattttgacttcatcctgtaggtattaagtcattaaggcgttttaaatcatacagtcagggttgtatttctgagctgtctataatgaatgatatagaaggtggtttcgaaggaggagactccagacaaggaaaacagaaatcttatgttgccaagttgtctttgctcttaggtgggttatcctggagaaaatggactcaggagctaatactgtctacagtggagcttggtgcaattagaagcaaaagactgtacctaactggaatgaggttactttttatggcttatcaaatgcttgaccttgtgatccacctgccttggccttccaaagtgttggaattacaggcgtgagccaccgcgcctggtctatatgtgatttcaaattaggtggccttataaatataagcagatggtttctgggcaaaatcaaatgatttctgtctctattttcttgagtaccaattgtaaaaactgaaattaggttgaggaaagtgctttagaaataataaagatgtacaaatacaaggctttggattttttattagttctgcaataaataataggtttatagttca

SEQ ID NO: 154139 - DNA, 891 bp, Homo sapiens
ctaactgggctcgtcggcctgccccagctgcaggcccggtgctacacgggctcgggaacagaacatcgtgggcatgcgcagagcatgcccatccgtggcaggtacgccacagcagacacaaaggtatgggagcttggtgcctccagccacaaaagtggaaggccgtgggcccagagtcccctgtggcaggtccagggcccaggctgtgccctcaggctgtggcaggcagcccccagccataagccggcccagccagtggctctcacactggccagtgggtggcgggtggctctccaggtagaggcccaggccccggaggtggcgcagccggaagttcttgggcttgcttccctgggcactggggcactgcggctgcggggaccccaggcccccctcgtagatgttggggggtgcgtcagggtggccggggcgtccttgggcctggctcactgcatcgtccagacgaactaactccacattcaaccaggttgtgctgaagaggttgtttatgagtcgcaccaaccggccacctctgtccgtttcccggatgatccggaagatgaagcttccgtgcgccgtccaagggtccattggttgccatagagatcgtcgagcgctgggcctgtgatcgctgaggggcgagcagttgcgaccctgggctcctggggacctgagcgttatgtctttccgcgacctccgcagtaaggcagccccgcgcccctgtgacctgcgggtcttccagagattcagggctcccgcccgccgggtcccctgtgtaggcgatccctgaggcttgcgctgccggaggctcctttcgggcctctgcgcctcagggaccgcctgacccgcggctgcaacccggccgagcgtcccaggcccttcttcggccat

SEQ ID NO: 154140 - DNA, 538 bp, Homo sapiens
caagagtggaagtaacgatgactcggacatagacatccaggaggacgatgaatccgacagtgagttggaagaaaggcggctgcccaagccacagacagccatggagatgctcatgcaaggaagacctggcaaacgcattgtgggcacgatgcaaggtggagactccgatgacaatgaggactcggaggagagtgaaattgacatggaagatgatgatgacgaggatgacgatttggaagacgagagcatttctctctcaccaaccaagcccaatcgaagggtccggaaatctgaacccctggatgagagtgacaatgacttctgacccttttgccaagggaccctggcagattaaaaccctcagacttgtaggtaaatgggaacttagaaggttaggaaggtaacccctgttttgtttactaagctggctggacttctatgatcactgaagcaatacttatttctgctttagcctcctatgtttgcattccatgaagcttaaataagaattgaagcaaatccctaagaaaaaaaaaaa

SEQ ID NO: 154141 - DNA, 6065 bp, Homo sapiens
ttgagacagagtctcactctgttgcccaggctggagtgtagtggtgcgatctcggctcactgcaacctctgcctcccaggttcaagcgattcttctgcctcagcctcctgagtagctgggattacaggcatgtgccagcacacccagctaatttttgtatttttagtagagacggggggtttcaccatgttggtcaggctggtctcgaactcctgacctcaagtgatctgcccaccttggcatcccaaagtgctgggattataggcgtgagccgccgcgcccagtggaaacatggattacttcaattttcttccttctgcttttctgtatttgttaaatttcaaataaagcaaaccctgatccaaaacctcctctaataagcggggattgtttcccctaaggtcgatctaccccctagcacagtccctaaggcagaagaagctgctcaatgaaggcttctcttccttttctttggaactcaagagcacccacgaaggggaagaaatgctacttctgaaaggagtcaggtcctcccttaggcgcgcagggccgcaggggtcccctcggccactcgttctcaaggctccgtgaacgcgcaagcaaagacgtccttcgagggaaccttttctcctcctggcggacaagagtggaacgacagggcttgaggagaagttttgccaggttgggggtgacatcttttgaaacttgacctcgttttttattttgtttgtttgcttgcttgcttgcttgagacggagtctcactcaagtcaccaggctggatggagtgcagtggtgcaatctcagctcactgcaacctccgcctcccaggttcaagcgattctcctgcctcagcctcccgagtagctgggattacaggcgcgcaccaccacgcccagctaaatttttttgtattttttaatagagacggggtttcgccatgttgggctggctgggcttgaacttctgacctcaggtgatccacccgccttggcctcccaaagtgctgagattacaggcgtgagccactgtgcctgagacctcacctcgttttgcaagcgcctctcttctttctcaaggcctcatatccggttcagagtaaagaaaaagggaaggcaccaaccttgagctcctaaaatgtgctagaccctttacatgtattatcagtaaatcttcccaacagcttcattattcgtcctgttggctctggacttggagaaaggagagctgcttctctgcagctgaagaggctctgcaagaagcccagaacaggcagggcgctgtagctcacgcaggtaatcctagcactttgggaggctgaggtgggaggatcacttgagcccataaggttgagaccagcctgggcagcatagcaagatcactgtctctgcaatcccaccactctgggaggccaaggcgggcggatcacttgaggtcatcaggagttcgagaccagcctggccaacacggcgaaacctcgtcactacaaaaaaaacagtaatgagccgggcgtggtggcacatgcctgtaatcccagctactcaggaggcggaggctgcagtgagccaagactgtacctccagcctgggcaacaaagcaagaccctgtctcccaaaaaaaaaaagcggggaaaagatcgggctgcgcaacctgaaggaagagacaggagggtgaagttcaggaagacaagatggaaacattcttatatccagatctgggtggtgcctgcacagagcacacatacaatacttcactgataagtatgcttaagacctgtgccattgccttatataacctacacctccatgaaaacccaaaacaaacaggccacaagctccctgtttgctatcctttattaaagggcccacatcctcatgggactccagccaaaccagtcaggtcccccaaatatagcaggaggcctggaaggggaggggaatgacttatgatcctaccatgcctcccaagaaacagaaaccaccacagacagacagacagacggacaggggctggggagaacttgcctcactctcagtcctctcccactttcccccacttgaaaagaaagtcaaacactggctacgcagcaccccagccccccaccccacccatagcagcgtttgtgggacacaccccctttgcaaggggtggccccgaggcagcttcctatctctctcttcactttggtttgctcctggcaactccgtgccctcttcctttcctcagcctccggctcggtctcccccttgtcttctatcacctactcggaccttctctctcatctcctgggcctccctgccccagcacttctggggaagcagcgtctcgggcgtcttcccttctcctagcaaggggccccaccaggccctctgcccaggatgtgggactcacacagctgccccactctccttgaggtcaggggcagaacgctgccgtctcattcgtgggggagtagtgtatggggggtagcggggccctgggggccgctgggctgggtagggttggggtggctggggataagagttgtgctttttgggctggaagtgctggggttcaggctgtgcagaacccgctccccgggatcggccccctccatccagggagttcctgcggggatggtgggaccttcggggactcggaggccggcgggcaggggtggctggatggggagtgacctcctcagggggttggagcggagttggagcctccccgctccccatccctggccaagactcccggtgctgggggttgctcttgaaggggaagcgtagcttgcagtcgtgagggggcacaaagcgggctgggggcctgcgcagccccccgccccggcccccagagccctgcagtccctgcagccgtagctgctcctgcttgagccagcgaagacgaccacgacggaaggcagggtcctcctccatgagccgtgacacccgctcccagcttgacagtggcggcgaggggggccgggctgacggcatgcggtcactgggggctgcctcctctgctgcctctgatccttcaggcggggcccaggggacctcaccaccttcttcattctcatcctcatgatcctgggccagggggatgaccctctccatgcggagcatgcggtcccgcagggcctgcagctcccggtccttgctgctgttctgcagcttcacctcctgcagaatccccgtcagcttgtcgatgtgggcccggaggtcctccacctccgcccctcgggctccctcctcactgccaccaccactgccagctccacctccttcctcctcgcctacagtgtcccagacatcccgggccacagccctccaggcgtctccggggccgtctggcttgccataggtgcgacacagctcccgcatcttgagggcggccagggcctcaatctcagcccgcccgtggcggaagtcagccagggccacctcgtagcagatctccttcaccgcctgcatcttcaggtcagccatggtggcccagcgggggtctttgccctgcagcctgcgtcgctgggggatctgataaaccctgcgaggggccctgcgcttgccactgctgggcagaccacagcgtttgacaatggtctggaccgtggtgggcggcagctgctcccgcaaggaggagatgagcctccagctctcttcacaagagcgcttgtcagagtcatccccgctgtccgagtctgcatacagtcgctgctgctccagcagaagatcggcttcttccttttctttccggtactgattctccagatcctgcagcctcttctccatttccagctttatgtcgatgccttgctgctccagcagttccttctgggcaaagttccagtcgactggctcagagggcggtcctgggggtggggggacccctcgttcccgttccagccttgcctgctccgggtggttgaagcggaaaacgtggttcttgcccatcacaatcctattccctgacttcagcaccagcggctccgtcacaagcttcccattcacatatgtctcagctccttcacaaggctccagagtgaccaccacttctccatctggctgggggatgctccggaacagacagtgttgctcccgaatgaactgtccggtcagcttgatgtccatatctacttggccgaccctggtgacgccatctttgatgtggtagagcagacactcagacatcagagggtcttcgttcaggttcaccaggtggggagtcttctttggagagaagacgcccacagttcccccatcctcccggacggccacccccatctcagccagcaatgcttctctctccatcctcagggcttctgtcttgcgtagcttctcctcccatgtctcgttcagctcagctataatcttctctgtctcctgcagcctctccatggcttcctcaggcccaatctgggactccgtgttgggggagaatgacggctccagctccccattatgtgtggtgggtgatgagggtgaaactggagctgggggagatgacacagctggcagggcgcctctgacactcccttcttccgtcttcaggccttccagagcagaggctgacagtccctgagccatcagcagttcccgcagccgggctacttcctcctgcagctctctaatcagccgggcattagggtcctcgttgatgatggcattgcagcggatttgcttggtgcggtcagcatacctgagggtgctgagagtctcctcgtaattgatgtcagcagggctcagggctgcaatcatggctgtgcgtgagttcccccccaaattttccttgagcagccaggtgagcacagagtccctgtaggggataaaatccgactttcgcttctttgattgcatatctgcaagggccgagatcactttccctagtgtagtcagggacttattgatgttggctccttccttcaggcgcatgccccgggcccctgaggagtcggctcgctcactcccagcaaggtccaccaaactgatcttactgaccttctccgagtccagccccgtgagctggtcatggcagcgctgtgtgaagacgatggtaaagacggcatgggaacggctgctggtctcattcatgttggtggcagccacagtccgtgctttatttccacagtccatgaggtcagcaatgtctgcgtaggaggtcacagccaatttggacaggtcctgcacgtacgggcccaggatggggtgctcccggacccgcagagaaccccgactcttggggttcaagaggtctcgtacccgctcacagtagatctccatatagctcacctccacagagtaggatagctgagcactctggttctcactaacgcgagagaagaggtcctcacagagctggggcacgatgccctgctgccctggctcctgtcgccccatcatggtataggatttcccagccccggtctgcccataggcaaagatgcacacgttgtagccttcaaaggcgtggagcagcatctcttctccaatgtcccgatacacttgctgctgagatgcaaactgggggtcctccgtcgaagtgtgtgaccagtaggagtagtcaaaggtgaagcttttgggggcatccttgctctgtttaggattgatgatggaggtggtgttgccctgcatgctgaccacacacttggcatcctggctggtctcacgggcgttaaagggccgaaccctcactgccactttcaccgaggcaccagccatagctccagacactcctgccctcctcagctggcgtcctggccccagaccaggggggctgtatcagttctggctgccaccggccctcgtagggggagccccatcctactcctggggcctggccacaccagctggggctctgggagataccctcggcgcggcggggctcccggagcagctcggcggagagggacaagctttccgggaagcgtgaggcggaagcgggaaggatctggggccggttcggagctgcccccgcccctcgccgggtgcccgggcggcgggcggcggactcgcgccccgggggcggcagcagtagcggcgccagcggccggcgcccgcccgggcagcgcgagctggggcgggagcg

SEQ ID NO: 154142 - DNA, 5401 bp, Homo sapiens
tttcgtgcgccgaccaagggtccattggttgccatagagatcgtcgagcgctgggcctgtgatcgctgagggggcgagcagttgcgaccctgggctcctggggacctgagcgttatgtctttccgcgacctccgcaatttcacagagatgatgagagccctgggataccctcgacatatttctatggaaaatttccgtacacccaattttggacttgtatctgaagtgcttctctggcttgtgagaagatatgagccccagactgacatcccgcctgacgtggatactgaacaggaccgagttttcttcattaaggcaattgcccagttcatggccaccaaggcacatataaaactcaacactaagaagctttatcaagcagatgggtatgcggtaaaagagctgctgaagatcacatctgtcctttataatgctatgaagaccaaggggatggagggctctgaaatagtaaaggaagatgtcaacaaagttcaagtttgatcttggctcaaaagattgcagattttgaaggcagccaggcagcttgcgtcctgaaatcacctccaaaggagcatctctgtatgactttcgctcggcatggaagtagagtttgagggaaatgagaacagaagccattgccagacctctggaaataaacgagactgaaaaagtgatgagaattgcaataaaagagattttgacacaggttcagaagactaaagacctgctcaataatgtggcctctgatgaagctaatttagaagccaaaatcgaaaagagaaaattagaactggaaagaaatcggaagcgactagagactctgcagagtgtcaggccatgttttatggatgagtatgagaagactgaggaagaattacaaaaagcagtatgacacttatctggagaaatttcaaaatctgacttatctggaacaacagcttgaagaccatcataggatggagcaagaaaggtttgaggaagctaaaaacactctcgtgccgtgatacagaacaagctcaaggaggaagagaagcgcctgctcaagagtggaagtaaccgatgactcggacatagacatccaggaggaccgatgaatcccgacagtgagttggaagaaaggcggctgcccaaagccaccagacagccatggagatgcctcatgcaaggaagacctggcaaacgcattgtgggcacgatgccaggttggagactccgatgacaatgtaagtcccccgctcccctcagtggttctgtgcactctgggtttggctgtccccatagatgggagtggctgagttgctgtcagcagccagggagccgtctatggtcagcccggccgtgcctcgatgcgtggcagggtttggcctcatgaggctctggactcttcgttgctcgtggatggctcatctcttttcaagtgaatgtgcttgctctgcttttttttgccttctcactgttctttccattctcgctttccaaagatggaagcagcaccagctctcttaggtaaatgcaagacttccagctccaagaagcaggttggttttctgttctgcctcatgtgtttgtgggtgtctgtcagccctcccggggccagccaggggcctctccctaggagtgatgcttcctctctcctgggcaaaaaggccactcaaaagagatcctgtggtgacagcgggatcactgaaggcccctgtgctaaagtggaggcgcaggcacggagcctggaggcggggaaagctcaggccgggccatcctcaggccctgggccgccacctagaaatgaaggaggacgccgagggccgggctcaggaccaacccccctccctgttctgtgctggggacggaatggtgaagcagcactgtccccagaccaggccctcgaggtgccaggcatgaggctgagacataagctgccttgagctttactgagtggataactccctggagcacttaagcaaaaggggattctaggggtcctcagtgaggtccagtcatcagggctctgccgcccattgctcaagcctacgttctttgttgcgtccctggcagtgctgctcggcccacacagcaaagggcgactcaacagagactgaccccaggctgcctccatgtgccctgaatttacagggcacagtctgtagagaagcagagagagcaactggaaaataattttcctaacaagctcgggtgtggatggtatacagcgtctctccgtcttgcccacccaagacagaagcagagggagtgtggcgtgggtgctggcaatgctgaggcagcaccgcctgcctcttctccagggtttgccttctctctcctcagagcgaatgcattagtcgcagctgagctttatgcctggtggtcacttgtttatttcaaggaggctgtgtccatgccgccctccaggcacagggttccatgctttacgtgttcaggcatccaacacgtgtctgttgagtgcctgccacatgccagtgctgtcgtggattatggggaacgcagcaggggcagaggcaagcccccgcttcatggctcacaccccagcaataatgatggattgtcggatcagggctcatggtgttaacaggaggaataacagcttcaggggacagggagtgacagggaacaaggagggggtggcgtcttctgcgaggtcagtgaaggcccctgacgtggtggtgtttgagcagggcctgagtggagggagcgagcgcatgggttggcggcacctgggcatgtggaatgcactcctcgcatcgaggagcagaggcagctggtgtgattgtgggtgagtgcgagaggcagcaggggccatgcagagctttgcagggtgagatgaagactctgttttctctgagtgtgaggggaaggccctgaagaatcatgagcccagaagggtcaagagctgatgatccctgtttgagagaagccagttaggaggcgcctgcacccgtggtggtcaaagtgtgacggtgcttggccgaaggtgtggcagcagaggtgttgagaaatggtcaggtcctgggtctctctaagaaccatcaggttttgtgaattgattggacataggctgttagagaaagagaaaaatgagggtgcctgggcttggtctaatcagcagaaagcagagtttcattttctgagatggggccgacttgacaaaggggcttggaaggcagatcgaaagtttgattttggacattctgaatgtgacagccacatgctagggttgagtagccaggtggaatttaagtctggagttcaagggccacgtctgggctatagattgaattttgggagccacccttatttggttggtatctaagccacaaggatagatgtgactgcctagggagagcaagtagaatgagaagagaggcgacccaaggtcctgagctgcatctgccctgcagaggtccgggaggaaggggcaggcagaggaggctgaggggcgtcagcagtgaggaagggggacctggactagagaaggggccctgggggatggagaagatgggttttaaggatgaaggggtgattccacagctcaagcaggatgaggcctgagaatcgatcccagtccgttgaatgtttccttcttgacaggagcagtgctggggtcagtaggtgagagcccgggggaactgaagcagtcgtgaggggcacaggtgtggacagtgagttcaacgactcgctcaggagctttgtgtgaggggagagagacagggcagagcagctggagaggaaggtgggattacctttggggttttttttcaagaaggaaattacagcatgagtgtgcaccgacaggaatgatctagatagaacgaccagccatcctggtttacatgggacgcaggaactgccgttttaaagctgggctgagttggtcaccctggagccctggatccgatgaggagagagagggtgtgtctttcactttgctccctttttttcttttttttcttttttttttgagatggagtcttgctttggagtgcagtggtgcaatctcggctcactgcacctctgcctcccaggttcaagcgattcttctgcctcagtctccggagtagctgggattcactttgctccttataccaatgtctatgttgctttccatccacaatctacaaaaagccaaaacaggcctcccttccctctctccaagcccctgtccttcttgccatctgtagggggagtctctaggtccagtggccctcagcgcagatgcagagtgcttcttagacgctgcgggaaagccagcccctgcagcaccacacccagatgcacctgcagtttggaggattctggttggatgataaattccagctggcagtacatagcctcagtcccatctgtatgccctcccacagcctgcttgccactctgccagcctcttccttcacacagggatgctgctatagaaagggaggcagagagtcttaggacaagatgtcaggaatgaggcaggatcccccgttgcatctgccatttttttcctataggaggactcggaggagagtgaaattgacatggaagatgatgatgacgaggatgacgatttggaagacgagagcatttctctctcaccaaccaagcccaatcgaagggtctggaaatctgaacccctggatgagagtgacaatgacttctgacccttttgccaagggaccctggcagattaaaaccctcagacttgtaggtaaatgggaacttagaaggttaggaaggtaacccctgttttgtttactaagctggctggactccatgatcactgaggcaatacttatttctgctttagccctcctatgtttgcattccatgaagcttaaaataaggaattgaagcaaaacccctaagatttaatttttttcccaccttatttatctttctaaaaacttgaggaatgcatgtgttccttagtgattcacatccacgggacaaaaactcaagaagaaataagagctgacgccacacaagtcttggctgcttttgttactatacattttctctgagactccagcagagttggggctggaacttggcactggggactcatgtttggaatcgtaggggaacatctggctgttaatcacttgcccagttgagaacatttcctatacatcggcttttaattctagctcttatttcattttgtaatcttattttctttcgtctgcatgttcccaataccaagcattaaatgtattttaataactaaacttttctgaaagaaggttagctaaagttaaatgaaaacttggtttctttgaaaatcaggcaatagagacaggctccagatgaggaatcctccattttctgtccgaagctgacattcctctggcagtccagttcaccttggattacagccaccttcatgtttccacggttggtactaaaa

SEQ ID NO: 154143 - DNA, 951 bp, Homo sapiens
atggataagaaagatcaagtgtatctgaactctcaggttgtgagtgctgctattggacccaaaaggaacgtgtctctctccaagtctgtgacgctgactttccagcacgtgaagatgacccccagtaccaaaaaggtcttctgtgtctactggaagagcacagggcagggcagccagtggtccagggatggctgcttcctgatacacgtgaacaagagtcacaccatgtgtaattgcagtcacctgtccagcttcgctgtcctgatggccctgaccagccaggaggaggatcccgtgctgactgtcatcacctacgtggggctgagcgtctctctgctgtgcctcctcctggcggccctcacttttctcctgtgtaaagccatccggaacaccagcacctcactgcatctgcagctctcgctctgcctcttcctggcccacctcctcttcctcgtggggattgatcgaactgaacccaaggtgctgtgctccatcatcgccggtgctttgcactatctctacctggccgccttcacctggatgctgctggagggtgtgcacctcttcctcactgcacggaacctgacagtggtcaactactcaagcatcaatagactcatgaagtggatcatgttcccagtcggctatggcgttcccgctgtgactgtggccatttctgcagcctcctggcctcacctttatggaactgctgatcggatgctggctttcaaagcaacagctcagctcttcatcctgggctgcacatggtgtctgggcttgctacaggtgggtccagctgcccaggtcatggcctacctcttcaccatcatcaacagcctccaaggcttcttcatcttcttggtctactgcctcctcagccagcaggccaaacacaaattcacgcccatggaagttcccaggcagaatcaccgatgcttacagcagaattaa

SEQ ID NO: 154144 - DNA, 2034 bp, Homo sapiens
tggttggcttacggcacagtagagagcttccagggctggctggcgtgggatacccgtaccacagaaatgcagggaccattgcttcttccaggcctctgctttctgctgagcctctttggagctgtgactcaaaaaaccaaaacttcctgtgctaagtgccccccaaatgcttcctgtgtcaataacactcactgcacctgcaaccatggatatacttctggatctgggcagaaactattcacattccccttggagacatgtaacgacattaatgaatgtacaccaccctatagtgtatattgtggatttaacgctgtgtgttacaatgtcgaaggaagtttctactgtcaatgtgtcccaggatatagactgcattctgggaatgaacaattcagtaattccaatgagaacacctgtcaggacaccacctcctcaaagacaacccagggcaggaaagagctgcaaaagattgtggacaaatttgagtcacttctcaccaatcagactttatggagaacagaagggagacaagaaatctcatccacagctaccactattctccgggatgtggaatcgaaagttctagaaactgccttgaaagatccagaacaaaaagtcctgaaaatccaaaacgatagtgtgagctattgaaactcaagcgattacagacaattgctctgaagaaagaaagacattcaacttgaacgtccaaatgaactcaatggacatccgttgcagtgacatcatccagggagacacacaaggtcccagtgtcattgcctttatctcatattcttctcttggaaacatcataaatgcaactttttttgaagagatggataagaaagatcaagtgtatctgaactctcaggttgtgagtgctgctattggacccaaaaggaacgtgtctctctccaagtctgtgacgctgactttccagcacgtgaagatgacccccagtaccaaaaaggtcttctgtgtctactggaagagcacaggggcaggggcagccagtggtccagggatggctgcttcctgatacacgtgaacaagagtcacaccatgtgtaattgcagtcacctgtccagcttcgctgtcctgatggccctgaccagccaggaggaggatcccgtgctgactgtcatcacctacgtggggctgagcgtctctctgctgtgcctcctcgctggcggccctcacttttctcctgtgtaaagccatccagaacaccagcacctcactgcatctgcagctctcgctctgcctcttcctggcccacctcctcttcctcgtggcaattgatcaaaccggacacaaggtgctgtgctccatcatcgccggtaccttgcactatctctacctggccaccttgacctggatgctgctggaggccctgtacctcttcctcactgcacggaacctgacggtggtcaactactcaagcatcaacagattcatgaagaagctcatgttccctgtgggctacggagtcccagctgtgacagtggccatttctgcagcctccaggcctcacctttatggaactgctgatcgatgctggctccacctggaccagggattcatgtggagtttccttggcccagtctgtgccattttctctgcgaatttagtattgtttatcttggtcttttggattttgaaaagaaaactttcctccctcaatagtgaagtgtcaaccatccagaacacaaggatgctggctttcaaagcaacagctcagctcttcatcctgggctgcacatggtgtctgggcttgctacaggtgggtccagctgcccaggtcatggcctacctcttcaccatcatcaacagcctccaaggcttccttcatcttccttggtctactgcctccctcagcccagcaggtccagaaacaatatcaaaagtggtttagagagatcgtaaaatcaaaatctgagtctgagacatacacactttccagcaagatgggtcctgactcaaaacccagtgagggggatgtttttcccaggacaagtgaagagaaaatattaa

SEQ ID NO: 154145 - DNA, 1328 bp, Homo sapiens
ttttttttttttttttttgtgagacaggatcttgctctgtcacccagactggagtgcaatggcatcatcttcgctcactgcaacctctgcctcccggactcaagcgatcctccccacctcagccttccaagtagctaggactacaggcaggaactactacgcccagctaattttcgtatttttttgtagagacggagttcgccatgttgaccagggctggtcttaacctccttagctcaagagggccactggcctcagcctcccaaagtgttggggattacagacaacagccaccatgcccagctaattttttgtatttttgggagagacaggggtttcactgtggttgcccagagtggtctcagactcctgagttcaagcgatccgcctgcctcccaaagtgctgggattacaggggtgagccaccacacccagttccttctgcactttgaagctggcccacctgccaactggattgaacaccatggcaggggaggcagtgtttctactgtccataacaaaagggggcacctactgcaagtatcttgcgccaggccttggtgggaggcataattccatctcattgctgcaagcaagttaatggagatgttaataaaaacactacattaatgaaaatgctgaggctagaacctattctgtgcctgtaagacaaaacaattggggtgagatttctgatatccattctttagttcctttgggcctaagtaaagcaaacttacaacctgggacacaacttattttttcccaggttgtaagaggacagagaccctcctggtaaaggaagcaaattgcctgaaatgctgatgggtcctgttacttctctgtcccttcacctctggacattcactttttgcttccggtagtaaggcccatcatgtccctcaccttctcccaattgctccttcctaaggtcctctggattcctaaaaccccaagtcttccccttgtgaagaggccagaccgggcaagtagaaaaggtctaggactgaacatcagacttgggtcccagttcctagttctactgctaaacatgtgaccttcattaagtcatttaatatttctaaatctgttttctgacctgaaataggaaagccttccctggctaccttgcagaattgctataaggatgtgaaagcactttgaaaaagtataagtggtagagaaatatgtgtgtataattatatgtttacaaaaagatatatcaaatgacaaaattttagaaatagagaatatatctgtgttaccaggagctagagatggggaagggggttgtgggaggagaaaattgctataaaattgctataaaa

SEQ ID NO: 154146 - DNA, 5898 bp, Homo sapiens
atggcgtttgttgcaacacagggggccacggtggttgaccagaccactttgatgaaaaagtaccttcagtttgtggcagctctcacagatgtgaatacacaacatatcatccctcgattccttacatttctccaagatggagaagttcagtttcttcaggagaaaccagcacagcaactgcggaagctcgtacttgaaataattcatagaataccaaccaacgaacatcttcgtcctcacacaaaaaatgttttgtctgtgatgtttcgctttttagagacggaaaatgaagaaaatgttcttatttgtctaagaataattattgagctacacaaacagttcaggccaccgatcacacaagaaaaccgctactttgagaaccctcaagtgatccccgagaacacagtgcctcccccagaaatggttggtatgataacaacgattgctgtgaaagtcaacccggagcgtgaggacagtgagactcgaacactctacaaactgaacatccacaatgttgttgctgagtttgtgcccttgatcatgaacaccattgccattcaggtgtctgcacaagcgaggcaacataagctttacaacaaggagttgtatgctgacttcattgctgctcagattaaaacattgtcatttttagcttacattatcaggatttaccaggagttggtgactaagtattctcagcagatggtgaaaggaatgctccagttactttcaaattgtccagcagagactgcacacctcagaaaggagcttctgattgctgccaaacacatcctcaccacagagctgagaaaccagttcattccttgcatggacaagctgtttgatgaatccatactaattggctcaggatatactgccagagagactctaaggcccctcgcctacagcacgctggccgacctcgtgcaccatgtccgccagcacctgcccctcagcgacctctccctcgccgtccagctcttcgccaagaacatcgacgatgagtccctgcccagcagcatccagaccatgtcctgcaagctcctgctgaacctggtggactgcatccgttccaagagcgagcaggagagtggcaatgggagagacgtcctgatgcggatgctggaggttttcgttctcaaattccacacaattgctcggtaccagctctctgccatttttaagaagtgtaagcctcagtcagaacttggagccgtggaagcagctctgcctggggtgcccactgcccctgcagctcctggccctgctccctccccagcccctgtccctgccccacctccacccccgcccccacccccacctgccacccctgtgaccccggcccccgtgcctcccttcgagaagcaaggagaaaaggacaaggaagacaagcagacattccaagtcacagactgtcgaagtttggtcaaaaccttggtgtgtggtgtcaagacaatcacgtggggcataacatcatgcaaagcacctggtgaagctcagttcattcccaacaagcagttacaacccaaagagacacagatttacatcaaacttgtgaaatatgcaatgcaagctttagatatttatcaggtccagatagcaggaaatggacagacatacatccgtgtggccaactgccagactgtgagaatgaaagaggagaaggaggtattggagcatttcgctggtgtgttcacaatgatgaaccccttaacgttcaaagaaatcttccaaactacggtcccttatatggtggagagaatctcaaaaaattatgctcttcagattgttgccaattccttcttggcaaatcctactacctctgctctgtttgctacgattctggtggaatatctccttgatcgcctgccagaaatgggctccaacgtggagctctccaacctgtacctcaagctgttcaagctggtctttggctctgtctccctctttgcagctgaaaatgaacaaatgctgaagcctcacttgcacaagattgtgaacagctctatggagctcgcgcagactgccaaggaaccctacaactacttcttgctgctacgggcgctgtttcgctctattggtggagggctgaacatgcttcagagtggcctgcacaagcagcacatgaaggacctctttgtggagctgtgtctcaccgtccctgtgcggctgagctcgcttttgccgtacctgcccatgcttatggatcccttggtgtctgcactcaatgggtctcagacattggtcagccaaggcctcaggacgctggagctgtgtgtggacaacctgcagcccgacttcctctacgaccacatccagccggtgcgcgcagagctcatgcaggctctgtggcgcaccttacgcaaccctgctgacagcatctcccacgtggcctaccgtgtgctcggtaagtttggcggcagtaacaggaagatgctgaaggagtcgcagaagctgcactacgttgtgaccgaggttcagggccccagcatcactgtggagttttccgactgcaaagcttctctccagctccccatggagaaggccattgaaactgctctggactgcctgaaaagcgccaacactgagccctactaccggaggcaggcgtgggaagtgatcaaatgcttcctggtggccatgatgagcctggaggacaacaagcacgcactctaccagctcctggcacaccccaactttacagaaaagaccatccccaatgttatcatctcacatcgctacaaagcccaggacactccagcccggaagacttttgagcaggccctgacaggcgccttcatgtctgctgtcattaaggacctgcggcccagcgccctgccctttgtcgccagcttgatccgccactatacgatggtggcagtcgcccagcagtgtggccctttcttgctgccttgctaccaggtgggcagccagcccagcacagccatgtttcacagtgaagaaaatggctcgaaaggaatggatcctttggttctcattgatgcaattgctatttgtatggcatatgaagaaaaggagctttgcaaaatcggggaggtggccctagctgtgatatttgatgttgcaagtatcatcctgggctccaaggagagggcctgccagctgcccctgttttcttacatcgtggagcgcctgtgtgcatgttgttatgaacaggcgtggtatgcaaagctggggggtgtggtgtctattaagtttctcatggagcggctgcctctcacttgggttctccagaaccagcagacattcctgaaagcacttctctttgtcatgatggacttaactggagaggtttccaatggggcagtcgctatggcaaagaccacgctggagcagcttctgatgcggtgcgcaacgcctttaaaagacgaggagagagccgaagagatcgtggccgcccaggaaaagtctttccaccatgtgacacacgacttggttcgagaagtcacctctccaaactccactgtgaggaagcaggccatgcattcgctgcaggtgttggcccaggtcactgggaagagtgtcacggtgatcatggaaccccacaaagaggtcctgcaggatatggtcccccctaagaagcacctgctccgacaccagcctgccaacgcacagattggcctgatggaggggaacacgttctgtaccacgttgcagcccaggctcttcacaatggaccttaacgtggtggagcataaggtgttctacacagagtccagggagaaaatcatcgctgcactcttcaaagccctgaattccaccaatagtgagctccaagaggccggagaagcctgtatgagaaagtttttagaaggtgctaccatagaagtcgatcaaatccacacacatatgcgacctttgctgatgatgctgggagattaccggagcttgacgctgaatgttgtgaatcgcctgacttcggtcacgaggctcttcccaaattccttcaatgataaattttgtgatcagatgatgcaacatctgcgcaagtggatggaagtggtggtgatcacccacaaagggggccagaggagcgacggaaacgaaatgaagatttgctcagcaattataaacctttttcatctgatcccggctgctcctcagacactggtgaagcctttgctagaggttgtcatgaaaacggagcgggcgatgctgatcgaggcggggagtccattccgagagcccctgatcaagttcctgactcgacatccctcgcagacagtggagctgttcatgatggaagccacactgaacgatccccagtggagcagaatgtttatgagttttttaaaacacaaagacgccagacctctgcgggatgtgctggctgccaaccccaacaggttcatcaccctgctgctgccggggggtgcccagacggctgtgcgccccggttcgcccagcaccagcaccatgcgcctggacctccagttccaggccatcaagatcataagcattatagtgaaaaacgatgactcctggctggccagccagcactctctggtgagccagttgcgacgtgtgtgggtgagtgagaacttccaagagaggcaccgcaaggagaacatggcagccaccaactggaaggagcccaagctgctggcctactgcctgctgaactactgcaaaaggaattacggagatatagaattgctgttccagctgctccgagcctttactggtcgttttctctgcaacatgacattcttaaaagagtatatggaggaagagattcccaaaaattacagcatcgctcagaaacgtgccctgttctttcgctttgtagacttcaacgaccccaacttcggagatgaattaaaagctaaagttctgcagcatatcttgaatcctgctttcttgtacagctttgagaagggggaaggagagcagctcttgggacctcccaatccagaaggagataacccagaaagcatcaccagtgtgtttattaccaaggtcctggaccccgagaagcaggcggacatgctggactcgctgcggatctacctgctgcagtacgccacgctgctggtggagcacgccccccaccacatccatgacaacaacaagaaccgcaacagcaagctgcgccgcctcatgaccttcgcctggccctgcctgctctccaaggcctgcgtggacccagcctgcaagtacagcggacacttgctcctggcgcacattatcgccaaattcgccatacacaagaagatcgtcctgcaggtttttcatagtctcctcaaggctcacgcaatggaagctcgagcgatcgtcagacaggcgatggccattctgaccccggcggtgccggccaggatggaggacgggcaccagatgctgacccactggacccggaagatcattgtggaggaggggcacaccgtcccgcagctggtccacattctgcacctgatagtgcaacacttcaaggtgtactacccggtacggcaccacttggtgcagcacatggtgagcgccatgcagaggctgggcttcacgcccagtgtcaccatcgagcagaggcggctggccgtggacctgtctgaagtcgtcatcaagtgggagctgcagaggatcaaggaccagcagaaatcagtcagtaaaaccaagcgcctgtgtgtttttaagccggattcagatatggacccaaattccagtggagaaggagtcaattctgtctcatcctccattaagagaggcctgtccgtggattctgcccaggaagtgaaacgctttaggacggccaccggagccatcagtgcagtctttgggaggagccagtcgctacctggagcagactctctcctcgccaagcccattgacaagcagcacacagacactgtggtgaacttccttatccgcgtggcctgtcag

SEQ ID NO: 154147 - DNA, 333 bp, Homo sapiens
gtgtactacccggtacggcaccacttggtgcagcacatggtgagcgccatgcagaggctgggcttcacgcccagtgtcaccatcgagcagaggcggctggccgtggacctgtctgaagtcgtcatcaagtgggagctgcagaggatcaaggaccagcagaaatcagtcagtaaaaccaagcgcctgtgtgtttttaagccggattcagatatggacccaaattccagtggagaaggagtcaattctgtctcatcctccattaagagaggcctgtccgtggattctgcccaggaagtgaaacgctttaggacggccaccggagccatcagtgca

SEQ ID NO: 154148 - DNA, 5701 bp, Homo sapiens
gttaatgacaacaccaacacagcggggtcccctggggaggtgctctctcgccggtgtgtgaaccttctgaagactgcgttgcggccagacatgtggcccaagtccgaactcaagctgcagtggttcgacaagctgctgatgactgtggagcagccaaaccaagtgaactatgggaatatctgcacgggcctagaagtgctgagcttcctgctaactgtcctccagtccccagccatcctcagtagcttcaaacctctgcagcgtggaattgccgcctgcatgacatgtggaaacaccaaggtgttgcgagccgtccacagccttctctcgcgcctgatgagcattttcccaacagagccgagtacttccagtgtggcctccaaatatgaagagctggagtgcctctacgcagccgtcggaaaggtcatctatgaagggctcaccaactacgagaaggccaccaatgccaatccctcccagctcttcggtgatcagggcagctgggtcactctggccccagggacccttatgatcctcaagtctgcctgcagcaacaaccccagctacatagacaggctgatctccgtctttatgcgctccctgcagaagatggtccgggagcatttaaaccctcaggcagcgtcaggaagcaccgaagccacctcaggtacaagcgagctggtgatgctgagtctggagctggtgaagacgcgcctggcagtgatgagcatggagatgcggaagaacttcatccaggccatcctgacatccctcatcgaaaaatcaccagatgccaaaatcctccgggctgtggtcaaaatcgtggaagaatgggtcaagaataactccccaatggcagccaatcagacacctacactccgggagaagtccattttgcttgtgaagatgatgacttacatagaaaaacgctttccggaagaccttgaattaaatgcccagtttttagatcttgttaactatgtctacagggatgagaccctctctggcagcgagctgacggcgaaacttgagcctgcctttctctctgggctgcgctgtgcccagccactcatcagggcaaagtttttcgaggtttttgacaactccatgaaacgtcgtgtctacgagcgcttgctctatgtgacctgttcgcagaactgggaagccatggggaaccacttctggatcaagcagtgcattgaggttaccagtgctgtgcaggtagttctcgtccatttacctggagtgaatgaaaccaggtcaccacgtactatgtctcctgagacagctgggacagaaggtggattagttctctttgatgagaagaagggactgcttctggccgtgtgtgagaagagcacccccattggcaccagctgccaaggagccatgctcccgtccatcaccaacgtcatcaacctggccgatagccacgaccgtgccgccttcgccatggtcacacatgtcaagcaggagccccgggagcgggagaacagcgagtccaaagaggaggatgtagagatagacatcgaactagctcctggggatcagaccagcacgcccaaaaccaaagaactttcagaaaagggacattggaaaccagctgcacatgctaaccaacaggcacgacaagtttctggacactctccgagaggtgaagactggagcgctgctcagcgctttcgttcagctgtgccacatttccacgacgcttgcagagaagacgtgggtccagcttttccccagattgtggaagatcctctctgacagacagcagcatgcactcgcgggtgagataagtccatttctgtgcagcggcagtcaccaggtgcagcgggactgccagcccagcgcgctgaactgctttgtggaagccatgtcccagtgcgtgccgccaatccccatccgaccctgcgtcctgaagtacctggggaagacacacaacctctggttccggtccacgctgatgttggagcaccaggcttttgaaaagggtctgagtcttcagattaagccgaagcaaacaacggagttttatgagcaggagagcatcaccccgccgcagcaggagatactggattcccttgcggagctttactccctgttacaagaggaagatatgtgggctggtctgtggcagaagcggtgcaagtactcggagacagcgactgcgattgcttacgagcagcacgggttctttgagcaggcacaagaatcctatgaaaaggcaatggataaagccaaaaaagaacatgagaggagtaacgcctcccctgctattttccctgaataccagctctgggaagaccactggattcgatgctccaaggaattgaaccagtgggaagccctgacggagtacggtcagtccaaaggccacatcaacccctacctcgtcctggagtgcgcctggcgggtgtccaactggactgccatgaaggaggcgctggtgcaggtggaagtgagctgtccgaaggagatggcctggaaggtgaacatgtaccgcggatacctggccatctgccaccccgaggagcagcagctcagcttcatcgagcgcctggtggagatggccagcagcctggccatccgcgagtggcggcggctgccccacgtagtgtcccacgtgcacacgcctctcctacagagtctcttatgctggtcccatcaggcagcccagcaaatcatcgaactccaggaagctgcacaaatcaacgcaggcttacagccaaccaacctgggaaggaacaacagcctgcacgacatgaagacggtggtgaagacctggaggaaccgactgcccatcgtgtctgacgacttgtcccactggagcagcatcttcatgtggaggcagcatcattaccaggcgattgtaactgcctatgagaatagctctcagcatgatcccagttcaaataacgctatgcttggggttcatgcatcagcttcagcgatcatccagtatggaaaaatcgcccggaaacaaggactggtcaatgtagctctggatatattaagtcggattcatactattccaactgttcctatcgtggattgcttccagaagattcgacagcaagttaaatgctacctccagctggcaggcgtcatgggcaaaaacgagtgcatgcaggtgcggacaggacacttgaagaatgaggccaggtccgaggaggcaaacaaagccttctctgcagctgtgcagatgcacgatgtgctggtgaaagcctgggccatgtggggcgactacctggagaacatctttgtgaaggagcggcagctgcacctgggcgtgtctgccatcacctgctacctgcacgcctgccggcatcagaacgagagcaaatcgaggaaatacttagccaaggtgctgtggcttttgagttttgatgatgacaaaaacactttggcagatgccgtcgacaagtactgcattggtgtgccacccatccagtggctggcctggatcccacagctgctcacctgcctggttggctcggagggaaagctgctcttgaacctcattagccaggttggacgcgtgtatccccaagcggtctactttcccatccggaccctgtacctgaccctgaaaatagaacagcgggaacgctacaagagcgcgctccgagccctggcgtctgtcggttttgcgctgacactggcgttgtgtgtgttgctctcagattctggacagcagcagccaagttcagtgggtaaccagtcccattctgcatcagatccagggcccataagagcaacagcacccatgtggcgctgcagccgaatcatgcacatgcagcgagagctccaccccacccttctgtcttccctggaaggcatcgtcgatcagatggtctggttcagagaaaattggcatgaagaggttctcaggcagctccaacagggcctggcgaaatgttactccgtggcgtttgagaaaagtggagcggtgtccgatgctaaaatcaccccccacactctcaattttgtgaagaagttggtgagcacgtttggggtgggcctggagaatgtgtccaacgtctcgaccatgttctccagcgcagcctctgagtctctggcccggcgggcgcaggccactgcacaagaccctgtctttcagaagctgaaaggccagttcacgacgggccacactctgcgcactccagccttggggccagccctggtctgggttcagcatgccactgccgccgtctccagcactcgccagccggcgtcacttgggcaactgaccaacaagtggggcaggccgcagcctagctctctgccccagcgctgggatcagagggcgctgtgtgggcctggcccctgctttgctgcagttttggttgggttcgtcctgacctccagtcgccctgattttgacttcagcgttccaggatccatgaagcttcataatcttatttctaagttgaaaaagtggatcaaaatcttggaggccaagaccaagcaactccccaaattcttcctcatagaggaaaagtgccggttcttgagcaatttctcggcacagacagctgaagtgggaaattcctgggggagtttctgcatgccaaagccaacggcattattacatcaagattgcacggttcatgccccgggtagagattgtgcagaagcacaacaccgcagcccgtcggctgtacatccggggacacaatggcaagatctacccatacctcgtcatgaacgacgcctgccttcacagagttcacggcgagaggagcgtgtgttgcagctgctgcgttctgctggaacccctgtttgggagaagagaaaggagaccaccaagaggcacttgtttttcacagtgccccgggttgtggcagtttccccacagatgcgcctcgtggaggacaacccctcttcactttcccttgtggagatctacaagcagcgctgcgccaagaagggcatcgagcatgacaaccccatctcccgttactatgaccggctggctacggtgcaggcgcggggaacccaagccagccaccaggtcctccgcgacatcctcaaggaggttcagagtaacatggtgccgcgcagcatgctcaaggagtgggcgctgcacaccttccccaatgccacggactactggacgttccggaagatgttcaccatccagctggctctgataggcttcgcggaattcgtcctgcatttaaatagactcaaccccgagatgttacagatcgctcaggacactggcaaactgaatgttgcctactttcgatttgacataaacgacgcgactggagacctggatgccaaccgtcctgtcccatttcgactcacgcccaacatttctgagtttctgaccaccatcggggtctccggcccgttgacagcgtccatgattgcggtcgcccggtgcttcgcccagccaaactttaaggtggatggcattctgaaaacggttctccgggacgagatcattgcttggcacaaaaaaacacaagaggacacgtcctctcctctctcggccgccgggcagccagagaacatggacagccagcaactggtgtccctggttcagaaagccgtcaccgccatcatgacccgcctgcacaacctcgcccagttcgaaggcggggaaagcaaggtgaacaccctggtggccgcggcaaacagcctggacaatctgtgccgcatggaccccgcctggcacccctggctgtga

SEQ ID NO: 154149 - DNA, 12646 bp, Homo sapiens
  misc_feature (1)...(12646): n = a,t,c or g
acatttcgtccgagaggtcgggtgggacgttgggggcctgtttttccggaggcgccccccggccaacctggcaccttcgggcctctacgccggcactggactcgttaggcccggcgcggggagcgaaggctggttgaactcatggacccgatacttttctctggagaagcaaaccagcccaaaagaaaaatggcgtttgttgcaacacagggggccacggaggttgaccagaccactttgatgaaaaagtaccttcagtttgtggcagctctcacagatgtgaatacacctgatgaaacaaagttgaaaatgatgcacgaagttagtgaaaattttgagaatggcacgtcatctcctcagtattctacattcctagaacatatcatccctcgagtccttacatttctccaagatggagaagttcagtttcttcaggagaaaccagcacagcaactgcggaagctcgtacttgaaataattcatagaataccaaccaacgaacatcttcgtcctcacacaaaaaatgttttgtctgtgatgtttcgctttttagagacggaaaatgaagaaaatgttcttatttgtctaagaataattattgagctacacaaacagttcaggccaccgatcacacaagaaattcatcattttctggattttgtgaaacagatttacaaggagcttccaaaagtagtgaaccgctactttgagaaccctcaagtgatccccgagaacacagtgcctcccccagaaatggttggtatgataacaacgattgctgtgaaagtcaacccggagcgtgaggacagtgagactcgaacacattccatcattccgaggggatcactttctctgaaagtgttggcagaattgcccattattgttgttttaatgtatcagctctacaaactgaacatccacaatgttgttgctgagtttgtgcccttgatcatgaacaccattgccattcaggtgtctgcacaagcgaggcaacataagctttacaacaaggagttgtatgctgacttcattgctgctcagattaaaacattgtcatttttagcttacattatcaggatttaccaggagttggtgactaagtattctcagcagatggtgaaaggaatgctccagttactttcaaattgtccagcagagactgcacacctcagaaaggagcttctgattgctgccaaacacatcctcaccacagagctgagaaaccagttcattccttgcatggacaagctgtttgatgaatccatactaattggctcaggatatactgccagagagactctaaggcccctcgcctacagcacgctggccgacctcgtgcaccatgtccgccagcacctgcccctcagcgacctctccctcgccgtccagctcttcgccaagaacatcgacgatgagtccctgcccagcagcatccagaccatgtcctgcaagctcctgctgaacctggtggactgcatccgttccaagagcgagcaggagagtggcaatgggagagacgtcctgatgcggatgctggaggttttcgttctcaaattccacacaattgctcggtaccagctctctgccatttttaagaagtgtaagcctcagtcagaacttggagccgtggaagcagctctgcctggggtgcccactgcccctgcagctcctggccctgctccctccccagcccctgtccctgccccacctccacccccgcccccacccccacctgccacccctgtgaccccggcccccgtgcctcccttcgagaagcaaggagaaaaggacaaggaagacaagcagacattccaagtcacagactgtcgaagtttggtcaaaaccttggtgtgtggtgtcaagacaatcacgtggggcataacatcatgcaaagcacctggtgaagctcagttcattcccaacaagcagttacaacccaaagagacacagatttacatcaaacttgtgaaatatgcaatgcaagctttagatatttatcaggtccagatagcaggaaatggacagacatacatccgtgtggccaactgccagactgtgagaatgaaagaggagaaggaggtattggagcatttcgctggtgtgttcacaatgatgaaccccttaacgttcaaagaaatcttccaaactacggtcccttatatggtggagagaatctcaaaaaattatgctcttcagattgttgccaattccttcttggcaaatcctactacctctgctctgtttgctacgattctggtggaatatctccttgatcgcctgccagaaatgggctccaacgtggagctctccaacctgtacctcaagctgttcaagctggtctttggctctgtctccctctttgcagctgaaaatgaacaaatgctgaagcctcacttgcacaagattgtgaacagctctatggagctcgcgcagactgccaaggaaccctacaactacttcttgctgctacgggcgctgtttcgctctattggtggaggtagccacgatctcttgtatcaggagttcttgcctctccttccaaacctcctgcaagggctgaacatgcttcagagtggcctgcacaagcagcacatgaaggacctctttgtggagctgtgtctcaccgtccctgtgcggctgagctcgcttttgccgtacctgcccatgcttatggatcccttggtgtctgcactcaatgggtctcagacattggtcagccaaggcctcaggacgctggagctgtgtgtggacaacctgcagcccgacttcctctacgaccacatccagccggtgcgcgcagagcttatgcaggctctgtggcgcaccttacgcaaccctgctgacagcatctcccacgtggcctaccgtgtgctcggtaagtttggcggcagtaacaggaagatgctgaaggagtcgcagaagctgcactacgttgtgaccgaggttcagggccccagcatcactgtggagttttccgactgcaaagcttctctccagctccccatggagaaggccattgaaactgctctggactgcctgaaaagcgccaacactgagccctactaccggaggcaggcgtgggaagtgatcaaatgcttcctggtggccatgatgagcctggaggacaacaagcacgcactctaccagctcctggcacaccccaactttacagaaaagaccatccccaatgttatcatctcacatcgctacaaagcccaggacactccagcccggaagacttttgagcaggccctgacaggcgccttcatgtctgctgtcattaaggacctgcggcccagcgccctgccctttgtcgccagcttgatccgccactatacgatggtggcagtcgcccagcagtgtggccctttcttgctgccttgctaccaggtgggcagccagcccagcacagccatgtttcacagtgaagaaaatggctcgaaaggaatggatcctttggttctcattgatgcaattgctatttgtatggcatatgaagaaaaggagctttgcaaaatcggggaggtggccctagctgtgatatttgatgttgcaagtatcatcctgggctccaaggagagggcctgccagctgcccctgttttcttacatcgtggagcgcctgtgtgcatgttgttatgaacaggcgtggtatgcaaagctggggggtgtggtgtctattaagtttctcatggagcggctgcctctcacttgggttctccagaaccagcagacattcctgaaagcacttctctttgtcatgatggacttaactggagaggtttccaatggggcagtcgctatggcaaagaccacgctggagcagcttctgatgcggtgcgcaacgcctttaaaagacgaggagagagccgaagagatcgtggccgcccaggaaaagtctttccaccatgtgacacacgacttggttcgagaagtcacctctccaaactccactgtgaggaagcaggccatgcattcgctgcaggtgttggcccaggtcactgggaagagtgtcacggtgatcatggaaccccacaaagaggtcctgcaggatatggtcccccctaagaagcacctgctccgacaccagcctgccaacgcacagattggcctgatggaggggaacacgttctgtaccacgttgcagcccaggctcttcacaatggaccttaacgtggtggagcataaggtgttctacacagagctgttgaatttgtgtgaggctgaagattcagctttaacaaagctgccctgttataaaagccttccgtcactcgtacctttacgaattgcggcattaaatgcacttgctgcctgcaattaccttcctcagtccagggagaaaatcatcgctgcactcttcaaagccctgaattccaccaatagtgagctccaagaggccggagaagcctgtatgagaaagtttttagaaggtgctaccatagaagtcgatcaaatccacacacatatgcgacctttgctgatgatgctgggagattaccggagcttgacgctgaatgttgtgaatcgcctgacttcggtcacgaggctcttcccaaattccttcaatgataaattttgtgatcagatgatgcaacatctgcgcaagtggatggaagtggtggtgatcacccacaaagggggccagaggagcgacggaaacgaaatgaagatttgctcagcaattataaacctttttcatctgatcccggctgctcctcagacactggtgaagcctttgctagaggttgtcatgaaaacggagcgggcgatgctgatcgaggcggggagtccattccgagagcccctgatcaagttcctgactcgacatccctcgcagacagtggagctgttcatgatggaagccacactgaacgatccccagtggagcagaatgtttatgagttttttaaaacacaaagacgccagacctctgcgggatgtgctggctgccaaccccaacaggttcatcaccctgctgctgccggggggtgcccagacggctgtgcgccccggttcgcccagcaccagcaccatgcgcctggacctccagttccaggccatcaagatcataagcattatagtgaaaaacgatgactcctggctggccagccagcactctctggtgagccagttgcgacgtgtgtgggtgagtgagaacttccaagagaggcaccgcaaggagaacatggcagccaccaactggaaggagcccaagctgctggcctactgcctgctgaactactgcaaaaggaattacggagatatagaattgctgttccagctgctccgagcctttactggtcgttttctctgcaacatgacattcttaaaagagtatatggaggaagagattcccaaaaattacagcatcgctcagaaacgtgccctgttctttcgctttgtagacttcaacgaccccaacttcggagatgaattaaaagctaaagttctgcagcatatcttgaatcctgctttcttgtacagctttgagaagggggaaggagagcagctcttgggacctcccaatccagaaggagataacccagaaagcatcaccagtgtgtttattaccaaggtcctggaccccgagaagcaggcggacatgctggactcgctgcggatctacctgctgcagtacgccacgctgctggtggagcacgccccccaccacatccatgacaacaacaagaaccgcaacagcaagctgcgccgcctcatgaccttcgcctggccctgcctgctctccaaggcctgcgtggacccagcctgcaagtacagcggacacttgctcctggcgcacattatcgccaaattcgccatacacaagaagatcgtcctgcaggtttttcatagtctcctcaaggctcacgcaatggaagctcgagcgatcgtcagacaggcgatggccattctgaccccggcggtgccggccaggatggaggacgggcaccagatgctgacccactggacccggaagatcattgtggaggaggggcacaccgtcccgcagctggtccacattctgcacctgatagtgcaacacttcaaggtgtactacccggtacggcaccacttggtgcagcacatggtgagcgccatgcagaggctgggcttcacgcccagtgtcaccatcgagcagaggcggctggccgtggacctgtctgaagtcgtcatcaagtgggagctgcagaggatcaaggaccagcagccggattcagatatggacccaaattccagtggagaaggagtcaattctgtctcatcctccattaagagaggcctgtccgtggattctgcccaggaagtgaaacgctttaggacggccaccggagccatcagtgcagtctttgggaggagccagtcgctacctggagcagactctctcctcgccaagcccattgacaagcagcacacagacactgtggtgaacttccttatccgcgtggcctgtcaggttaatgacaacaccaacacagcggggtcccctggggaggtgctctctcgccggtgtgtgaaccttctgaagactgcgttgcggccagacatgtggcccaagtccgaactcaagctgcagtggttcgacaagctgctgatgactgtggagcagccaaaccaagtgaactatgggaatatctgcacgggcctagaagtgctgagcttcctgctaactgtcctccagtccccagccatcctcagtagcttcaaacctctgcagcgtggaattgccgcctgcatgacatgtggaaacaccaaggtgttgcgagccgtccacagccttctctcgcgcctgatgagcattttcccaacagagccgagtacttccagtgtggcctccaaatatgaagagctggagtgcctctacgcagccgtcggaaaggtcatctatgaagggctcaccaactacgagaaggccaccaatgccaatccctcccagctcttcgggacccttatgatcctcaagtctgcctgcagcaacaaccccagctacatagacaggctgatctccgtctttatgcgctccctgcagaagatggtccgggagcatttaaaccctcaggcagcgtcaggaagcaccgaagccacctcaggtacaagcgagctggtgatgctgagtctggagctggtgaagacgcgcctggcagtgatgagcatggagatgcggaagaacttcatccaggccatcctgacatccctcatcgaaaaatcaccagatgccaaaatcctccgggctgtggtcaaaatcgtggaagaatgggtcaagaataactccccaatggcagccaatcagacacctacactccgggagaagtccattttgcttgtgaagatgatgacttacatagaaaaacgctttccggaagaccttgaattaaatgcccagtttttagatcttgttaactatgtctacagggatgagaccctctctggcagcgagctgacggcgaaacttgagcctgcctttctctctgggctgcgctgtgcccagccactcatcagggcaaagtttttcgaggtttttgacaactccatgaaacgtcgtgtctacgagcgcttgctctatgtgacctgttcgcagaactgggaagccatggggaaccacttctggatcaagcagtgcattgagctgcttctggccgtgtgtgagaagagcacccccattggcaccagctgccaaggagccatgctcccgtccatcaccaacgtcatcaacctggccgatagccacgaccgtgccgccttcgccatggtcacacatgtcaagcaggagccccgggagcgggagaacagcgagtccaaagaggaggatgtagagatagacatcgaactagctcctggggatcagaccagcacgcccaaaaccaaagaactttcagaaaaggacattggaaaccagctgcacatgctaaccaacaggcacgacaagtttctggacactctccgagaggtgaagactggagcgctgctcagcgctttcgttcagctgtgccacatttccacgacgctggcagagaagacgtgggtccagcttttccccagattgtggaagatcctctctgacagacagcagcatgcactcgcgggtgagataagtccatttctgtgcagcggcagtcaccaggtgcagcgggactgccagcccagcgcgctgaactgctttgtggaagccatgtcccagtgcgtgccgccaatccccatccgaccctgcgtcctgaagtacctggggaagacacacaacctctggttccggtccacgctgatgttggagcaccaggcttttgaaaagggtctgagtcttcagattaagccgaagcaaacaacggagttttatgagcaggagagcatcaccccgccgcagcaggagatactggattcccttgcggagctttactccctgttacaagaggaagatatgtgggctggtctgtggcagaagcggtgcaagtactcggagacagcgactgcgattgcttacgagcagcacgggttctttgagcaggcacaagaatcctatgaaaaggcaatggataaagccaaaaaagaacatgagaggagtaacgcctcccctgctattttccctgaataccagctctgggaagaccactggattcgatgctccaaggaattgaaccagtgggaagccctgacggagtacggtcagtccaaaggccacatcaacccctacctcgtcctggagtgcgcctggcgggtgtccaactggactgccatgaaggaggcgctggtgcaggtggaagtgagctgtccgaaggagatggcctggaaggtgaacatgtaccgcggatacctggccatctgccaccccgaggagcagcagctcagcttcatcgagcgcctggtggagatggccagcagcctggccatccgcgagtggcggcggctgccccacgtagtgtcccacgtgcacacgcctctcctacaggcagcccagcaaatcatcgaactccaggaagctgcacaaatcaacgcaggcttacagccaaccaacctgggaaggaacaacagcctgcacgacatgaagacggtggtgaagacctggaggaaccgactgcccatcgtgtctgacgacttgtcccactggagcagcatcttcatgtggaggcagcatcattaccaggcgattgtaactgcctatgagaatagctctcagcatgatcccagttcaaataacgctatgcttggggttcatgcatcagcttcagcgatcatccagtatggaaaaatcgcccggaaacaaggactggtcaatgtagctctggatatattaagtcggattcatactattccaactgttcctatcgtggattgcttccagaagattcgacagcaagttaaatgctacctccagctggcaggcgtcatgggcaaaaacgagtgcatgcagggccttgaagttattgaatctacaaatttaaaatacttcacaaaagagatgacagccgaattttatgcactgaagggaatgttcttggctcagatcaacaagtccgaggaggcaaacaaagccttctctgcagctgtgcagatgcacgatgtgctggtgaaagcctgggccatgtggggcgactacctggagaacatctttgtgaaggagcggcagctgcacctgggcgtgtctgccatcacctgctacctgcacgcctgccggcatcagaacgagagcaaatcgaggaaatacttagccaaggtgctgtggcttttgagttttgatgatgacaaaaacactttggcagatgccgtcgacaagtactgcattggtgtgccacccatccagtggctggcctggatcccacagctgctcacctgcctggttggctcggagggaaagctgctcttgaacctcattagccaggttggacgcgtgtatccccaagcggtctactttcccatccggaccctgtacctgaccctgaaaatagaacagcgggaacgctacaagagcgatccagggcccataagagcaacagcacccatgtggcgctgcagccgaatcatgcacatgcagcgagagctccaccccacccttctgtcttccctggaaggcatcgtcgatcagatggtctggttcagagaaaattggcatgaagaggttctcaggcagctccaacagggcctggcgaaatgttactccgtggcgtttgagaaaagtggagcggtgtccgatgctaaaatcaccccccacactctcaattttgtgaagaagttggtgagcacgtttggggtgggcctggagaatgtgtccaacgtctcgaccatgttctccagcgcagcctctgagtctctggcccggcgggcgcaggccactgcacaagaccctgtctttcagaagctgaaaggccagttcacgacggattttgacttcagcgttccaggatccatgaagcttcataatcttatttctaagttgaaaaagtggatcaaaatcttggaggccaagaccaagcaactccccttattcttcctctatagaggaatattgccggttcttgagcaatttctcgtcacagacagctgaagtggatattcctggggagtttctgatgcctaatgcctacgcattattacatcaagattgcacggttcatgccccgggtagagattgtgcagaagcacatattccgcagcccggcggctgttacatccggggacacaatgggcaagatctacccataccttcgttcatggaacgacgccttgccttcacagagttcacgggcgaggagggagcgtgttgtttggcagctgctgcgcctgctgtaccccttcttggagaagattaaggagaccaccaagaggcacttgtttttcacagtgccccgggttgtggcagtttccccacagatgcgcctcgtggaggacaacccctcttcactttcccttgtggagatctacaagcagcgctgcgccaagaagggcatcgagcatgacaaccccatctcccgttactatgaccggctggctacggtgcaggcgcggggaacccaagccagccaccaggtcctccgcgacatcctcaaggaggttcagagtaacatggtgccgcgcagcatgctcaaggagtgggcgctgcacaccttccccaatgccacggactactggacgttccggaagatgttcaccatccagctggctctgataggcttcgcggaattcgtcctgcatttaaatagactcaaccccgagatgttacagatcgctcaggacactggcaaactgaatgttgcctactttcgatttgacataaacgacgcgactggagacctggatgccaaccgtcctgtcccatttcgactcacgcccaacatttctgagtttctgaccaccatcggggtctccggcccgttgacagcgtccatgattgcggtcgcccggtgcttcgcccagccaaactttaaggtggatggcattctgaaaacggttctccgggacgagatcattgcttggcacaaaaaaacacaagaggacacgtcctctcctctctcggccgccgggcagccagagaacatggacagccagcaactggtgtccctggttcagaaagccgtcaccgccatcatgacccgcctgcacaacctcgcccagttcgaaggcggggaaagcaaggtgaacaccctggtggccgcggcaaacagcctgggacaatctgtgccgcatggaccccgcctggcacccctgggcttgtgactgtggccgccacggcacgcgggaatgtgaagggcgctccgggctctgagcccgcagcttttacgacttctccctgcgtcgttccttatattcacagaagccccattagttttcactgggttgcggttattttcctggtagtttgcgtgtaagaaagggagaatatagttttagaggaagctgaactatgacgatgctgggcgaacggtttgggaaatggcagagctgaaacttattccaagctttcaaaataatcttttaagaagccaggattctccggtcctggaatttctgagtgagtcctttttttatggtgtcctccctctgtgaatgtacaggcggaactgtaccgaacagctcccttccatccatttttaactctttcggaaataacacctcacaagcagcttcgtgcttttggtacaagacctttgtaacaagtgtacagaaaactccattttggtttgagaaaccagggagttgatggaacccatcatgctggtttttctctgagcacaaagttttaggctgtacacagccagccttgggaatctcgttgagcgttcggcgtggatccacggggccaggccaccctgcgggagcgccacacgcatccacttcggattcagcgggtgaagacagacctctgagagtctgcaggcggctcctgtgctttttatttctgggctcttcggatgtcttctaggacatttactatcactgcacctgaagaaaaaatcacttttaccttcctaatttaaaaagacaaaacagaaatgtacgttccttcgctagctttagtctttctgttcccatttttataaatctgagcattgataatgttctatctaaatttgtacagtgtgattttttttttagaataatattttataaagggaaaaaaaaaaaaaaggtgcggccnagcttatccctnaggggggtaa

SEQ ID NO: 154150 - DNA, 12638 bp, Homo sapiens
  misc_feature (1)...(12638): n = a,t,c or g
cgagggctcggctgggggtcgccggggtcgcgggccgggcctgcaggagccgggccgccgaggtcggggctggttgaactcatggacctgatacttttctcttgagaagcaaaccagcccaaaagaaaaatggcgtttgttgcaacacagggggccacggtggttgaccagaccactttgatgaaaaagtaccttcagtttgtggcagctctcacagatgtgaatacacctgatgaaacaaagttgaaaatgatgcaagaagttagtgaaaattttgagaatgtcacgtcatctcctcagtattctacattcctagaacatatcatccctcgattccttacatttctccaagatggagaagttcagtttcttcaggagaaaccagcacagcaactgcggaagctcgtacttgaaataattcatagaataccaaccaacgaacatcttcgtcctcacacaaaaaatgttttgtctgtgatgtttcgctttttagagacggaaaatgaagaaaatgttcttatttgtctaagaataattattgagctacacaaacagttcaggccaccgatcacacaagaaattcatcattttctggattttgtgaaacagatttacaaggagcttccaaaagtagtgaaccgctactttgagaaccctcaagtgatccccgagaacacagtgcctcccccagaaatggttggtatgataacaacgattgctgtgaaagtcaacccggagcgtgaggacagtgagactcgaacacattccatcattccgaggggatcactttctctgaaagtgttggcagaattgcccattattgttgttttaatgtatcagctctacaaactgaacatccacaatgttgttgctgagtttgtgcccttgatcatgaacaccattgccattcaggtgtctgcacaagcgaggcaacataagctttacaacaaggagttgtatgctgacttcattgctgctcagattaaaacattgtcatttttagcttacattatcaggatttaccaggagttggtgactaagtattctcagcagatggtgaaaggaatgctccagttactttcaaattgtccagcagagactgcacacctcagaaaggagcttctgattgctgccaaacacatcctcaccacagagctgagaaaccagttcattccttgcatggacaagctgtttgatgaatccatactaattggctcaggatatactgccagagagactctaaggcccctcgcctacagcacgctggccgacctcgtgcaccatgtccgccagcacctgcccctcagcgacctctccctcgccgtccagctcttcgccaagaacatcgacgatgagtccctgcccagcagcatccagaccatgtcctgcaagctcctgctgaacctggtggactgcatccgttccaagagcgagcaggagagtggcaatgggagagacgtcctgatgcggatgctggaggttttcgttctcaaattccacacaattgctcggtaccagctctctgccatttttaagaagtgtaagcctcagtcagaacttggagccgtggaagcagctctgcctggggtgcccactgcccctgcagctcctggccctgctccctccccagcccctgtccctgccccacctccacccccgcccccacccccacctgccacccctgtgaccccggcccccgtgcctcccttcgagaagcaaggagaaaaggacaaggaagacaagcagacattccaagtcacagactgtcgaagtttggtcaaaaccttggtgtgtggtgtcaagacaatcacgtggggcataacatcatgcaaagcacctggtgaagctcagttcattcccaacaagcagttacaacccaaagagacacagatttacatcaaacttgtgaaatatgcaatgcaagctttagatatttatcaggtccagatagcaggaaatggacagacatacatccgtgtggccaactgccagactgtgagaatgaaagaggagaaggaggtattggagcatttcgctggtgtgttcacaatgatgaaccccttaacgttcaaagaaatcttccaaactacggtcccttatatggtggacagaatctcaaaaaattatgctcttcagattgttgccaattccttcttggcaaatcctactacctctgctctgtttgctacgattctggtggaatatctccttgatcgcctgccagaaatgggctccaacgtggagctctccaacctgtacctcaagctgttcaagctggtctttggctctgtctccctctttgcagctgaaaatgaacaaatgctgaagcctcacttgcacaagattgtgaacagctctatggagctcgcgcagactgccaaggaaccctacaactacttcttgctgctacgggcgctgtttcgctctattggtggaggtagccacgatctcttgtatcaggagttcttgcctctccttccaaacctcctgcaagggctgaacatgcttcagagtggcctgcacaagcagcacatgaaggacctctttgtggagctgtgtctcaccgtccctgtgcggctgagctcgcttttgccgtacctgcccatgcttatggatcccttggtgtctgcactcaatgggtctcagacattggtcagccaaggcctcaggacgctggagctgtgtgtggacaacctgcagcccgacttcctctacgaccacatccagccggtgcgcgcagagctcatgcaggctctgtggcgcaccttacgcaaccctgctgacagcatctcccacgtggcctaccgtgtgctcggtaagtttggcggcagtaacaggaagatgctgaaggagtcgcagaagctgcactacgttgtgaccgaggttcagggccccagcatcactgtggagttttccgactgcaaagcttctctccagctccccatggagaaggccattgaaactgctctggactgcctgaaaagcgccaacactgagccctactaccggaggcaggcgtgggaagtgatcaaatgcttcctggtggccatgatgagcctggaggacaacaagcacgcactctaccagctcctggcacaccccaactttacagaaaagaccatccccaatgttatcatctcacatcgctacaaagcccaggacactccagcccggaagacttttgagcaggccctgacaggcgccttcatgtctgctgtcattaaggacctgcggcccagcgccctgccctttgtcgccagcttgatccgccactatacgatggtggcagtcgcccagcagtgtggccctttcttgctgccttgctaccaggtgggcagccagcccagcacagccatgtttcacagtgaagaaaatggctcgaaaggaatggatcctttggttctcattgatgcaattgctatttgtatggcatatgaagaaaaggagctttgcaaaatcggggaggtggccctagctgtgatatttgatgttgcaagtatcatcctgggctccaaggagagggcctgccagctgcccctgttttcttacatcgtggagcgcctgtgtgcatgttgttatgaacaggcgtggtatgcaaagctggggggtgtggtgtctattaagtttctcatggagcggctgcctctcacttgggttctccagaaccagcagacattcctgaaagcacttctctttgtcatgatggacttaactggagaggtttccaatggggcagtcgctatggcaaagaccacgctggagcagcttctgatgcggtgcgcaacgcctttaaaagacgaggagagagccgaagagatcgtggccgcccaggaaaagtctttccaccatgtgacacacgacttggttcgagaagtcacctctccaaactccactgtgaggaagcaggccatgcattcgctgcaggtgttggcccaggtcactgggaagagtgtcacggtgatcatggaaccccacaaagaggtcctgcaggatatggtcccccctaagaagcacctgctccgacaccagcctgccaacgcacagattggcctgatggaggggaacacgttctgtaccacgttgcagcccaggctcttcacaatggaccttaacgtggtggagcataaggtgttctacacagagctgttgaatttgtgtgaggctgaagattcagctttaacaaagctgccctgttataaaagccttccgtcactcgtacctttacgaattgcggcattaaatgcacttgctgcctgcaattaccttcctcagtccagggagaaaatcatcgctgcactcttcaaagccctgaattccaccaatagtgagctccaagaggccggagaagcctgtatgagaaagtttttagaaggtgctaccatagaagtcgatcaaatccacacacatatgcgacctttgctgatgatgctgggagattaccggagcttgacgctgaatgttgtgaatcgcctgacttcggtcacgaggctcttcccaaattccttcaatgataaattttgtgatcagatgatgcaacatctgcgcaagtggatggaagtggtggtgatcacccacaaagggggccagaggagcgacggaaacgaaagcatttccgagtgcgggagatgtcccttgtctccattctgtcagtttgaggaaatgaagatttgctcagcaattataaacctttttcatctgatcccggctgctcctcagacactggtgaagcctttgctagaggttgtcatgaaaacggagcgggcgatgctgatcgaggcggggagtccattccgagagcccctgatcaagttcctgactcgacatccctcgcagacagtggagctgttcatgatggaagccacactgaacgatccccagtggagcagaatgtttatgagttttttaaaacacaaagacgccagacctctgcgggatgtgctggctgccaaccccaacaggttcatcaccctgctgctgccggggggtgcccagacggctgtgcgccccggttcgcccagcaccagcaccatgcgcctggacctccagttccaggccatcaagatcataagcattatagtgaaaaacgatgactcctggctggccagccagcactctctggtgagccagttgcgacgtgtgtgggtgagtgagaacttccaagagaggcaccgcaaggagaacatggcagccaccaactggaaggagcccaagctgctggcctactgcctgctgaactactgcaaaaggaattacggagatatagaattgctgttccagctgctccgagcctttactggtcgttttctctgcaacatgacattcttaaaagagtatatggaggaagagattcccaaaaattacagcatcgctcagaaacgtgccctgttctttcgctttgtagacttcaacgaccccaacttcggagatgaattaaaagctaaagttctgcagcatatcttgaatcctgctttcttgtacagctttgagaagggggaaggagagcagctcttgggacctcccaatccagaaggagataacccagaaagcatcaccagtgtgtttattaccaaggtcctggaccccgagaagcaggcggacatgctggactcgctgcggatctacctgctgcagtacgccacgctgctggtggagcacgccccccaccacatccatgacaacaacaagaaccgcaacagcaagctgcgccgcctcatgaccttcgcctggccctgcctgctctccaaggcctgcgtggacccagcctgcaagtacagcggacacttgctcctggcgcacattatcgccaaattcgccatacacaagaagatcgtcctgcaggtttttcatagtctcctcaaggctcacgcaatggaagctcgagcgatcgtcagacaggcgatggccattctgaccccggcggtgccggccaggatggaggacgggcaccagatgctgacccactggacccggaagatcattgtggaggaggggcacaccgtcccgcagctggtccacattctgcacctgatagtgcaacacttcaaggtgtactacccggtacggcaccacttggtgcagcacatggtgagcgccatgcagaggctgggcttcacgcccagtgtcaccatcgagcagaggcggctggccgtggacctgtctgaagtcgtcatcaagtgggagctgcagaggatcaaggaccagcagccggattcagatatggacccaaattccagtggagaaggagtcaattctgtctcatcctccattaagagaggcctgtccgtggattctgcccaggaagtgaaacgctttaggacggccaccggagccatcagtgcagtctttgggaggagccagtcgctacctggagcagactctctcctcgccaagcccattgacaagcagcacacagacactgtggtgaacttccttatccgcgtggcctgtcaggttaatgacaacaccaacacagcggggtcccctggggaggtgctctctcgccggtgtgtgaaccttctgaagactgcgttgcggccagacatgtggcccaagtccgaactcaagctgcagtggttcgacaagctgctgatgactgtggagcagccaaaccaagtgaactatgggaatatctgcacgggcctagaagtgctgagcttcctgctaactgtcctccagtccccagccatcctcagtagcttcaaacctctgcagcgtggaattgccgcctgcatgacatgtggaaacaccaaggtgttgcgagccgtccacagccttctctcgcgcctgatgagcattttcccaacagagccgagtacttccagtgtggcctccaaatatgaagagctggagtgcctctacgcagccgtcggaaaggtcatctatgaagggctcaccaactacgagaaggccaccaatgccaatccctcccagctcttcgggacccttatgatcctcaagtctgcctgcagcaacaaccccagctacatagacaggctgatctccgtctttatgcgctccctgcagaagatggtccgggagcatttaaaccctcaggcagcgtcaggaagcaccgaagccacctcaggtacaagcgagctggtgatgctgagtctggagctggtgaagacgcgcctggcagtgatgagcatggagatgcggaagaacttcatccaggccatcctgacatccctcatcgaaaaatcaccagatgccaaaatcctccgggctgtggtcaaaatcgtggaagaatgggtcaagaataactccccaatggcagccaatcagacacctacactccgggagaagtccattttgcttgtgaagatgatgacttacatagaaaaacgctttccggaagaccttgaattaaatgcccagtttttagatcttgttaactatgtctacagggatgagaccctctctggcagcgagctgacggcgaaacttgagcctgcctttctctctgggctgcgctgtgcccagccactcatcagggcaaagtttttcgaggtttttgacaactccatgaaacgtcgtgtctacgagcgcttgctctatgtgacctgttcgcagaactgggaagccatggggaaccacttctggatcaagcagtgcattgagctgcttctggccgtgtgtgagaagagcacccccattggcaccagctgccaaggagccatgctcccgtccatcaccaacgtcatcaacctggccgatagccacgaccgtgccgccttcgccatggtcacacatgtcaagcaggagccccgggagcgggagaacagcgagtccaaagaggaggatgtagagatagacatcgaactagctcctggggatcagaccagcacgcccaaaaccaaagaactttcagaaaaggacattggaaaccagctgcacatgctaaccaacaggcacgacaagtttctggacactctccgagaggtgaagactggagcgctgctcagcgctttcgttcagctgtgccacatttccacgacgctggcagagaagacgtgggtccagcttttccccagattgtggaagatcctctctgacagacagcagcatgcactcgcgggtgagataagtccatttctgtgcagcggcagtcaccaggtgcagcgggactgccagcccagcgcgctgaactgctttgtggaagccatgtcccagtgcgtgccgccaatccccatccgaccctgcgtcctgaagtacctggggaagacacacaacctctggttccggtccacgctgatgttggagcaccaggcttttgaaaagggtctgagtcttcagattaagccgaagcaaacaacggagttttatgagcaggagagcatcaccccgccgcagcaggagatactggattcccttgcggagctttactccctgttacaagaggaagatatgtgggctggtctgtggcagaagcggtgcaagtactcggagacagcgactgcgattgcttacgagcagcacgggttctttgagcaggcacaagaatcctatgaaaaggcaatggataaagccaaaaaagaacatgagaggagtaacgcctcccctgctattttccctgaataccagctctgggaagaccactggattcgatgctccaaggaattgaaccagtgggaagccctgacggagtacggtcagtccaaaggccacatcaacccctacctcgtcctggagtgcgcctggcgggtgtccaactggactgccatgaaggaggcgctggtgcaggtggaagtgagctgtccgaaggagatggcctggaaggtgaacatgtaccgcggatacctggccatctgccaccccgaggagcagcagctcagcttcatcgagcgcctggtggagatggccagcagcctggccatccgcgagtggcggcggctgccccacgtagtgtcccacgtgcacacgcctctcctacaggcagcccagcaaatcatcgaactccaggaagctgcacaaatcaacgcaggcttacagccaaccaacctgggaaggaacaacagcctgcacgacatgaagacggtggtgaagacctggaggaaccgactgcccatcgtgtctgacgacttgtcccactggagcagcatcttcatgtggaggcagcatcattaccagggtaaaccgacctggtccggcatgcattcatcatcgattgtaactgcctatgagaatagctctcagcatgatcccagttcaaataacgctatgcttggggttcatgcatcagcttcagcgatcatccagtatggaaaaatcgcccggaaacaaggactggtcaatgtagctctggatatattaagtcggattcatactattccaactgttcctatcgtggattgcttccagaagattcgacagcaagttaaatgctacctccagctggcaggcgtcatgggcaaaaacgagtgcatgcagggccttgaagttattgaatctacaaatttaaaatacttcacaaaagagatgacagccgaattttatgcactgaagggaatgttcttggctcagatcaacaagtccgaggaggcaaacaaagccttctctgcagctgtgcagatgcacgatgtgctggtgaaagcctgggccatgtggggcgactacctggagaacatctttgtgaaggagcggcagctgcacctgggcgtgtctgccatcacctgctacctgcacgcctgccggcatcagaacgagagcaaatcgaggaaatacttagccaaggtgctgtggcttttgagttttgatgatgacaaaaacactttggcagatgccgtcgacaagtactgcattggtgtgccacccatccagtggctggcctggatcccacagctgctcacctgcctggttggctcggagggaaagctgctcttgaacctcattagccaggttggacgcgtgtatccccaagcggtctactttcccatccggaccctgtacctgaccctgaaaatagaacagcgggaacgctacaagagcgatccagggcccataagagcaacagcacccatgtggcgctgcagccgaatcatgcacatgcagcgagagctccaccccacccttctgtcttccctggaaggcatcgtcgatcagatggtctggttcagagaaaattggcatgaagaggttctcaggcagctccaacagggcctggcgaaatgttactccgtggcgtttgagaaaagtggagcggtgtccgatgctaaaatcaccccccacactctcaattttgtgaagaagttggtgagcacgtttggggtgggcctggagaatgtgtccaacgtctcgaccatgttctccagcgcagcctctgagtctctggcccggcgggcgcaggccactgcacaagaccctgtctttcagaagctgaaaggccagttcacgacggattttgacttcagcgttccaggatccatgaagcttcataatcttatttctaagttgaaaaagtggatcaaaatcttggaggccaagaccaagcaactccccaaattcttcctcatagaggaaaagtgccggttcttgagcaatttctcggcacagacagctgaagtggaaattcctggggagtttctgatgccaaagccaacgcattattacatcaagattgcacggttcatgccccgggtagagattgtgcagaagcacaacaccgcagcccggcggctgtacatccggggacacaatggcaagatctacccatacctcgtcatgaacgacgcctgcctcacagagtcacggcgagaggagcgtgtgttgcagctgctgcgtctgctgaacccctgtttggagaagagaaaggagaccaccaagaggcacttgtttttcacagtgccccgggttgtggcagtttccccacagatgcgcctcgtggaggacaacccctcttcactttcccttgtggagatctacaagcagcgctgcgccaagaagggcatcgagcatgacaaccccatctcccgttactatgaccggctggctacggtgcaggcgcggggaacccaagccagccaccaggtcctccgcgacatcctcaaggaggttcagagtaacatggtgccgcgcagcatgctcaaggagtgggcgctgcacaccttccccaatgccacggactactggacgttccggaagatgttcaccatccagctggctctgataggcttcgcggaattcgtcctgcatttaaatagactcaaccccgagatgttacagatcgctcaggacactggcaaactgaatgttgcctactttcgatttgacataaacgacgcgactggagacctggatgccaaccgtcctgtcccatttcgactcacgcccaacatttctgagtttctgaccaccatcggggtctccggcccgttgacagcgtccatgattgcggtcgcccggtgcttcgcccagccaaactttaaggtggatggcattctgaaaacggttctccgggacgagatcattgcttggcacaaaaaaacacaagaggacacgtcctctcctctctcggccgccgggcagccagagaacatggacagccagcaactggtgtccctggttcagaaagccgtcaccgccatcatgacccgcctgcacaacctcgcccagttcgaaggcggggaaagcaaggtgaacaccctggtggccgcggcaaacagcctggacaatctgtgccgcatggaccccgcctggcacccctggctgtgactgtggccaccacggccacccggaatgtgaagggcgctccgggctctgagcccgcagcttttacgacttctccctgcctcgttccttatattcacagaagccccatagtttcactgggttgcggttattttcctggtagtttgcgtgtaagaaagggagaatatagttttagaggaagctgaactatgacgatgctgggcgaagcggttggaaatggcagagctgaaacttattccaagctttcaaaataatcttttaagaagccaggattctccggtctggaatttctgagtgagtcctttttttatggtgtcctccctctgtgaatgtacaggcggaactgtacgaacagctccccttccatccatttttaactctttcggaaataacacctcacagcagcttcgtgcttttgtacagacctttgtaaacaagtgtacagaaaactcattttgtttgagaaaacagggagttgatgaacccccatcatgctggtttttcctctgagcacaaaagttttaaggctgtacacagcccagcccttggggaatcctcgttgagcgttcgggcgtggatcccacggggccccaggcccacctgcgggagcgcccacacgcattccacttcgggattcagtggggtgaaggacagaactctgagagtctgcaggcnggctcctgtgcctttttatttctggctcttcgggatgtcttctagacatttactatcactgcacctgaagaaaaaatcacttttaccttcctaatttaaaaagacaaaacagaaatgtacgttccttcgctagctttagtcttttctgttcccatttttataaatctgagcattgataatgttctatctaaatttgtacagtgtgattttttatttttagaataaatattttataaacggaaaaaaaaaaaaaaaaa

SEQ ID NO: 154151 - DNA, 688 bp, Homo sapiens
ccgcagattcgagcgtcgacccatgcgtccgcacgaggtctacacgccgccgcttgtgctgcagccactgtctctagtgagtccctggaaaagttcccagcatatttttccgagtactcaacacccaacatcgattgggcggcggaaaaatagccctttgcccatcactgcccatttaagggtgtgggcccgaagatatgctcatgtggtgttgaggaaagcagacattgacctcaccaaagagggcgggagaactcacatgaggatgaaggtggaacgtgtgatcaccaatctatgcagaatccacgccagtacaaagatcccaagactgggttctttgaacaagacaagaaggatgtaaaggattggaaaataacagccagggtcctagcccaatgggtctggacaacaagctcccgtgaaagacctggaagccgacttgaagaaagattccgggcccataagaagggcttgccgtcactttcttgggggcctttcgtgttccgagggccaagcacacccaagacccacttggcccgccgttggccggcaccgtggggcctccgctggggccaggaggtgacgaacagtggccggctctccccaggcaaggaggcgatgtaggcccggagcccagagggccgcatcgggcgtgcccgaggcaggtctgggcccaacacctggccgg

SEQ ID NO: 154152 - DNA, 1476 bp, Homo sapiens
cctgaggaattcggccgaggaagagagagcaggcggcatccgaggacgcggacaagggtcccaaagagccgctggaatacggcaaggccaaactgagcttccagagctgtgagtgcgggaaggccttccagcggcacgaccacctggctcggcaccgcagccacctttcacctgaaggacaaagcccggcccttccagtgccggtactgcgtcaagagcttcacgcagaactatgacctcctccgccacgagcgcctgcacatgaagcgccgttccaagcaggctctgaactcctactgagcctctccgcctggggcggcctcaccctggctggtgctgccccctcaccttggtactgatcagcgcccccacccaggacataccttccccaggatagagagcacacctccctcctgtccttgctctcaggtagtgagcgttcgggtggtgccatgggagcactctccctcccccaggtaatgaaagagtggccaagtgagtgttctgtttctgctgtgccaaaaaacgggggggatgtgccatcaccaggttggacatgccaggtgttctgcgtcttagagacccttggcccatgctccccaagctcggggagtaaaactgggctatcccccgtcagggcggcaccctggtcaccagccaaacctcagtatactccctcccctccttccctgtctgaacgctaggatctgctcctgaagctccaggatgcctgcacttccactgagaagctgctggcggatgttggactagaggaaagaagaaggcagggtgggactgatgggctcagtggggagcagggccaggcacactgagccagacatgtcatgtctgagccccagattcgtggccatcaggtaggcaggagcacccctgcagatccaagatgatcaggcaggcccttttgggctggcctgctgtggcaggggtctgcagagctccttcttgaggtttggaaacagtcgtcatacctgttgattttcctggggggccaatcactagggatctggagctcaccaaaaacaaagcttacattttaatttgtgttgcacacctaccccataatgtctttataccccaaagatccttggtaaatgcttgtgggttggaagcggagttgtcatcgtttaaaaggcacttaagtcccttcttccaatctgtcctgtctagggaatgtgggagctctgcccccagtgaggggttctcctgtctgggtgagccaagctccagaacagaaccttggcctgacaacacacttggatagatacattaggttgggagtgctggtgttgttccaaacactggctggcttacaacaacaggagtgtattccctgacagctctgggaggtgcacgtccaagatcagggtgtcctcatatttggtgccttgcgacagctgcgaaggagaaacgcgttattgccttgctagcaggtgccatctcttgctgtagcggaat

SEQ ID NO: 154153 - DNA, 403 bp, Homo sapiens
aggaagcaggggtgaccgccgcagtcctcctcctgctccccttgccgagtcacgtgtcacgaagagcaaactgagcaaactgagctgcgcagatgaggggagactcgtcaccaggcgtgcagtgggcactgctgggctcccccatcccgtcctaacccggaacagccccgggcaggaggcgtggaaagtcgagggggtaaaccgcgaatgtgcgttgtctccaagcccagccctcagccatggcatgccccctggatcaggccattggcctcctcgtggccatcttccacaagtactccggcagggagggtgacaagcacaccctgagcaagaaggagctgaaggagctgatccagaaggagctcaccattggctcgaagctgcaggatgctgaaattgcaag

SEQ ID NO: 154154 - DNA, 423 bp, Homo sapiens
  misc_feature (1)...(423): n = a,t,c or g
gctgggctcccccatcccgtcctaacccggaacagccccgggcaggaggcgtggaaagtcgagggggtaaaccgcgaatggccagctgccctcacgctgggggtccagccatcccctgcccagttcagccgctggatccagactggggccatctgtggcgctcccccgctggagggatagtcaggagcagcagtgctgtgccagctccaagcccagccctcagccatggcatgccccctggatcaggccattggctcctcgtggccatcttccacaagtactccggcagggagggtgacaagcacaccctgagcaagaaggagctgaaggagctgatccagaaggagctcaccattggctcgaagctgcaggatgctgaaattgcaaggntgatggaagacttggaccggaacaaggaccagg

SEQ ID NO: 154155 - DNA, 1102 bp, Homo sapiens
ccgggtcgacccacgcgtccggtcgcatttggccgcctccctacttttgagttctctccaggagccctggatactttccagggccagctgccctcacgctgggggtccagccatcccctgcccagttcagccgctggatccagactggggccatctgtggcgctcccccgctggagggatagtcaggagcagcagtgctgtgccaggcaggccttgggctaagggatcgcaatggggtgtgctcttttggggtgcggaagggagtgccctgggtgtgtcattgccaccatgtgtggccctgtgaagctgtgtttaagctgcctttgcacgctccattcccctcccctgcccagccatactcctcaacttctggatcccctgaaggacagttctcagctgtgcccaaagctactgttcctatatgcttcttagaatccttaagccacctctcttgccttggccctagtgtgctctctccttccccttcaagccctgggctgtctcctgatgccattgtgtgtggcctgagactgggtggttccaaaggaggcggggctagtgcaggcagcattattggggtgtgtgggtgagaagttcttgttaccatggcactgactaggccctctgctgccagctccaagccacagccctcaagcccatggcaatgccccctggattccagccattggcctccctccgtggcccatcttcccacaagttactccggcagggagcggtgacaagcacaccctgagcaaagagggagctgaaggagctgattcagaaaggagctcccccattggcttcgaagctgcaggatgcttgaaattgcaaggcttgatggaagaccttggaccggaacaaggaccagggaggtgaactttccaaggaagtatgtcacctttcctgggggggcctttgcttttgaatctacaattgaaggccttaaaagggttgaaaaataaattagggaagatggagacaccctcttgggggtcctctcttgagtcaaattccagtgggtgggtaatttgttacaataaatttttttttgtggtcaaatttaaaaaaaaaaaaaaaaaagaaaaaaaatcgcggccgc

SEQ ID NO: 154156 - DNA, 1406 bp, Homo sapiens
atggaggcagctcagtcatcttctacggcctcatctgcatgtatacactgtggtggatgctacgggcgctccctcaaaaagtactcgtttgagtcgatccgtgaggagagcagctacagcgacatccccgacgtcaagaacgacttcgccttcatgctgcacctcattgaccaatacgacccgctctactccaagcgcttcgccgtcttcctgtcggaggtgagtgagaacaagctgcggcagctgaacctcaacaacgagtggacgctggacaagctccggcagcggctcaccaagaacgcgcaggacaagctggagctgcacctgttcatgctcagtggcatccctgacactgtgtttgacctggtggagctggaggtcctcaagctggagctgatccccgacgtgaccatcccgcccagcattgcccagctcacgggcctcaaggagctgtggctctaccacacagcggccaagattgaagcgcccgcgctggccttcctgcgcgagaacctgcgggcgctgcacatcaagttcaccgacatcaaggagatcccgctgtggatctatagcctgaagacactggaggagctgcacctgacgggcaacctgagcgcggagaacaaccgctacatcgtcatcgacgggctgcgggagctcaaacgcctcaaggtgctgcggctcaagagcaacctaagcaagctgccacaggtggtcacagatgtgggcgtgcacctgcagaagctgtccatcaacaatgagggcaccaagctcatcctgtggtacaaccacatcgcctacatccccatccagatcggcaacctcaccaacctggagcgcctctacctgaaccgcaacaagatcgagaagatccccacccagctcttctactgccgcaagctgcgctacctggacctcagccacaacaacctgaccttcctccctgccgacatcggcctcctgcagaacctccagaacctagccatcacggccaaccggatcgagacgctccctccggagctcttccagtgccggaagctgcgggccctgcacctgggcaacaacgtgctgcagtcactgccctccagggtgggcgagctgaccaacctgacgcagatcgagctgcggggcaaccggctggagtgcctgcctgtggagctgggcgagtgcccactgctcaagcgcagcggcttggtggtggaggaggacctgttcaacacactgccacccgaggtgaaggagcggctgtggagggctgacaaggagcaggcctgagcgaggccggcccagcacagcaagcagcaggaccgctgcccagtcctcaggcccggaggggcaggcctagcttctcccagaactcccggacagccaggacagccctcttggctgggcaggagcctggggca

SEQ ID NO: 154157 - DNA, 1712 bp, Homo sapiens
aaggctagagccggagctgccgcgccagtcgcctagcaggtcctctaccggcttattcctgtgccggatcttcatcggcacaggggccactgagacgtttctgcctccctctttcttcctccgctctttctcttccctctcgtttagtttgcctgggagcttgaaaggagaaagcacggggtcgccccaaaccccttctgcttctgcccatcacaagtgccactaccgccatgggcctcactatctcctccctcttctcccgactatttggcaagaagcagatgcgcattttgatggttggattggatggctgctggcaaagccaaccattctgtataaacttgaagttaggggagatagtcaccaccattccttaccattggttttggtgtaataaacaataggatataggaacatttgttttcacagtatggggatgttgggtggtccagatagaattaggcctctctggaagcattacttccagaaataccccagggtcttatttttgtggtaggatagcaacgatcgtgaaagaattcaggaagtagcagatgagctgcacaaaatgcttctggtagatgaattgagagatcccagtgctgctactttttgcaaacaaacaggactttgccaaatgctatgggccatcagtgaaatgacagataaactatggcttcagtctcttcgtaacagaacatggtatgttcaagccacttgtgcaacacaaggaactggtctgtatgaaggacttgactggctgtcaaatgagctttcaaaacaattaaatgaaattggatatctaacccaaggaccatggtttggataaaattgggtcctaggcttgttaccacaaaattagtttgggatcttgggttattaaacagtatctgggactggtttgggcagaatattaaacttattttgttgccaattattgtttaccgagtataatgttgctatttagcaagtgtgcttggattttaaagaaattctccttgggaaaaaagtatcctcttttaattttacttccccataagcgtaaatgcctggacatagctcttgtgcaacccttaaaataaattgtttttgagtgttttttgagcccctagacaaataatgtttttaaagttatcccccttgctactttactgaatacctttatcatttcctgagaacagtttgctaatttaaaaaatgtaggcattcccatttggtatttatttctccgcgccttgcccaaaaagatttcctaaatactgccttgtacccagcccagagaaagatcccaaaaacactacctcagctctcttggcactgaggaaatttttcccccttacattggactcctgggcctacatccagccaaacttaaccttgggtggggtttggatttgatagcccaattagttctgtggctgggttgcaaagaattgatatttagatggtttttaatactcgagcagattgtcttccttttatattgtgtcttttttatgtgtgcatgttgcttttgttatcgagcctgattttttgctcgagtatatgatagttctgctgatgttttggtttattggggcagacatatccttcattaagagtttttgggaaaactcatcaaattcagatgaatacattttcttcaataacccgatttggatattattccataataaaactgataaaatacgtaaaaaaaaaaaaaaaaaact

SEQ ID NO: 154158 - DNA, 1754 bp, Homo sapiens
cttgcgggccgcaggagcgacgtgcggcgtggactttgccgggctcgccacacagccccagacccgtttaggaccgggagaccgaacgcagcgtccagccggggagtttcggcggcgttctccgggcaccgcgcgcgggaagccagacgcagcggggggacacatctcgcggtggcgtgtgccagagtgaggagttagcaggcaggacttgacgaggctctttggtttttctagtcctcaaccactgaagaagaagcttgatgcttggctgtcagaagacatgaattacgcacggttcatcacggcagcgagcgcacgcagaaacccttctcccatccggaccatgactgacatattgagcagaggaccaaaatcgatgatctccttggctggtggcttaccaaatccaaacatgtttccttttaagactgccgtaatcactgtagaaaatggaaagaccatccaatttggagaagagatgatgaagagagcactttcagtattctccgagtgctggaattccagagcttttgtcctgggctaaaacagttacaaataaaattgcataatcctcctaccatccattacccacccagtcaaggacaaatggatctatgtgtcacatctggcagccaacaaggtctttgtaaggtgtttgaaatgatcattaatcctggagataatgtcctcctagatgaacctgcttattcaggaactcttcaaagtctgcacccactgggctgcaacattattaatgttgccagtgatgaaagtgggattgttccagattccctaagagacatactttccagatgggaaaccagaagatgcaaagaatccccagaaaaacacccccaaatttctttattattgtttccaaatgggcaacaaccctactggaaactcattaaccagtgaacgcaaaaaggaaatctatgagcttgcaagaaaatatgatttcctcataatagaagatgatccttactattttctccagtttaacaagttcagggtaccaacatttctttccatggatgttgatggacgtgtcatcagagctgactctttttcaaaaatcatttcctctgggttgagaataggatttttaactggtccaaaacccttaatagagagagttattttacacatacaagtttcaacattgcaccccagcacttttaaccagctcatgatatcacagcttctacacgaatggggagaagaaggtttcatggctcatgtagacagggttattgatttctatagtaaccagaaggatgcaatactggcagctgcagacaagtggttaactggtttggcagaatggcatgttcctgctgctggaatgtttttatggattaaagttaaaggcattaatgatgtaaaaagaactgattgaaagaaaaaggccgttaaagatgggggtattaaatgctcccctggaaatgctttcctacgtcgaatagctcagctccctagcccttacttgagagcatccttctcttcagcttctcccagaacagatggatgtggccttcccaggtattagcacaacttataaaagaatctttatgaagaaattaaactaggttgggcatggtggctcacacctataatcccagcactttgggaggcagaggagggaggatcacttgaacccaggaattcaaggctgcagtaagctacgatcacaccactgcactctggcctgcatgcactctggcctgcatggcagaacaagaccctgtctctaa

SEQ ID NO: 154159 - DNA, 920 bp, Homo sapiens
  misc_feature (1)...(920): n = a,t,c or g
aagatctttttttttttttttttgcgaagtgggctcgtgggttggcagtatgagagttgtaatggcccgactgttgagtgagggggagcagtgtatcccaacggcttgcgctgcctttgcgcagcagcccggcgggcggccacgtcgcggcctggctggggtaggagagggcggtccccagtgcagttgggtgaactaccgttgcacactggagtttctggtgtctttgcttggaactgacctagctcgtggcagggggaactcggctancgggccccacagcccctgctgactcaaaacaactgagttgtaagacgttcatcgccgtgttatccttgagtaaagaagcgggcttttgcaatgttgtccaaggctgggtctctacttcctggggctcaagcagtccctccgtgcctcagttcttcccaaagttgctggaatttacagggcaatgaacttctggaaagccccagcccaggggacaatgcacccttccacagagaattctgccacttaatctggagttgaaggtctaaaggttttggaaatcttcccccttcatggaagagaagctttggtatgggctgtccatgcttagacaggtgaattcctggcaactttgaaccttcaaggctggggagagggtgaaaaacccaggcctgttctccttccttgctatgggaattttggctgacacaatatcttcccgccctgggtgctggggcatatcctaaagaactttacaactttcctgtaataatcctgtgtgagcagctgtcaccttattnggggggaaaaatgcctgaaaattagggggcacttcaagtagatagcttctatcttcctatatttgtcttatatacaagtatttgcttttatcaaaataattccaataaagcgattttaaagtaaagaagaaa

SEQ ID NO: 154160 - DNA, 1053 bp, Homo sapiens
  misc_feature (1)...(1053): n = a,t,c or g
gagtgtattaaaggatgtttatttagaaaagaaaaattagctttgacaagagacacctgcacatttntgtagccaaggagatgtcagtnagagcagaaggtgaatccttcatggngactgancacaggtggccagctgtggcagcgacagtgaacacatgtcagtntcggcctgggggcagagtggttgaatgctttaagtctggtggagagcctgccttgctcagcccaggccaagagtaaccctcccatccccattacaaaccaccttttcaagttttttaggntttagttttttgtttttagcataaatggcggagtagcagcagcatctcaccaggagctttgtcgcattacattttgtattttgcttttttgagacggggtctcactctgttacccaggctggaatacagtggcacaatcacagctcactgtaggctctatctcctgggctcaggtgatcctcccaaactcagcctcccagggtagctgtggctccagggcgaactactgtatatagagacagggtttccctatgttgcccagggtggtctggtcttatagtcctggggctcaagcctcccagagtgctggggattacaggcatggggtcaccgcaaccaaggcccggcatttaatattttgaagttacccaaaatggatcatcatctgtgaaggcatccatgggtagcttcccaagcattttgcgggcccactggcccagtgcatccgaaaacacatttcagggaaacccgaggagttgttaagtttgcacatgtgtgggcctacagttgacttccatgtagtaacagggctgagcaagggcagggtctccaccagacttaaagcattcaaccactcctgcccccaggccgacactgacatgtgttcactgtcgctgccacagctggccacctgtgttcagtctccatggaaggattcaccttctgctctcactgacatctccttggctacacaaatgtgcaggtgtctcttgtcaaagctaatttttcttttctaaataaacatcctttaatacactccaaaaaaa

SEQ ID NO: 154161 - DNA, 641 bp, Homo sapiens
attgacactcttccctcctcccacctgccaccaggcctcaccaaagcccactgccatggggccatctgggccattcagagactggagtgagatttgggtgtggagggggaggcgccaaggtggaggagcttcccactccaggactgttgatgaaagggacagatttgaggaggaagtgggctctgaggctgcagggctggaagtccttgcccacttcccactctcctgccccaatctattttagtacttcccaggcaaataggcccctttgaggctcctgagtgccctcagatggtcaaaacccagttttcccctctggatgcctaaaccaggctgcatcggaggccaaggacccgggatcattcactgtgatacccttgccctccagagggtgcgctcagagacacgggcaagcatgcctcttgccttccctggagagaaagtgtgtgatttctctcccccctccttccccccaccagacctttgctgggcctaaaggtcttggccatggggacgccctcagtttagggatctggccacagactccctcctgtgaaccaacacagacacccaagcagagcaatcagttagtgaattgaatggaaataaacgctttagttataatatgaaaaaaaaaaaaa

SEQ ID NO: 154162 - DNA, 444 bp, Homo sapiens
cggacgcgtgggaggcaaacccaccacgagtagctcagaagcatgtcgcttctgtggttccaggagtggaacagagttatctgctgttggcagtgtttgttctgatgcagattgccaggaatacgctaagatagcctgtagtaagacgcatccttgtggccatccatgcgggggtgttaaaaacgaagagcactgtctgccctgtctacacggctgtgacaaaagtgccacaagcctgaagcaagacgccgatgacatgtgcatgatatgtttcaccgaagcgctctcggcactggattgtagtcacatattccacttacagtgctgtcggcgagtattagaaaatcgatggcttggcccaaggataacatttggatttatatcttgtcccatttgcaagaacaaaattaatcacatagtactaaaagacctacttgatccaat

SEQ ID NO: 154163 - DNA, 485 bp, Homo sapiens; identical to SEQ ID NO: 133974
  misc_feature (1)...(485): n = a,t,c or g

SEQ ID NO: 154164 - DNA, 398 bp, Homo sapiens; identical to SEQ ID NO: 133976

SEQ ID NO: 154165 - DNA, 6573 bp, Homo sapiens
gtgtgtgctcatattgtccaagctattcgcatggaagctaccagagtccgtgaagaatgggaacatgctatatcaagcaaagaaaatgccaattctcagccaaatgatgaagatgcctcctctgatgcctactgctttgagctgctctctatggttttagcactgagtggctctaacgttggccggcaatatctggctcaacagctaaccctgcttcaggatctcttctcgctgcttcacacagcctctcctagagtccagagacaggtaacctctttactaagaagagttttgcctgaagtaacccctagtcgtctggccagcatcataggagtgaaatccctccccccagcagatatcagtgatatcattcactcaacagagaaaggagactggaataagctgggtatcttggacatgtttctaggatgcattgccaaagcactcactgtacagctaaaagccaaaggaaccaccatcactggaacagctggtaccactgtgggcaaaggagttacaacagttactcttccgatgattttcaattccagttatctccgacgaggtgaaagtcattggtggatgaagggctcaacccctacccagatctcagagatcatcattaaacttatcaaggatatggcagcaggtcatctgtcagaagcttggtcccgagtgacaaaaaatgctattgcagaaaccatcattgccttgaccaagatggaagaagaatttaggtctccactctggcttgctctcgcatccctatgtgttcttgatcaggaccacgtagatcgtctctcctcggggagatggatgggaaaggatggacaacaaaaacaaatgcctatgtgtgataaccatgatgatggtgaaactgcagcaatcattttatgcaatgtctgtggaaatttatgtacagactgtgacagattccttcaccttcatcgaagaaccaaaactcatcaaagacaggtcttcaaagaagaagaagaagctataaaggttgaccttcatgaaggttgtggtagaaccaaattgttctggttgatggcactggcagattctaaaacaatgaaggcaatggtggaattccgagaacacacaggcaaacccaccacgagtagctcagaagcatgtcgcttctgtggttccaggagtggaacagagttatctgctgttggcagtgtttgttctgatgcagattgccaggaatacgctaagatagcctgtagtaagacgcatccttgtggccatccatgcgggggtgttaaaaacgaagagcactgtctgccctgtctacacggctgtgacaaaagtgccacaagcctgaagcaagacgccgatgacatgtgcatgatatgtttcaccgaagcgctctcggcagcaccagccattcagaacaaaattaatcacatagtactaaaagacctacttgatccaataaaagaactctatgaggatgtcagaagaaaagccttaatgagattggaatatgaaggtctgcataagagtgaagctatcacaactcctggtgtgaggttttataatgacccagctggctatgcaatgaatagatatgcatattatgtgtgctacaaatgcagaaaggcatattttggtggtgaagctcgctgcgatgctgaggctggacggggagatgattatgatcccagagagctcatttgtggtgcctgttctgatgtttccagggctcaggtttgggaatatttgcattaccagttgagcatcccaaatctgaaatccaaaatgctccaagcagctttgactgagcagtggaggcttgaggctttcaaatttgcaaagcctgagaagaacctgaagcgacatcagactaaaggacctgaaagaagagagcttcaggaaaaagagccagagccgcaaaggtggagccgcgttggcgccctccgcgggaccagcgcctcggatgcgggcggagcgcggggggccgcggctgcgggagcgcgaagcggggggccaggggcgcctcatgtgagagccgcgggacctgcagccgccgccgtccccggagcacggggtggtgtgtgggggaagccgcccccggcagcagcaaaaatagagtcgggtgtggtggtgcatgcagatactctggaggctgaggtggaaggattgcttgatctcaggaggtcgaggctgcagatgaaacgaggaggaagagatagtgaccgtaattcatcagaagaaggaactgcagagaaatccaagaaactgaggactacaaatgagcattctcagacttgtgattggggtaatctccttcaggacattattctccaagtatttaaatatttgcctcttcttgaccgggctcatgcttcacaagtttgccgcaactggaaccaggtatttcacatgcctgacttgtggagatgttttgaatttgaactgaatcagccagctacatcttatttgaaagctacccatccagagctgatcaaacagattattaaaagacattcaaaccatctacaatatgtcagcttcaaggtggacagcagcaaggaatcagctgaagcagcttgtgatatactatcgcaacttgtgaattgctctttaaaaacacttggacttatttcaactgctcgaccaagctttatggatttaccaaagtctcactttatctctgcactgacagttgtgttcgtaaactccaaatccctgtcttcgcttaagatagatgatactccagtagatgatccatctctcaaagtactagtggccaacaatagtgatacactcaagctgttgaaaatgagcagctgtcctcatgtctctccagcaggtatcctttgtgtggctgatcagtgtcacggcttaagagaactagccctgaactaccacttattgagtgatgagttgttacttgcattgtcttctgaaaaacatgttcgattagaacatttgcgcattgatgtagtcagtgagaatcctggacagacacacttccatactattcagaagagtagctgggatgctttcatcagacattcacccaaagtgaacttagtgatgtatttttttttatatgaagaagaatttgaccccttctttcgctatgaaatacctgccacccatctgtactttgggagatcagtaagcaaagatgtgcttggccgtgtgggaatgacatgccctagactggttgaactagtagtgtgtgcaaatggattacggccacttgatgaagagttaattcgcattgcagaacgttgcaaaaatttgtcagctattggactaggggaatgtgaagtctcatgtagtgcctttgttgagtttgtgaagatgtgtggtggccgcctatctcaattatccattatggaagaagtactaattcctgaccaaaagtatagtttggagcagattcactgggaagtgtccaagcatcttgcctctacatcagaaaaatcagagctgtcctctaaacacagcagatcgcttaaacctgatggacgtatgagccggactactgctgatcagaagaagccaaggggcacagaaagtttatctgctagtgaatccctcatcttaaaatctgatgctgcaaagttgaggtcagattcccacagtaggtcattatcccccaaccataacaccttgcagacattgaaatctgatgggaggatgccttctagctccagagctgaatccccaggaccaggttctcggttgtcatctcctaagccaaagactctcccagccaataggtctagcccatcgggtgctagttctccacgctcctcctcaccacatgataaaaatctacctcaaaaaagtactgctcctgttaagacaaagcttgatcctcctcgggaacgttctaaatcagactcttacacacttgatccagataccctccgcaagaagaaaatgcccctcacagaacctttgagaggacggtcaacgtcaccaaaaccaaaatcagtaccaaaggattctacagattcccctggatctgaaaatagagctccctctccccatgtggtacaggaaaacctccacagtgaggtggtcgaagtctgcacctcaagtactttaaaaacaaatagtctaacagacagcacctgcgatgacagcagtggatttaagggtgtgggatggaaggtttcaaataaagttcattttatcattggaaaagcaccactgaaagatgaacaggaaatgagagcatctcccaaaataagtcgaaaatgtgctaatagactcaccaggcccacactagaacaatcgagttttcttttcaaaggagatggatccaagcctttagagccagccaagcaagccatgtctccttctgtggccgaatgtgccagagctgtgtttgcttccttcctctggcatgaaggcatagtacatgatgcaatggcttgttcttctttcctaaagtttcatcctgaactttccaaagaacatgctcctataaggagtagtttaaatagccaacaacctacagaggaaaaagacaccaagttaaaaaatagacattcattagagatatcatctgcactgaatatgtttaatattgcaccccatggaccagatatatctaagatgggtagcatcaacaaaaacaaggtattgtctatgcttaaagaaccacctctgcatgaaaaatttcttaaaaagaaagagtgtgagaaagagaataagaagtccaaaaaggaaaaaaagaaaaaagaaaaggcagaagttaggcccaggggtaatttgtttggagagatggcccagctggcagtaggaggaccagagaaagataccatctgtgaactgtgtggggagtcacatccatacccggtgacctatcacatgagacaagctcacccaggttgtggccgatatgctggtggacaaggttacaatagcattgggcatttttgtggaggatgggctggtaactgtggtgatggtggcataggaggaagcacttggtatctggtatgtgatcgctgtagagaaaaatacctccgcgaaaaacaggctgctgcaagggagaaggctgcagagggaagagaaagcgcccccgtggcgcccccagggccgtgcagcccagacctagccccgcagccccacataccccagcacctccgaagctgcgtgcagagccgctcgctcccacctccggctgcacccgcgcgcccccttgcggcggattccgctctggcgcatagccccactggagcgctggcgcgttggcgatggggtcccaggaaaagagtggtgatggtgatggcagtcatcagcaaagagcatgtcaagcaaagcactgataccacaagaagaatgtccagttgcagcaatcacatagaaatgagacagggaggatgggcaggaaatcactcaggagtttctggagattttttggatgttcttgcagaaagagctggggttaagagaggacagtgctcatctgggggtcagccttcagttatcataatattccatcccccttccgtggtaggaacgttgggtagtgctgctgctgcatccaagtttttaggacttagctcgacaaagtgccgagaagctctggccattgctgtttcccatgctggggcacccatggccaatgctgccacccagaccaagcccctccacattggcaatgctgccaagcatgggatagaagctgcatttttggcaatgttgggtctccaaggaaacaagcaggtcttggacttggaggcaggatttggggccttttatgccaactattccccaaaagtccttccaagcatagcttcctacagttggctgctggaccagcaggacgtggcctttaagcgttttcctgcacatttatctacccactgggtggcagacgcagctgcatctgtgagaaagcaccttgtagcagagagagccctgcttccaactgactacattaagagaattgtgctcaggataccaaatgtccagtatgtaaacaggccctttccagtttcggagcatgaagcccgtcattcattccagtatgtggcctgtgccatgctgcttgatggtggcatcactgtcccctcattccatgaatgccagatcaacaggccacaggatggagccaccttcacagatcgctctgataccttctatgggcactggagaaaaccactgagccaggaggacctagaggaaaagttcagagccaatgcctccaagatgctgtcctgggacacagtggaaagccttataaagatagtcaaaaatctagaagacctagaagactgttctgtgttaactacacttctcaaaggaccctctccaccagagggcctggctgtggcacaagggcagagagacatcttggaggaccatcagctgcaaatggatgaatccttgttctggggaatgccaaattcgcatggaaaaagcctaaccaccctgaggcctacgagttatgcggaagcccaggattgccacagggaatggtcacatggctgcatggccagccttcagctcttcagccatcctagcccaggcaccagacatgagagtgaagacactgttgtggatatccagccaagccaagcctttagatag

SEQ ID NO: 154166 - DNA, 14917 bp, Homo sapiens
  misc_feature (1)...(14917): n = a,t,c or g
tcttggagcgttctcagtttctcaacagatcttcacttgctaggcagccagaagccggcggcagtggcggcaccgcctcctcctcacattcccggggtggcggggttagatgagcggccccagtcgcggcgccgggggcgctgttcatgccggttcccgacggctccgtggctgctgcggggctggggctggggctacccgccgcggactccccgggtcactaccagctgctgctgtcaggccgggccctggccgaccgctaccggaggatttataccgctgcgctcaatgacagggaccaggggggcggcagcgctggacacccagcctccaggaataagaaaattttaaataagaagaaattgaaaagaaaacagaagagcaaatcaaaagtgaagacaagaagcaagtctgaaaacttagagaatacagtaatcataccagatatcaaactacatagcaatccttctgctttcaatatttactgtaatgtacgccattgcgttctggaatggcagaaaaaggaaatatcattggcagccgcatctaagaactctgtgcagagtggagaatcagatagtgatgaagaagaggaatccaaagagccccctatcaagcttccaaagattattgaggttggcctttgtgaagtttttgaattgatcaaagagacacgattttctcatccatccctgtgtctcaggagtctccaagccctgctcaacgtgctgcagggccagcagccagaagtgctccagtctgagccacctgaggtcctagagtctctcttccagcttcttttggaaatcaccgttcgaagtactgggatgaatgacagcacaggacagtccttaacagcactttcctgtgcttgcctctttagtctggtggcttcttggggagaaacaggaaggacacttcaggccatctctgctatcctcaccaacaatggaagccatgcttgccaaactattcaggtgccaacaattctaaattcgctacagagaagtgtacaagcagttttggtgggaaaaattcaaattcaggactggtttagtaatggcattaagaaagcagctttaatgcacaagtggccattaaaagaaatatctgttgatgaagatgaccaatgtctacttcagaatgatggattttttctttatctattatgcaaggatggattatataaaataggctctggatacagtggaacagttaggggccatatatacaattctacatcccgtattagaaacagaaaagaaaaaaagtcttggttagggtatgctcagggttatttattatatagagatgtgaataaccacagcatgacagccataaggataagccctgaaacactggagcaagatggtactgtgatgttaccagattgccacactgaaggtcaaaatattttattcactgatggagaatatattaatcagatagctgcttcaagagatgatggctttgttgtcagaatatttgccacaagcactgaacctgttctacagcaagaattgcaacttaaactggctagaaaatgcttacatgcctgtcgtatctcattattcgatctggaaaaggacttgcatattataagtacaggatttgatgaggagtcagcaattcttggtgcaggacgagagtttgcgctaatgaaaacagcaaatggaaagatatattacactggcaaataccagagtcttggaatcaaacaaggtggtccttcagcaggaaaatgggttgagctaccaattacaaaatctccaaagatagtacacttctcagttggacacgatggctctcacgcccttttagttgcagaagatgggagcatattctttacaggatctgctagtaaaggagaagatggagaatcaattaagagcagacggcaatccaaaccttataaacctaaaaagataattaagatggaaggaaagatttgtggtatatacagcctgcaataatggaagtagttctgttatttctaaagatggagaactctacatgtttggaaaagatgccatttactctgatagttcaagtgtggtaactgatttgaagggccattttgtaactcaggtagctatgggcaaagctcacgcttgtgttttaatgaagaatggagaggtgtggacatttggtgtaaataataaaggacagtgtgaacgagatactggtgccatgaaccaaggtgggaaagggtttggagttgaaagtatggcatcagcaatggatgaagccctggaagaagagctagatgaaaaagatgagaagtatatgatgtgccctccaggcatgcacaaatggaagctggagcagtgcatggtttgcactgtctgtggagactgtacaggttatggagccagctgtgtcagtagtggacggccagacagagtccccggagggatctgtggttgtggttccggagaatctggttgtgctgtgtgtggatgttgcaaggcctgtgcaagagagttagatggtcaagaggcaagacaaagaggaattcttgatgcagtgaaagaaatgatacctttagatcttcttttagctgtcccagtgcccggggttaacattgaagaacaccttcagttacgacaagaagaaaaacggcaacgtgtaatcagaaggcacagattagaggaaggaagaggcccccttgtatttgctggtcctatttttatgaaccatcgagaacaggctctagccagactcagatcccatccagcacacgtaaagcataaacgggacaagcacaaagatggaagtggagaaagaggcgaaaaggatgcaagcaaaatcacaacataccctccaggctctgtgcgatttgactgtgagctccgggcagtccaagtcagctgtggatttcaccattcagtggttttaatggaaaatggagatgtctatacatttggttatgggcagcatgggcagctaggacatggagatgtcaactccaggggatgtcccactcttgttcaagcattgccaggccctagcacacaagtcactgcaggcagcaaccatacggcagtacttttaatggatggacaggtcttcacatttggaagtttttctaaaggacaactgggcagaccaattttggatgtgccatattggaatgcaaagccagctcccatgcctaacattggatcaaaatatggaagaaaagctacttggataggtgcaagtggggaccaaacttttttacgaattgatgaagcacttattaattctcatgtacttgctacatcagaaatttttgccagtaaacacataataggcttggtacctgcttctatatcagaacctcctccatttaaatgccttctgataaataaagtggatgggagttgtaaaacttttaatgactcagaacaagaggatctgcaaggatttggtgtgtgtcttgatcctgtatatgatgtaatttggaggtttcgaccaaatactagagagctgtggtgttacaatgcggtggttgctgatgccaggcttccctctgcagcagacatgcagtccagatgtagtatcctaagtcctgaacttgccttaccaacaggatcaagggccctcactacccgatctcatgcagctttgcacattttaggttgtcttgataccttggcagctatgcaggacttaaaaatgggtgttgcaagtacagaggaagagactcaagcagtaatgaaggtttattctaaagaagattatagtgtggtaaacaggtttgaaagtcatggaggaggctggggttattctgcccattcagtagaagctatacgtttcagtgccgacactgatattttacttggtggtcttggtctgtttggaggtagaggagaatatactgctaaaattaagctgtttgaattgggtcctgatggaggagatcatgaaactgatggtgaccttcttgcagagactgatgtattggcttatgactgtgctgctagagaaaaatatgcaatgatgtttgatgagcctgttctcctgcaagctgggtggtggtatgtggcatgggcccgagtgtcaggacccagcagtgactgtggatctcatggacaggcatctattaccacagatgatggggttgttttccagttcaagagttcaaagaaatcaaataatggtacagatgttaatgcgggtcagatacctcagttattatacagacttccaaccagtgatggcagtgcttcaaaaggcaaacagcaaaccagtgaacctgtacacattttaaagaggtcttttgcaagaactgtctcagtggaatgttttgagtcattgttgagtattcttcactggagctggaccaccttagtcttaggagttgaagaacttagaggattaaaaggattccagttcacagctacactcctagatttagagagactgcgctttgtgggtacctgttgtctgaggttattgcgtgtctatacctgtgaaatttacccagtgtcagctacaggaaaagcagttgtagaagaaactagcaaattagcagagtgtattggaaaaaccagaactttgttaagaaaaattttatcagaaccacttgatcactgcatggtgaaattggataatgatcctcaaggatatctcagtcaacccttgagtcttctagaagctgtccttcaggaatgtcataatactttcactgcctgctttcattctttctacccaactcctgccttacagtgggcttgcctttgtgatctgctgaattgtttggatcaggatatccaagaagcaaacttcaagacatcaagtagccgactccttgcagctgttatgtcagctctgtgtcacacgtctgttaagctgacttccatcttcccgattgcgtatgatggagaagtattactacgatcaattgttaaacaagttagtacagagaacgactcaacactagttcatcgttttccccttttggtggcacatatggaaaaactcagccagagtgaagagaatatctcagggatgacaagcttccgtgaagttctggagaaaatgctggtcattgttgtgctaccagtcaggaacagcctgaggagagaaaatgaactcttctcctcccacctcgtctctaacacctgtggattactggccagcattgtcagtgaactgacagcgtcagccctgggatctgaggttgatggacttaattctcttcactctgtaaaagctagtgctaaccgatttacaaaaacaagtcagggcagaagttggaacactgggaacgggtcccctgatgcaatctgtttttcagtagacaaacctggaatagttgtggttggtttctctgtctatggaggaggtggaattcatgaatatgaattagaggtgttggttgatgatagtgaacatgcaggagattcaactcattcccacagatggacatctctggaattagtgaaaggaacgtacacaacggatgactcacccagtgatatagctgagatcagacttgacaaagtggttcctttaaaggaaaatgttaaatatgctgtgcgcttgaggaactatggaagccgtacagccaatggagatggaggaatgaccacagttcagtgccctgatggtgtgacattcacattcagcacgtgcagcttgagcagtaacggcacaaaccaaaccagaggacagatcccacagatactctactataggagtgaatttgatggagatttacaatcccaacttctgagtaaagccaatgaagaagataaaaactgtagcagagcattgtctgttgtaagcactgtcgttcgagcctctaaggacctcctgcacagagctcttgctgtggatgctgatgacattccagaactgctgagttcttccagtctgttttccatgctgctcccccttattatagcctacataggaccagtagctgctgctattcccaaggtggctgtagaagtctttggccttgtccaacaattgcttccgtcagttgccattttgaatcagaagtatgcaccgcctgccttcaaccctaatcagtcgacagatagcaccacaggaaaccagcctgaacagggcctctctgcttgtacaacctccagtcactatgctgtcatagagagtgagcacccgtataaacctgcctgtgtgatgcattacaaggtgacattcccagaatgtgtgaggtggatgacaatcgaatttgaccctcagtgtggtactgcacagtcagaagatgtccttcgtttgttgattcctgtcagaactgttcagaattcaggatatggaccaaaattgacatctgttcatgaaaatcttaattcatggatagaattaaagaaattttcaggatcctctgggtggcctactatggttttggtgttgccaggaaatgaggcccttttttcattggagactgcatcagattatgtgaaagatgacaaagcttctttctatggttttatgtgttttgcaattggatatgaatttagccctggacctgatgagggagtcatccaattggaaaaagaattagccaatcttggtggggtttgtgcagcagctctgatgaagaaggacctagcacttcctattggtaatgaattagaagaagaccttgaaattcttgaggaggctgcattgcaggtgtgcaaaacccattctggaattcttggaaagggtctagctctttctcattcaccaactatattagaagcacttgagggaaatttaccactccaaatccaaagcaatgaacagtcttttctggatgattttattgcctgtgtcccaggatcaagtggtggaaggcttgcaaggtggcttcagccagattcatatgcggatcctcagaaaacatctttgatcctgaataaggatgatattcgttgtggttggcctaccaccataactgttcaaacaaaagaccagtatggggatgtggtacatgttcccaatatgaaggtggaagtgaaagctgtccctgtttctcagaaaaaaatgtctttacaacaagatcaagcaaagaaacctcaaaggattcctggcagtcctgcagtaacagctgcatcttctaatactgacatgacttatggagggctggcatcaccaaagctagatgtttcatatgaaccaatgatagtgaaggaagctcgatatattgccataacaatgatgaaggtttatgaaaattattcatttgaagaactacgttgttgcatcaccaactcctaagagacccagtgagaatatgctgatccgtgtcaataatgatgggacttattgtgcaaattggactccaggggctattggactctacactcttcatgttaccattgatggcattgaaatcgatgctggtctggaagtaaaagtaaaagacccaccaaaagggatgataccaccaggaactcagttggtcaaaccaaagtctgaacctcagcctaataaggttcgaaaatttgtggccaaggacagtgcggggcttcgcatcccgtagccacccttcccttcagaagtgagcagataggcactagtgaaaagtcaatggaaactatcacttttattgatgagatccataatgatgatgggtgtgtgggctgaggctgaatgatgagacaataaagaagtatgtccctaacatgaatggttacactgaagcctggtgcctctcttttaatcaacatcttggcaagagtcttctggtccctgttgacgaatctaaaactaatactgatgactttttcaaagacataaactcctgctgcccacaggaagcaacaatgcaagaacaagatatgccattcttgcgaggagggccaggcatgtacaaggtagtgaagacgggaccttcaggtcacaacatcagaagctgccctaaccttagaggtatcccaattggaatgttagttctgggaaacaaagtcaaagcagtgggagaggtaaccaattctgaagggacatgggtgcaactggatcagaacagcatggtagagttctgtgagagtgatgaaggagaggcatggtccttagctagagacagaggcggaaaccagtacctccgacatgaagatgaacaagctcttctggatcagaattctcaaactcctcctccaagccctttctcagtgcaagcttttaataaaggggcaagttgcagtgcccaaggatttgattatggactcggaaatagcaaaggtgatcgaggaaacatctcaacatcttctaaaccagcctctacatcaggaaaatcagagctgtcctctaaacacagcagatcgcttaaacctgatggacgtatgagccggactactgctgatcagaagaagccaaggggcacagaaagtttatctgctagtgaatccctcatcttaaaatctgatgctgcaaagttgaggtcagattcccacagtaggtcattatcccccaaccataacaccttgcagacattgaaatctgatgggaggatgccttctagctccagagctgaatccccaggaccaggttctcggttgtcatctcctaagccaaagactctcccagccaataggtctagcccatcgggtgctagttctccacgctcctcctcaccacatgataaaaatctacctcaaaaaagtactgctcctgttaagacaaagcttgatcctcctcgggaacgttctaaatcagactcttacacacttgatccagataccctccgcaagaagaaaatgcccctcacagaacctttgagaggacggtcaacgtcaccaaaaccaaaatcagtaccaaaggattctacagattcccctggatctgaaaatagagctccctctccccatgtggtacaggaaaacctccacagtgaggtggtcgaagtctgcacctcaagtactttaaaaacaaatagtctaacagacagcacctgcgatgacagcagtgaatttaagagtgtggatgaaggttcaaataaagttcattttagcattggaaaagcaccactgaaagatgaacaggaaatgagagcatctcccaaaataagtcgaaaatgtgctaatagacacaccaggcccaaaaaagaaaaatcgagttttcttttcaaaggagatggatccaagcctttagagccagccaagcaagccatgtctccttctgtggccgaatgtgccagagctgtgtttgcttccttcctctggcatgaaggcatagtacatgatgcaatggcttgttcttctttcctaaagtttcatcctgaactttccaaagaacatgctcctataaggagtagtttaaatagccaacaacctacagaagaaaaagaaaccaagttaaaaaatagacattcattagaaatatcatattcagtgcagatgatatttctaatgaatgtgtttaatattggcacccccatggacccagatatatcctaagatggggtagcatcaacaaaaacaaggtattgtcctatgccttaaggaacccacctctgcatgaaaaatgtgaggatgggaaaactgagacccacttttgaaatgtcccatgcataacacaatgaagtcctaagtctcctcttcccttaactttacaacatttagtggctttttgggaagacatctctttggctactatcaaagctgcttcccagaatatgatttttccaagtcctggttcctgtgcagttcttaaaaagaaagagtgtgagaaaggaaggaataagaagtccaaaaaggaaaaaaagaaaaaagaaaaggcagaagttaggcccaggggtaatttgtttggagagatggcccagctggcagtaggaggaccagagaaagataccatctgtgaactgtgtggggagtcacatccatacccggtgacctatcacatgagacaagctcacccaggttgtggccgatatgctggtggacaaggttacaatagcattgggcatttttgtggaggatgggctggtaactgtggtgatggtggcataggaggaagcacttggtatctggtatgtgatcgctgtagagaaaaatacctccgcgaaaaacaggctgctgcaagggagaaggtcaaacaatctaggagaaaaccaatgcaagtcaagacccctcgtgccttgcccaccatggaagctcaccaggtgattaaaagcccaatgccagtctttcctgctgtccctgagcagtgcagcagaaccgagcattctgtgttaccatcctgcaaagccattccaatctcagttgcccagtgtaaaagaaggcatttctgaggatcttcctgtgaaaatgccttgtctctacctgcagacattagctaggcatcatcatgaaaattttgtgggctatcaagatgacaatctattccaggatgaaatgagatatctacgttcaacatctgtacctgccccgtatatatcagtaactcctgatgcaagtcctaatgtatttgaagagccagagagcaatatgaagtctatgccaccaagtttagaaaccagtcccataactgatactgatcttgcaaagagaactgtcttccaaagatcatactcagttgttgcttccgaatatgataaacaacactccattttacctgcacgagttaaagctattcctagaagaagagttaacagtggagacactgaagttggttcttcccttttgagacatccgtctcctgagctttctcggctaatctcagcccacagctctctttctaaaggagaacgaaatttccagtggccagttttagcttttgttatacaacatcatgatctagaaggtcttgaaatagcaatgaaacaggccctaaggaaatctgcttgtcgagtttttgctatggaggctttcaactggcttctgtgtaatgtcatccaaaccacttctctccatgatattctgtggcattttgtggcatcactgactcctgcaccagtggaaccagaggaagaagaggatgaagaaaataaaacaagcaaagaaaattcagaacaagagaaagatacaagagtatgtgaacatccactctcagacatagtgattgccggggaacgtgctcatcctttaccacacacctttcaccgcttgctgcagaccatctcagaccttatgatgtctctccccagcggcagttcattacagcaaatggccctgaggtgctggagtctcaaattcaagcaatctgatcaccagttccttcatcagagcaacgtctttcatcacattaacaatattttgtcaaagtcagatgatggcgatagtgaagagagttttagcatcagtatacagtctggctttgaagctatgagtcaggaattatgcatagtaatgtgcttaaaggacttaaccagcattgttgacataaaaacttcaagccgacctgccatgattggcagtttgacagacggctccacagaaaccttttgggaatcaggagatgaagataaaaacaaaactaagaacatcaccatcaactgtgtaaaggggaatcattgccccgctatgtgtcctgtttcaccgtggacatttccccgagatcttggggaataaagttacctcaatgaccttcttaactggcaaagcagtacaagattttgtnccagaataaagcagggttgatctggattccaggcacattggctgggtaacaagtgaacttccaggaggggataatcacatcataaaaattgaattaaaaggcccagaaaatacactgagagttcgacaagtcaaagtcctgggctgggaaagatggtgaaagcacaaaaatagctggccagatttccagccagtgtggccccagccagagggaactgtgaagctggagactcctgccgagtattcagactgattacgtctcaagtatttggaaagctcatctctggagatgctgaacctacaccagaacaagaggaaaaagcactattgtcatcacctgaaggagaagaaaaagtatacaatgcaacatcagatgctgacctgaaagaacatatggttggaatcatattcagcaggagtaagctgactaacttacaaaaacaggtgtgtgctcatattgtccaagctattcgcatggaagctaccagagtccgtgaagaatgggaacatgctatatcaagcaaagaaaatgccaattctcagccaaatgatgaagatgcctcctctgatgcctactgctttgagctgctctctatggttttagcactgagtggctctaacgttggccggcaatatctggctcaacagctaaccctgcttcaggatctcttctcgctgcttcacacagcctctcctagagtccagagacaggtaacctctttactaagaagagttttgcctgaagtaacccctagtcgtctggccagcatcataggagtgaaatccctccccccagcagatatcagtgatatcattcactcaacagagaaaggagactggaataagctgggtatcttggacatgtttctaggatgcattgccaaagcactcactgtacagctaaaagccaaaggaaccaccatcactggaacagctggtaccactgtgggcaaaggagttacaacagttactcttccgatgattttcaattccagttatctccgacgaggtgaaagtcattggtggatgaagggctcaacccctacccagatctcagagatcatcattaaacttatcaaggatatggcagcaggtcatctgtcagaagcttggtcccgagtgacaaaaaatgctattgcagaaaccatcattgccttgaccaagatggaagaagaatttaggtctccagtgagatgtattgcaacaactagactctggcttgctctcgcatccctatgtgttcttgatcaggaccacgtagatcgtctctcctcggggagatggatgggaaaggatggacaacaaaaacaaatgcctatgtgtgataaccatgatgatggtgaaactgcagcaatcattttatgcaatgtctgtggaaatttatgtacagactgtgacagattccttcaccttcatcgaagaaccaaaactcatcaaagacaggtcttcaaagaagaagaagaagctataaaggttgaccttcatgaaggttgtggtaggaaccaaattgttctggttgatgggcactgggcagattcttaaaacaatggaagggcaatgggtgggatttcccaggaacacacagggcaaacccaccacgagtagctcaaaagcatgtcgcttctgtggttccaggagtggaacagagttatctgctgttggcagtgtttgttctgatgcacattgccaggaatacgctaagatagcctgtagtaagacgcatccttgtggccatccatgcgggggtgttaaaaacgaaaagcactgtctgccctgtctacacggctgtgacaaaagtgccacaagcctgaagcaagacgcccatgacatgtgcatgatatgtttcaccgaagcgctctcggcagcaccagccattcagctggattgtagtcacatattccacttacagtgctgtcggcgagtattagaaaatcgatggcttggcccaaggataacatttggatttatatcttgtcccatttgcaagaacaaaattaatcacatagtactaaaagacctacttgatccaataaaagaactctatgaggatgtcagaagaaaaggctttaatgagattggaatatgaaggtctgcataagagtgaagctatcacaactcctgggtggtgaggttttataatgacccagctggctatgcaatgaatagatatgcatattatgtgtgctacaaatgcagaaaggcatattttggtggtgaagctcgctgcgatgctgaggctggacggggagatgattatgatcccagagagctcatttgtggtgcctgttctgatgtttccagggctcagatgtgtcccaaacatgggcacagactttttgggaatataaatgtcgctactgctgttcagtggctgtttttttctgttttggaacaacacattttttgtaatgcttgtcatgatgattttcaaagaatgactagcattcctaaggaagaactaccacactgtcctggcaggtccaaaggcaaagcagttaagaaggaactgaatgtccactccatgttgttcatccacccacctgggaaagaggtttgctctgggatgtggagtgtgcagaaatgcccacacttttaagaccacgcagatcctttgtctacagagagaaaaattgccttcatcccccacggaggatggcggtgaagtttaaaacccctgctcaggataaggacgggaccatttttacatccatgaaaatgaacccattccacagtgcaagaaggatacccaaatacccatgtacataattccttgcctatgaaaagtttcccccattattttggtttatccttccttttgaacaaaatgacatcaaacttgtgaggtgtttgcatgtggccattaccgtcattggccctgtgaagcattggacatttatagataattgatataaaagaatcgccatgcccatggactaagaacgatgctggctttcaagcaaaaaaagaaaaataatcattgtttattgtatactgcctttttgtaatcctgtacaattgcatcacgggtggggataaaaagaggaatattctggtttatttcctagactgttatttaaaaaaaaaaaaaacattgtgttagggacagcatataaatgtaataagtatcacactgtatataaacatatcaatgtttgtcctgtataagaattactaaattacaaatgcaatttcatttaaacttctaggttaagtttgagcctgaaattttaatgaagtgcaataatgaggcacactcagtattgcacttcattatcttgcagctgtaaacatattggaatgtacatgtcaataaaaccactgtacatttttatacagtgataaagtctaaaaaaaaaaaaaaa

SEQ ID NO: 154167 - DNA, 840 bp, Homo sapiens
taagaaaaatgttgggaggttcaagatacgaaggctttcaattctgtataacagactttagcttaagtttctccgctctgaaataaattttcaataaaatattaacagtatgatatctaaaacaggtttactactgctcacatcaaagttacatcctctgaccaatccttaccttcctttaatgtcaaagaccaaatcatagacattaagctagagcttacctttcactgtcttctaaggcactgttctttatattctcaatgacataagatgctttacaagtatgaacaataatctgttatacacactaatggtatcctttcatttctttaaatctggaatgtagttccttgtgtggcatcttatttctaatgtagaaaaaacagctgttatcaagcacaaaattttaatctaaggataccatttagtactactaaattaataaatttattccacttttgaaatgacagccaaaaatccacctaattgattctcatttggcacgttcttctcaattctgttcactaaattaaaattactaaatttaaactgccaagagccatgatgttgtctgcacaagacaacattttccatcactttcagaaagttatatttggcatgttaaggaaaaaaaatataatcccacagcagcagctatttaaaataagacagccacaggattcatgcagaatattttaaatattcctgttgaacacaatgatttaattgattttttcttcacggatgatgctcccaaacatcctatatgcatccatggaaatttaaagatcctggaatagcgtcttccatgtgggacatcttaaaagatagtattttggc

SEQ ID NO: 154168 - DNA, 2483 bp, Homo sapiens
gcggcgccgcaggggattgaggggttgactgagcgttgcgagccttagctttctcccgaacgccagcgctgaggacacgatgtcgcggctctcccgctcactgctttgggccgccacctgcctgggcgtgctctgcgtgctgtccgcggacaagaacacgacccagcacccgaacgtgacgactttagcgcccatctccaacgtaacctcggcgccggtgacgtccctcccgctggtcaccactccggcaccagaaacctgtgaaggtcgaaacagctgcgtttcctgttttaatgttagcgttgttaatactacctggcttttgggatagattgtaaagatgagagctattgttcacataactcaacaagttagtgatttgtcaagtggggaacacgacagacttctgttccgtttccacgggccactccagtgccaacagccaattcttacagctaaaacccacagttcaagccctccccttctacaacttccaagacagttactacatcagggtacaacaaataacactgtgaattcaaacctcacaacctgtgcgaaagtctacctttgatgcagccagtttcattggaggaattgtcctggtcttggaaataagatgccacacaaggaactacattccagatttaaagaaatgaaaggataccattagtgtgtataacagattattgttcatacttgtaaagcaccttatgtcattgagaatataaagaacagtgccttagaagacagtgaaaggtaagctctagcttaatgtctatgatttgttctttgacattaaggaaggtaaggattggtcagaggatgtaacttgatgtgagcagtagtaaacctgttttagatatcatactgttaatattttattgaaaatttatttcagagcggagaaacttaagctaaagtctgttatacagaattgaaagccttcgtatcttgaacctcccaacatttttcttatggctgttgaaaagtatagagctaaattgatttaattacactttcctttgtactttaaaaaaaagtatgctagcactattgtaccttgaaaggatttccaccaaactgtcttgagtagtgacttctttggtgaggcaagaaggatatacattattttagaatcatttactatttaaatgagacaatcatattattttagaatcatttattttaaatgagacaatcatttttaggttttaagataacagaagtgaccaatgtaatttcacaacacctaaaggattttttggttgatcaggattactgtagattttttaccggattggtcctggatgaatagactgtgctttttctttttctctcccttccttcttggtttcccatagtataataagcatgcatactttaacttctatagttttctcctttagagggtcgtcttcagttttagaggtttacttctccccttgcctttgactcattggactagtgcagaggctttaagtagtttaaaatgggcttttgcttttctaggtcattaacgttttttatttagtttctttagccaatagtggctgagtttcgcacttgattttcaatattttatagtaagaaatgacaaactgctttgtttcatttcaataaacaaactctgcatttaagataactatttaagggttgttaagatgaagcatttactgtttctttgttactcgttggtacagctgtttgttttacttgcacatttgtacatatacttaatgttttcaagtgccttaattgtttaaaatctctggcttcaaagtttcttggggaaaggtcggtttacctcacattttttgtgttccctatagtaatattctagggtacctcacaaaaatgtatttatggtgcccatggcctgttagtttttagtgagtgctgtaggattaattcgaaaataggcaaatttcccattccctcccaaaggtggcaaaaaattagcttaaactgatgttaattgccatttacctggggtatgaattcccctgacacacattccatgtccaccatatgtggcaaatttggtgaaaaccataaccaatttgaagctcctgcaatactttgagacactgctctaacaacaagcattaatataaaattagttagattttgcaagtctacaaatgagctcttgcaaacagaactcacagcctttttacttttttcccctaacctttagcaaatgtagtatcttgagcccattaatttttgggttttttttaaaatccagaaggtatatagaaaccttttcagattgtgtcatctgatttgttcttgcagatgttcttctatcaaataccttatttttaccttacagatatttggttgccacaggcagatactgctggtatttagacatttctatttcagttcattaaaaactgcaaaaccaatctgtatcatgtaccaaactgacttaaaataaatctacatgtttattgaattaaaaaaaaaaaaaaaaa

SEQ ID NO: 154169 - DNA, 218 bp, Homo sapiens
aaaaagggcttgagcccagaacaggacattaagttcagtggccatgttagctgggtcgggaagacatccatggaagtgaagatgcaaatgttccaggccggcatttgtaaatccactcatccctgaaagcccagaggaagaggagctctttagacaaggggaatgtacattaatttgtttataataaaataaatttgaaaagcacattaaaaaaaaaa

SEQ ID NO: 154170 - DNA, 2116 bp, Homo sapiens
cacgcgtccgactaagcaaagacgcggagcggtacttctacatcatttatcgactcaccttcccttccccgactatcgcgcggggcccgtctctccagagagcgcaccgcatcctaacgcaacgaggcagccatcactgcgacccttacccttgggcaaagggcaacttactcctgcaacatgactgaatcaaggaccccaaaaccccaagaaacagggaaacttccacattcatgaaacaagctcatctatacatgcgaatcatgttcgagataagttgcgggagatagtaagaagcatccacaaactggagagaccatgtgaaggcaatggaagaaaggaaattacttcatagtttcttggctaaatcacaggatggactgcctcctaggagaatgaaggacagttatattgaagttctcttgcctttgggcagtgagcctgaattacgagagaaatatttgactgttcaaaacaccgtaagatttggcaggattcttgaggatcttgacagtttggggaggttcttattttgttacatgcacaacaaaatccactccgccaagatgtctcctttatcgatagttacagccctggtggataagattgatatgtgtaagaagagcttgagcccagaacaggacattaagttcagtggccatgttagctgggtcgggaagacatccatggaagtgaagatgcaaatgttccagttacatggtgatgaattttgtcctgttttggatgcaacatttgtaatggtggctcgtgattctgaaaataaagggccggcatttgtaaatccactcatccctgaaagcccagaggaagaggagctctttagacaaggggaattgaacaaggggagaagaattgccttcagctccacgtcgttacttgaaaatggcccccagcgctgaggagaggaccaccatacatgagatgtttctcagcacactgggatccaaagactataagttttcggagtcgagttttaccctctaatggcagtgtgggatgggagaattcaaaactgaaggagttttgggaaattttgcccacccctcagggagccggaacattttcaatcggatcttggtgggtttccttatgaggaaggcatatgaacttgcgtgggctactgcttgtagcgtttgggtgggtctcgaccgtttgtgggagcagtagatgaccatcatgtttccagaaccctgttgaggttggcctcattgctcttttctttcttcacaggtatgctttactcagaataattatattccaagtcagagtacaccagtgaagtggccctccccctgcaggagaagccagccatacaaccccacccaatgtccttccatttccaccggttccatgtcgggaaaaaagaaagtgccccattgggttttccccccaaaaacatatggagagtccccatgttgtaccttagatggggcagcgggcatttccaactcccatgagtggccccagcgacccttgagaaaggacctacccttgtggagcccctaagaacacccaccatttgttgaaaactagcactctaccccacagtgacgtggtatctgatgaagacctgatcgagtgtattgattttagtattgcttcgtgtcctccacacaggaggaggatgtattcagcctttaggatgatcagaaaagcagaaagagagagtggccggatggggctgaggggagaaagaattattaaacaataaatactttcaagacaattttaattgtgaacctaccatgttgcctcccatcttctgaaaaaacaaaaaaattataggcatgagccactgcacccggccggtggaaagcatttttaacaaaaaatttttaggccaggcacagtggtggctcatgcctgtaatcccagcactttgggagactgagatgggaggatcgcttgagaccagcctggggaacatagtgagaccctttctctacaaaaagttaaaaaattatctgagcatggtggtgtgcacctgtagtcccagttaggaggctgaggtgagtggattgcttgagtccgggagtttgagtctgcagtgagctatgatcatgccactgcactccagtctgggtgacagcaagac

SEQ ID NO: 154171 - DNA, 3300 bp, Homo sapiens
agtcctctcggcctctgtgcgctcagttgtttacctaggcgtccgggggaggcacactcgcgggactcgcgggactcggccccggcctcccagctcgcccaggacacgacgctggttctgcgggctctcggagcccagcgcgaatcccccgggctaattcccaagaaccgagaggcagcactgcctggaggctgcccccgcctccgcgcccccgtcctcactttctgaggctgttagcagagagtcccgcgggccggggagaagcgggacgcgggggatggcctcgcagcgccctgtgagcgtcggcagtagtcaggcagccagggctccttgggcgatcgccctgggtagaggagaggagtttccggggctcgggtccgggtcgccttccaggggaacgagcgcggaagcaagtgggcggcgagaggcggagcaagagacgctggagggcgtggacgcagcgggctttggaaaggccccaagttaatgaggcgtgcgccggctgccgagcgcctcttggagctgggctttcccccgcggtgcgggcgccaggagccgccttttccgctgggtgtcactcgggggtggggaagatggcccattcaaaagcgccgcgagggggcccggccagtgcccttcagtgagcgctcgcaagaggacggcagaggcccggcagctcggagctccgggaccttgtggcgcatcaggacgcggctgtccctctgccgggacccagagccgccgccgccgctctgcctcctgcgtgttagcctcctctgcgcgctccgggcaggcggccgtgggagccgctggggcgaggacggcgcgaggctgctgctgctgcccccggcccgcgcggctggaaacggagaggccgagccaagcggcggcccctcttatgctgggaggatgctggagagtagcggctgcaaagcgctgaaggagggcgtgctggagaagcgcagcgacgggttgttgcagctctggaagaaaaagtgttgcatcctcaccgaggaagggctgctgcttatcccgcccaagcagcatgcaacaccagcagcagcagcaacagcagcagcagcagcagcaacaacagcccgggcaggggccggcccgagccgtcccaacccagtggccccgcttgtcgccagcctcgagccgccggtcaagctcaaggtaactgctcttctccaacatgaagaccgtggactgtgtggagcgcaagggcaagtacattgtacttcactgtggtgatggcagagggcaaggagatcgactttcggtgcccgcaagaccagggctggaacgccgagatcacgctgcagatggtgcagtacaagaatcgtcaggccatcctggcggtcaaatccacgcggcagaagcagcagcacctggtccagcagcagcccccctcgcagccgcagccgcagccgcagctccagccccaaccccagcctcagcctcagccgcaaccccagccccaatcacaaccccagcctcagccccaacccaagcctcagccccagcagctccacccgtatccgcatccacatccacatccacactctcatcctcactcgcacccacaccctcacccgcacccgcatccgcaccaaataccgcacccacacccacagccgcactcgcagccgcacgggcaccggcttctccgcagcaccctccaactctgcctgaaaggggcagctcccgggcaagacaaggttttgaggacttgaggaagtgggacgagcacatttctattgtcttcacttggatcaaaagcaaaacagtctctccgccccgcaccagatcaagtagtttggacatcaccctactgaacaacttggcgattcttcttagttttctgcatacttttcatcacgatgcaggaaacgatttcgagtcaagaagacttttatttatgaacctttgaaaggatcgtcttgtatggtgaattttctaggagcgatgatgtactgtaattttattttaatgtattttgatttatgattatttattagtttttttttaaatgcttggttctaagacatttctgaatgtagaccattttccaaaaaggaaactttattttcgaaaaacctaatccgtagtaattcctaatcttggagaataaaaaagggcggtggaggggaaaacattaagaatttattcattatttctcgagtactttcagaaagtctgacactttcattgttgtgccagctggttgaaattaaaactcctgatattactttttttgaggatttttatttttgtttttgcttaaacatatagtttgtctagaagtttaaaaagctaaaagttaaaaatggtgtaattatgaaaatctaacactcaagatagtttctaaaaggaaatcagtagttaaggatacctgatttcaaaatatttaaagcataaccctaactgatggtaggatgattgtatcctgaatatgtggtagggccacatctattgtaggaaaaccttgcttttatcatctgtgtgtaaagggcttaataaggagaagaggccttttgactgatttgtgagtataaatgcatttgctgtttcatttcaaaaatgttgtggaggaaaagggtacatttaacttgtataagagaatatttgtactcctgtccaggctgcaggacctttcttcgagagctttgcacacttgacttgaaccacattttctgatccctttactttgttttagaagcacactgaaaaatctccgttgtttaaagtacaatttgtaaatatttcaaaggtctaggagtcataacttttgttttcatactgaaaatgatgttgatcagagaaaccaactgttttgcttttcattgctctgtgagaaatttgaggattctgttttgctgttaggtaagctaaactcagaaattgaaaaggaaaagactggataaacacaggattttcagtaagaaaacaaccccagtcttgtcttagaagccacttgttgaggagtctgttgggggaaaaaagaggatatgcttttaaagggtagaacaaaccttcctctgtgttaaatcaaaaggatggttcaaatccaccaggacagatgctacttgggtttaaatggagccatagatgatacaaagtcctcttggggctgaaaatcacttcctatttgcatggctttactaactggtttctgttttccattatctttttcacagaaagtcttggtcagtatttttccagcatttaaattgaaacggtcagtattagaccactgctaggttatgtagtcaagaaataaaaatagaattacatgct

SEQ ID NO: 154172 - DNA, 286 bp, Homo sapiens
aactgccctgcagcggcactccgagcccagtaagctcacctttgtgggggagcttgcccacggccgcttcagtgccaagatgggacgctggctctgggcgtctaccacggcctgcccgccagccacatggagctggcccaggagctcatggagacttgttaccagatgaaccggcagatggagacggggctgagtcccgagatcgtgcacttcaacctttacccccagccgggccgtcgggacgtggaggtcaagccagcagacaggcacaacctgctgcggccag

SEQ ID NO: 154173 - DNA, 464 bp, Homo sapiens
cggcacgaggacttacctgagatttcgtcacggatgacacaaagacacatccagcggggaccacctcacctgcagattagacccccaagccaagacacgaatcatgactcacgattgctgaagcctgagcaggtctctgtgggccgaccagaggggggcttcgaggtggtccctggtactggggtgaccgagtggacagcccagggtgcagctctgcccgggctcgtgaagcctcaggtgtccccaatccaagggtctggaggggctgccgtgactccagaggcctgaggctccagggctggctctggtgtttacaagctggactcagggatcctcatggcccgccccgcagggggcttggagggctggacggcaagtccgtttagctcacgggcccctccagtggaatgggtcttttcggtggagataaaagttgatttgctcttgaaaaaaaaaaaaaaaaa

SEQ ID NO: 154174 - DNA, 437 bp, Homo sapiens
  misc_feature (1)...(437): n = a,t,c or g
cggccgctcctggctttcaggctagaggaagagcagaagatgaggccagaaattgctgggttaaaaccagcaaatccacccgtcttaccagctcctcagaaggcggacaccgaccctgagaacttacctggtactggggtgaccgagtggacagcccagggtgcagctctgcccgggctcgtgaagcctcagatgtccccaatccaagggtctggaggggctgccgtgactccagaggcctgaggctccagggctggctctggtgtttacaagctggactcagggatcctcctggccgccccgcagggggcttggagggctggacggcaagtccgtctagctcacgggcccctccagtggaatgggtcttttcggtggagataaaagttgatttgctctaanaaaaaaaaaaaaaaaacgtttgcggcctcgtgccg

SEQ ID NO: 154175 - DNA, 2244 bp, Homo sapiens
gctggagttccgggagctctcccgtctcacaggggataagaagtttcaggaggcagtggagaaggtgacacagcacatccacggcctgtctgggaagaaggatgggctggtgcccatgttcatcaatacccacagtggcctcttcacccacctgggcgtattcacgctgggcgccagggccgacagctactatgagtacctgctgaagcagtggatccagggcgggaagcaggagacacagctgctggaagactacgtggaagccatcgagggtgtcagaacgcacctgctgcggcactccgagcccagtaagctcacctttgtgggggagcttgcccacggccgcttcagtgccaagatggaccacctggtgtgcttcctgccagggacgctggctctgggcgtctaccacggcctgcccgccagccacatggagctggcccaggagctcatggagacttgttaccagatgaaccggcagatggagacggggctgagtcccgagatcgtgcacttcaacctttacccccagccgggccgtcgggacgtggaggtcaagccagcagacaggcacaacctgctgcggccagagaccgtggagagcctgttctacctgtaccgcgtcacaggggaccgcaaataccaggactggggctgggagattctgcagagcttcagccgattcacacgggtgagcacctgtcctcgccccgcgtggtcacggccaccgggccacaggcacggctgggctgtggggctcaggttggctccgctcttggtggtggctgtgacctgggtccgggaggggcgggcttgccgcagcctcggggtggccacgctgcagcttgggggccctggcatccccatccccactgagcttcatggttgtgggacccagagtacttggaggggctgggcacccctcattttcatttctcagggcctgtctagggagggtctctgctgtgggcccagcatccccccagtttaggaggcacacgcacccatgactggggcaccatccccactgtggaccaggccctgttttaggtcacgccctccacgccagagtgtcacctcctggctctgctgtgatcttggcctgaggcccccgctgcctccgctcccaccgtctgccctgtgccctgtgccctgtgcggcaactgtgaggccccctgagcccaggttctgggggaggcggtttctgtcgtggtcacttgagggttgttggcatttccaggtgggctccggtggaaccacacggctcgcctgggggtggccatcatccaggcgccctccaccctgagcttgcgctgggggccacattcactatggggtggagagcgcttcggtgatgaggctgaggggggtgcagggtgccccccgtgtggtgacgaggccctggctgctgcacaggtcccctcgggtggctattcttccatcaacaatgtccaggatcctcagaagcccgagcctagggacaagatggagagcttcttcctgggggagacgctcaagtatctgttcttgctcttctccgatgacccaaacctgctcagcctggacgcctacgtgttcaacaccgaagcccaccctctgcctatctggacccctgcctagggtggatggctgctggtgtggggacttcgggtgggcagaggcaccttgctgggtctgtggcattttccaagggcccacgtagcaccggcaaccgccaagtggcccaggctctgaactggctctgggctcctcctcgtctctgctttaatcaggacaccgtgaggacaagtgaggccgtcagtcttggtgtgatgcggggtgggctgggccgctggagcctccgcctgcttcctcccagaagacacgaatcatgactcacgaattgctgaaaacctgaaacaggtcctctgtgggcccgaaccaaaggggggccttccaaggtggtcccctggtaactggggtgaaccgaagtggaacagcccagggtgcagctctgcccgggctccgtgaagcctcaggtgtccccaatcccaagggtctggaggggctgccgtgactccagaggcctgaggctccagggctggctctggtgtttacaagctggactcagggatcctcctggcccgccccgcagggggcttggagggctggacggcaagtccgtctagctcacgggcccctccaagtggaatgggtcttttcggtggagataaaagttgatttgctctaaaaaaaaaaaaaaaa

SEQ ID NO: 154176 - DNA, 2747 bp, Homo sapiens
tttcgtgttgacggcgctgcgatggctgcctgcgagggcaggagaagcggagctctcggttcctctcagtcggacttcctgacgccgccagtgggcggggccccttgggccgtcgccaccactgtagtcatgtacccaccgccgccgccgccgcctcatcgggacttcatctcggtgacgctgagctttggcgagagctatgacaacagcaagagttggcggcggcgctcgtgctggaagaaatggaagcaactgtcgagattgcagcggaatatgattctcttccctccttgcctttctgcttttctgtggactcctcttctacatcaacttggctgaccattggaaagctctggctttcaggctagaggaagagcagaagatgaggcccagaatttgctgggttaaaaccagcaaatccacccgtcttaccagctcctcagaaggcggacaccgaccctgagaacttacctgagatttcgtcacagaagacacaaagacacatccagcggggaccacctcacctgcagattagacccccaagccaaagacctgaaggatgggacccaggaggaggccacaaaaaggcaagaagcccctgtggatccccgcccggaaggagatcccgcagaggacagtcatcagctggaggggagcggtgatcgagcctgagcagggcaccgagctcccttcaagaagagcagaagtgcccaccaagcctcccctgccaccggccaggacacagggcacaccagtgcattctgaactatcgccagaagggcgtgattgacgttctcctgcatgcatggaaaggataccgcacagtttgcatggggccatgacgatctgaagcctgtgtccaggtccttcagtgagtggtttggcctcggtctcacactgatcgacgcgctggacaccatgtggatcttgggtctgaggaaagaatttgaggaagccaggaagtgggtgtcgaagaagttacactttgaaaaggacgtggacgtcaacctgtttgagagcacgatccgcatcctgggggggctcctgagtgcctaccacctgtctggggacagcctcttcctgaggaaagctgaggattttggaaatcggctaatgcctgccttcagaacaccatccaagattccttactcggatgtgaacatcggtactggagttgcccacccgccacggtggacctccgacagcactgtggccgaggtgaccagcattcagctggagttccgggagctctcccgtctcacaggggataagaagtttcaggaggcagtggagaaggtgacacagcacatccacggcctgtctgggaagaaggatggggctggtgcccttgtttcatcaattacccacagtgggcctcttcacccacctggggcgtattcacgctgggcgccagggccgacagctactatgagtacctgctgaagcagtggatccagggcgggaagcaggagacacagctgctggaagactacgtggaagccatcgagggtgtcagaacgcacctgctgcggcactccgagcccagtaagctcacctttgtgggggagcttgcccacggccgcttcagtgccaagatggaccacctggtgtgcttcctgccagggacgctggctctgggcgtctaccacggcctgcccgccagccacatggagctggcccaggagctcatggagacttgttaccagatgaaccggcagatggagacggggctgagtcccgagatcgtgcacttcaacctttacccccagccgggccgtcgggacgtggaggtcaagccagcagacaggcacaacctgctgcggccagagaccgtggagagcctgttctacctgtaccgcgtcacaggggaccgcaaataccaggactggggctgggagattctgcagagcttcagccgattcacacgggtcccctcgggtggctattcttccatcaacaatgtccaggatcctcagaagcccgagcctagggacaagatggagagcttcttcctgggggagacgctcaagtatctgttcttgctcttctccgatgacccaaacctgctcagcctggacgcctacgtgttcaacaccgaagcccaccctctgcctatctggacccctggcctagggtggatggctgctggtgtggggacttcgggtgggcagaggcaccttgctgggtctgtggcattttccaagggcccacgtaggcaccggcaaccgccaagtggcccagggtctgaactgggtctggggttcctcctcgtctctgctttaatcaggacaccgtgaggacaagtgaggccgtcagtcttggtgtgatgcggggtgggctgggccgctggagcctccgcctgcttcctccaagaagacacgaatcatgactcacgattgctgaagcctgagcaggtctctgtgggccgaccagaggggggcttcgaggtggtccctggtactggggtgaccgagtggacagcccagggtgcagctctgcccgggctcgtgaagcctcagatgtccccaatccaagggtctggaggggctgccgtgactccagaggcctgaggctccagggctggctctggtgtttacaagctggactcagggatcctcctggcaacgcccgcagggggcttgaagggctggacggcaagtccgtttagctcacgggcccctccagtggaatgggtcttttcggtggagataaaagttgatttgctcccaaaaaaaaaaaaaaaaaaa

SEQ ID NO: 154177 - DNA, 422 bp, Homo sapiens
caagatgacggagccgggcgcctctcccgaggacctttgggtcaaggtggagtatgcctacagcgacaacagcctggaccccgaccctgcgggagattgtgattggcgtcctgcaccaattgaaaaaccagctttactgaccggttcttggaaacctggagaacagccaacaagaggcccttgaatctctacgtggccactgaactgctgggcccgggagactggactacaacacctcacactggtcagctggtttctacttggtgtttggtttttcccagccccattttatcttcagcggagccgcggtgtttgttttgtgaaagcttctgattaatttattatattgacgataaaactcaaacctacccagccttccccccactccatggaagtccttgggatgggcgtctgctctggac

SEQ ID NO: 154178 - DNA, 3819 bp, Homo sapiens
atggcccgcaccgtggtgctcatcaccggctgttcctcgggcatcggcctgcacttggccgtacgtctggcttcagatccatcccagagcttcaaagtgtatgccacgttgagggacctgaaaacacagggccggctgtgggaggcggcccgggccctggcatgccctccgggatccctggagacgttgcagctggacgtaagggactcaaaatccgtggccgctgcccgggaacgcgtgactgagggccgcgtggacgtgctggtgtgtaacgcaggcctgggcctgctggggccgctggaggcgctgggggaggacgccgtggcctctgtgctggacgtgaatgtagtagggactgtgcggatgctgcaggccttcctgccagacatgaagaggcgcggttcgggacgcgtgttggtgaccgggagcgtgggaggattgatggggctgcctttcaatgacgtttattgcgccagcaagttcgcgctcgaaggcttatgcgagagtctggcggttctgctgctgccctttggggtccacagcttgagcctgatcgagtgcggcccagtgcacaccgccttcatggagaaggtgttgggcagcccagaggaggtgctggaccgcacggacatccacaccttccaccgcttctaccaatacctcgcccacagcaagcaagtctttcgcgaggcggcgcagaaccctgaggaggtggcggaggtcttcctcaccgctttgcgcgccccgaagccgaccctgcgctacttcaccaccgagcgcttcctgcccctgctgcggatgcgcctggacgaccccagcggctccaactacgtcaccgccatgcaccgggaagtgttcggcgacgttccggcaaaggccgaggctggggccgaggctgggggcggggccgggcctggggcagaggacgaggccgggcgcagtgcgagaccccgcaaacaagcgcatcagaggatctgggtggtgcgagagcctcctacagcagccaggtacacacaaggcctcagtttttccatctgtgaaatgggtacgtggacagacctgtccagtagcctcccatgtgagaatcctcggactgagaggcgggggtccgatcggcatcaaggattcacccactcccagagccttcgggatcagccccaccccatcagcaggacacagcccatgccactggaaatctcgcgagaatcccgcgctgaagcgaagtcgagacgtttgaccttcctccgtttccgtagttccgagttgcggtttctccgcctgggcagcatggccgtattccggtcgggtctcctggtgctgacgacgccgctggcctccctagcccctcgcctggcctccatcctgacctcggcggcccggctggtgaatcacacactctatgttcacctgcagccgggcatgagcctggagggcccggctcagccccagtacagccccgtgcaggccacgtttgaggttcttgatttcatcacgcacctctatgctggcgccgacgtccacaggcacttggacgtcagaatcctactgaccaatatccgaaccaagagcacctttctccctcccctgcccacctcagtccagaatctcgcccacccgccagaagtcgtgttgacagatttccagaccctggatggaagccagtacaacccggtcaaacagcagctagtgcgttacgccaccagctgttacagctgttgtccgcgactggcctcggtgctgctatactccgattatgggataggagaagtgcccgtggagcccctggatgtccccttaccctccacgatcaggccagcttcccccgtggccgggtctccaaagcagccggtgcgtggctactaccgtggcgctgtcggtggcacgtttgaccgcctgcacaacgcccacaaggtgttgctcagtgtcgcgtgcatcctggcccaggagcagcttgtggtgggagtagcagacaaagatctgttgaagagcaagttgctccctgagctgctccaaccttatacagaacgtgtggaacatctgagtgaattcctggtggacatcaagccctccttgacttttgatgtcatccccctgctggacccctatgggcccgctggctctgacccctccctggagttcctggtggtcagcgaggagacctatcgtggggggatggccatcaaccgcttccgccttgagaatgacctggaggaacttgctttgtaccagatccagctgctgaaggacctcagacatacggagaatgaagaggacaaagtcagctcctccagcttccgccagcgaatgttggggaacctgcttcggcctccatatgaaaggccagagctccccacatgtctctatgtaattgggctgactggcatcagtggctctgggaagagctcaatagctcagcgactgaagggcctgggggcgtttgtcattgacagtgaccacctgggtcatcgggcctatgccccaggtggccctgcctaccagcctgtggtggaggcctttggaacagatattctccataaagatggcatcatcaacaggaaggtcctaggcagccgggtgtttgggaataagaagcagctgaagatactcacggacattatgtggccaattatcgcaaagctggcccgagaggagatggatcgggctgtggctgagggaaagcgtgtgtgtgtgattgatgccgctgtgttgcttgaagccggctggcagaacctggtccatgaggtgtggactgctgtcatcccagagactgaggctgtaagacgcattgtggagagggatggcctcagtgaagccgcggctcaaagccggctgcagagccagatgagcgggcagcagcttgtggaacagagccacgtggtgctcagcaccttgtgggagccgcatatcacccaacgccagagcttgcagcctggtggggtcggacgatgtggctgggggcttctctgcccggttcctgacacaccggccagcagtgcaggtccggtggagtatgcctacagcgacaacagcctggaccccgggctttttgtagaaagcacccgcaaggggagtgtagtgtccagagctaatagcatcggttccaccagtgcctcttctgtccccaacacagatgatgaggacagtgattaccaccaggaggcctacaaggagtcctacaaagaccggcggcggcgcgcacacactcaggctgagcagaagaggagggacgccatcaagagaggctatgatgaccttcagaccatcgtccccacttgccagcagcaggacttctccattggctcccaaaagctcagcaaagccatcgttctacaaaagagtatggctagggaaagcactggaggggatggagccaagaggggctgtgaagaggccagtgcctcctacccacccatggctcggccttggtgtggtgattgccatgggatagttggggtctgggccattgactacattcagtttttgcacaaggagaagaaaaagcaggaggaggaggtgtccacgttacgcaaggatgtcaccgccctaaagatcatgaaagtgaactatgagcagattgtgaaggcacaccgggacaacccccatgaaggggaggaccaggtctctgaccaggtcaagttcaacgtgtttcaaggcatcatggattccctgttccagtccttcaatgcctccatctcagtggccagcttccaggagctgtcagcgtgtgtcttcagctggatcgaggagcactgtaagcctcagaccctgcgggagattgtgattggcgtcctgcaccaattgaaaaaccagctttactga

SEQ ID NO: 154179 - DNA, 339 bp, Homo sapiens
ggcacgagtgacggagccgggcgcctctcccgaggacccttgggtcaaggtggagtatgcctacagcgacaacagcctggaccccggtgagtagctgccccatcttaagctctagagggacactcccgcccaggctctctagattcttgtggcgttgccaaccacgcctgagcacagtccactctccctgagcagagttcctggcttgagacagcaggagctgaaggacaagggcagaaaacaactgagggtgacacctagttccctctgctctggaacagggaagtggtggaactgatcactcaccactcagtggagcagctgatcactcacaccctc

SEQ ID NO: 154180 - DNA, 689 bp, Homo sapiens
ctgcacgagagatgaccgagcccgggcgcctgtcacgaggagacttgggtcaaggtggagtatgcctacagagaccacagcctggaccccgggctttttgtagaaagcacccgcaaggggagtgtagtgtccagagctaatagcatcggttccaccagtgcctcttctgtccccaacacagatgatgaggacagtgattaccaccaggaggcctacaaggagtcctacaaagaccggcggcggcgcgcacacactcaggctgagcagaagaggagggacgccatcaagagaggcgtatgatgaccttcagaccatcgtccccacttgccaggagcaggacttctccattggctcccaaaagctcaacaaagccatccttctacaaaagagtatggctagggaaagcactggaggggatggagcccagaggggctgtgaaaaggccagagcctcctacccacccatggctcggccttggtgaggtgattgccatgagatagttggggtctggggtaaggggaacaaagtcagccttatcttcttggttgagaatacttctgtacctgtcctttttttcttgcccccaccctagccattgactacattcagtttttgcacaaggagaagaaaaagcaggaggaggaggtgtccacgttacgcaaggatgtcacccgcctaaagatcatgaa

SEQ ID NO: 154181 - DNA, 2190 bp, Homo sapiens
gattgaagccttggaaccgcccgttgatcccgtcgacccacgcgtccgcaagatgacggagccgggcgcctctcccgaggacccttgggtcaaggtggagtatgcttacagcgacaacagcctggaccccgggctttttgtagaaagcacccgcaaggggagtgtagtgtccagagctaatagcatcggttccaccagtgcctcttctgtccccaacacagatgatgaggacagtgattaccaccaggaggcctacaaggagtcctacaaagaccggcggcggcgcgcacacactcaggctgagcagaagaggagggacgccatcaagagaggctatgatgaccttcagaccatcgtccccacttgccagcagcaggacttctccattggctcccacaagctcagcaaagccatcgttctacaaaagaccattgactacattcagtttttgcacaaggagaagaaaaagcaggaggaggaggtgtccacgttacgcaaggatgtcaccgccctaaagatcatgaaagtgaactatgagcagattgtgaaggcacaccagggacaaccccataaaaaggggaggaccgagttctctgaccagtcaaggtttcaacgtgtttcaaagggcatcatggattccctgttcccagtccttcaatgcctccaatctcagtggcccagcttccaggagctgtcagcgtgtgtcttcagctggatcgaggagcactgtaagccttcaagaccctgcgggagattgtgattggcgtcctgcaccaattgaaaaaccagctttacttgaccggttcttggaaacctgggagaacagccaacaagaggcccttgaatctctacgtggccactgaactgctgggcccgggagactggactacaacacctcacactggtcagctggatatctacttggtgtttggtttttcccagccccattttatcttcagcggagccgcggtgtttgttttgtgaaagcttctgattaatttattatattgacgataaaactcaaacctacccagccttccccccactccatggaagtccttgggatgggcatctgctctgggacaccccaaagagcatcctgccctctcagccctttattcaagcatcagatttctgctcatgatctacatagatttggaaactggttttcctctgttttggtctcttgggcaacatttttggcccaagtttgggcaacatttgggccaagtttggcgaattttgggcagtaagctgtatgggaggaaaaggagtaagaggaaataattcccacagccatgaagggtgaaagggcaccttgtcgataggactagggctgcctggtcagtcccaggtgaggccaagggctttctggccatctcagggaggggccaccaggttcctcccctcaccccatattcccatcaccttccctcctctgctctgggtggtaagggaaagccctcccggttccccacaggctatgatgctgcatggccagaggccagggtataacacagcacttacatattggaaattttttatttttcctaaaatacccaatgccagttttgcctacgggttacaaattttgaaatattaactgagcctcaaaaatcaccctttctggtcaagcatatcttggcctctccccatgtcctcagtgttgccctgcatttctccccaggacttggggggtggggtgaaaagcgttcaaaaaaatccttaaaagggctccctgggggtacacaagcccagcaggtccttgagtgaagcccgtgggccctcccaaatgctccgttttataggcaacctctctctaccctagttcttccaaattcacttcttgcctttcctcagggtttgatatctgggcaggttttgactatccagaggaaattaaaatatttttatataaaattaaattataattaaatattgccaaatgctttccttttagcattggttccaatgtctaaatggttaacctcaagctactgcaatttagacaatgaaatggggctggggtctacccccagccaccagccctcatcctctctacccagtgctctggggttatgcctggctcctgactgctctgcttaaaggtgaaagtagcaggaacaacaacaaaagccaaccaaaaacaaggtagccagtgcaagacatctcactcttctgacatcctgc

SEQ ID NO: 154182 - DNA, 606 bp, Homo sapiens
  misc_feature (1)...(606): n = a,t,c or g
gtttcagggaggggtttaaaagctngcagtcaaactggtncagtgagtccttctgtatttcagggatttgctccattncagctcttatctccaggtacctggggcgcagtgcctcgtatatntggaaggccagatggaccagggaagccatgcacccgtcgtgctgcccgtgcatctgtaagcctttcagcacactggtgaaaagccacgtaactgcatctgcgagcagtgtccctgacagcacttgtttgaggagaggccagcagagctgtgaggttgtcctctggcaggacagagtatctttccaggccagggaattgaaggctgtaattaatagcgctgtacaaacatcctcatgcttcatcagacatttgcccaggtctgtaagctctgccatagctgagggggtgacctctgtggccatcatttcttcatcgtctccatctgctgggggagcactactgtggtcagcacccttctttgaaacacagcaaaccgcagttgctcctccagcatctcttgagactctgggttttcatctgcagcctcatcttctccacacagcaggctcctttggttgataacgttgccatttctgagaaagcc

SEQ ID NO: 154183 - DNA, 483 bp, Homo sapiens
aaaaaaatcgtagatcactagtccagggtggtggaacttcgaagctggagcgattctaagcctaggtgacacatggatcggctggacaggctgttaccagcatgctaactgtgagacacatgcttcataggggctactggtaccttactcacttatgttaagtgtgacatgcacatccctctggacagagtcactagaaatagcgtccttcagtggatcactgcgtgacattactcacttttgcataaaacgaagacccaaaggagaagaaagtggtcagagagagtctgattagggtcgctgctttccttgtccttccttttctgcactcctgtggaacttggccccctggttttctgcagtggagaagatgaggctgcagatgaaaacccagagtctcaagagatgctggaggagcaactggtgaggatgttaacccgagaagtcatggacctaatcacggtttgctgtgtttcaaagaag

SEQ ID NO: 154184 - DNA, 316 bp, Homo sapiens; identical to SEQ ID NO: 107823

SEQ ID NO: 154185 - DNA, 1187 bp, Homo sapiens
tcctagttaccgcctcgacgatttcgtgccgcggcccggtaccaacgggtggtctcgccgagggagctgtcgtgcctcgtggtcccgggactgcagtggtgtgcgctctcggcgcgtggcgctaggcatggcgatggatcaagtaaacgcgctgtgcgagcagctggtgaaagcggtgacggtcatgatggaccccaactccacccagcgctaccggctggaagccctcaagttttgtgaggagtttaaagaaaagtgtcctatctgtgtcccctgtggcttgaggttggctgagaaaacacaagttgccatcgtcagacattttggccttcagatcctggaacacgttgtcaagtttcggtggaacggcatgtctcgattggagaaggtgtattttgaagaacaatggtcctggaacctgattgccaaaggaccctttgaacattttggaagaggagaaccatattaaagatgctctgtctcgaattgtagtggaaatgatcaagcgagagtggccacagcattggcctgacatgctaatagaattggacactctttccaaacaagggaagacagatacttctcaggagtcaaaggcgcaagcaaactgtcgagtaggagttgcagcactgaatactctagcaggctatattgactgggtgtctatgagtcacatcactgctgaaaactgtaaactcctggagatactgtgtttgctgttgaatgaacaggaacttcagttgggagccgctgagtgtcttctcattgcagtcagcagaaaaacttgtcaggaggctgagggtgctgtacgtccctcgttgacaaagggagcctggaacggcggtggtgatggaacctcagagccaggggctgaggggtgggcctacagaagtcctcttcattcccctaatctgagggcagcagccctgtcccctgattcagggtgtgtctggcaagccctttgcagccttcttacctgcagctggatgctccagaatcagaagatgaaactctcctttgtgctggggtcctggagcatccagatggagaggggcaatgccctggtggtgctgcgcagcctgctctggccgggcctcaccttctaccatgctccccgcaccaagaactatggctacgtctacgtgggcactggcgagaagaacatggacttgcccttcatgctatag

SEQ ID NO: 154186 - DNA, 435 bp, Homo sapiens; identical to SEQ ID NO: 152741

SEQ ID NO: 154187 - DNA, 939 bp, Homo sapiens
atggcagagcctttcaccaaggctctggatatgcttgacgcggaaaaatctgctatattaggattacctcaacctctcttggaactcaatgactctcctgtcttcaaaaccgtcttggaaagaatgcagcgtttcttctctaccctctatgaaaactggaatgtccatgggttggacttttcatctagtgtacagagcactatgaagccctggtatcccccatcctcggacctcttttcacctacctccatatgtggagaagatgaggctgcagatgaaaacccagagtctcaagagatgctggaggagcaactggtgaggatgttaacccgagaagtcatggacctaatcacggtttgctgtgtttcaaagaagggtgctgaccacagtagtgctcccccagcagatggagacgatgaagaaatgatggccacagaggtcaccccctcagctatggcagagcttacagacctgggcaaatgtctgatgaagcatgaggtgctgtcagggacactgctcgcagatgcagttacgtggcttttcaccagtgtgctgaaaggcttacagatgcacgggcagcacgacgggtgcatggcttccctggtccatctggccttccagatatacgaggcactgcgccccaggtacctggagataagagctgtaatggagcaaatccctgaaatacagaaggactcactggaccagtttgactgcaagcttttaaacccctccctgcagaaagtggctgacaagcgccgaaaggaccaattcaaacgcctcattgctggttgcattgggaaacccttgggagagcagttccgaaaagaagttcacattaagaatcttccctcacttttcaaaaaaacaaagccaatgctggagacggaggtgctggacaatgatgggggtggcctggccaccatctttgaaccctga

SEQ ID NO: 154188 - DNA, 3573 bp, Homo sapiens
  misc_feature (1)...(3573): n = a,t,c or g
cgcgaattcccgggtcgacgatttcgtaagttgccatcgtcagacattttggccttcagatcctggaacacgttgtcaagtttcggtggaacggcatgtctcgattggagaaggtgtatctgaagaacagtgtcatggagctgattgcaaatggaacattgaacattttggaagaggagaaccatattaaagatgctctgtctcgaattgtagtggaaatgatcaagcgagagtggccacagcattggcctgacatgctaatagaattggacactctttccaaacaaggggaaacacagacagaattggtgatgtttatccttttgcgactggcagaggatgtagtgacttttcagacacttccccctcaaagaagaagggacatccagcaaacattaacccagaacatggaaaggatcttcagttttctgcttaacacacttcaagaaaatgtaaacaagtatcagcaagtgaagacagatacttctcaggagtcaaaggcgcaagcaaactgtcgagtaggagttgcagcactgaatactctagcaggctatattgactgggtgtctatgagtcacatcactgctgaaaactgtaaactcctggagatactgtgtttgctgttgaatgaacaggaacttcagttgggagccgctgagtgtcttctcattgcagtcagcagaaaaggcaagttggaagaccggaagcccttgatggtcttatttggagatgttgccatgcattatatactctccgccgcacagactgctgatggaggaggtttggtagaaaaacactacgtctttctgaagaggctctgtcaggtgttgtgtgcgctgggcaatcagctgtgtgcattgctgggtgcagattctgatgtagaaacaccatcaaactttggaaaatacctggaatcttttcttgctttcacaacccatccaagtcagtttctacgctcttcaactcagatgacttggggagccctcttcaggcatgaaatcctgtcccgtgatcctttgctattagcaataataccaaaatatcttcgtgcttccatgactaacttggtcaagatgggctttccttctaaaacagacagccctagctgtgaatattctcggtttgattttgatagcgatgaggacttcaatgctttcttcaactcctcccgagcacaacaaggagaggtgatgaggttggcatgtcgtttggatcccaaaactagcttccagatggctggggagtggctaaagtatcaactatcaacttttcttgatgctggttctgtgaattcttgttctgcagttggaactggagaaggaagcctctgttccgtcttctcaccttcattcgtgcagtgggaagccatgactctttttttggaaagtgttatcacccagatgtttcgaacactaaatagagaagaaattcctgttaatgatggaatagagctattgcagatggttctgaactttgataccaaggatcccctcatcctgtcctgcgtcgcttactaatgtctctgcactctttccatttggtcacctacagaccagagttcctgccccaggtcttctctaagctattttcatctgtcacttttgaaactgttgaagaaagtaaggcccccagaacccgggcagtgaggaatgtgaggaggcatgcttgttcctccatcatcaagatgtgtcgtgactacccccagcttgtgctgcccaattttgacatgctttataaccatgtgaagcaactcctctccaatgagctactcctgacacaaatggagaagtgtgccctcatggaagccctggttctcattagcacccaatttaagaactacgagcgtcagaaggtgttcctagaggagctgatggcaccagtggccagcatctggctttctcaagacatgcacagagtgcgtgtcagatgttaatgctttcgttgcgtatgtgggtacagatcagaagagctgtgacccaggcctggaggatcagtgtggcttaaaccgtgcacgaatgagcttttgtgtatacagcattctgggtgtggtgaaacgaacttgctggcccactgacctacaagaggccaaagctgggggatttgcggtgggttatacatccagtggaaatccaatcttccgtaacccctgcacagagcagattctgaaacttcttgacaatttgcttgcgcttataagaacccacaatacattatatgcaccagaaatgctagccaaaatggcagagcctttcaccaaggctctgggatatgcttgacgcggaaaaatctgctatattaggattacctcaacctctcttgggaactcaatgactctcctgtcttcaaaaccgtcttgggaaaggaatgcagcgtttctttcttcttaccctcttatggaaaactgttttcatatcctaggggaagggcagggcccttccatgcagcaagacttctatactgtggaggaccttgctacccagcttctcagctcagccttctgtcaacttgaacaatattcctgactaccgactcagacccatgcttcgggtctttgtaaagcctctggtgctcttctgtcccccagagcactatgaagccctggtatcccccatcctcggacctcttttcacctacctccatatgaggctttctcagaaatggcaagttatcaaccaaaggagcctgctgtgtggagaagatgaggctgcagatgaaaacccagagtctcaagagatgctggaggagcaactggtgaggatgttaacccgagaagtcatggacctaatcacggtttgctgtgtttcaaagaagggtgctgaccacagtagtgctcccccagcagatggagacgatgaagaaatgatggccacagaggtcaccccctcagctatggcagagcttacagacctgggcaaatgtctgatgaagcatgaggatgtttgtacagcgctattaattacagccttcaattccctggccttggaaagattactctgtcctgccagaggacaaccttcaaaagttctgcttgcctctccttcaaaccaagtgcttgtcagggacactgctcgcagatgcagttacgtggcttttcaccagtgtgctgaaaggcttacagatgcacggggcagcacggacggggtgcatggcttcccctggtccaatctggcccttccagatatatgaggcactgcgccccagggtaccctggagataagagctgtaatggagcaaatcccttgaaatacagaaggactcactggaccagtttgactgcaagcttttaaacccctccctgcagaaagtggctgacaagcgccgaaaggaccaattcaaacgcctcattgctggttgcattgggaaacccttgggagagcagttccgaaaagaagttcacattaagaatcttccctcacttttcaaaaaaacaaagccaatgctggagacggaggtgctggacacatgatgggggtggccctggccaccatctttgaaccctgaatcaagcttttgggcatccttcctcggcctttnttgtcatctcttcttttccctttgtagccgatctctagg

SEQ ID NO: 154189 - DNA, 812 bp, Homo sapiens
ccactgaagcgctcagatggctgtaacgacggccgacccacgcgtccgcccacgcgtccggacacaactgtgttcactagcaacctcaaacagacacgcatggtgcatctgactcctgtggagagagtctgccgttactgccctgtggggccaaggtaaacctggatgaaagttggtggtaaggccctgggcaaggctgctgggtggtcctacccctgggacccccaaaaggtcctttgaaaccctttgggggaatctgtcccaactccctgaatgctggttaaatggggcaaaccccctaaaggtgaaaaggctcaatggcaaaagaaaaagtgctcgggtgccctttaagtgaatggccccggcctcaccccggacaaccctcaaagggcacctttggcccacactgaagtgaagctgcactgtgaacaagctgcaccgtggatccctgaagaacttcaggctccttgggcaacgtgcttggtctgtgttgcttggcccatcacttttgggaaaagaatttcaaccccaccagttgcaggcttgcctaatcaagaaaattggttggcttggtgttggctaaatgcccttggccccacaagtaatcacttaagcctcgctttccttgctggtccaatttccaattaaaaggtttcctttggttccctaagttccaactactaaactggggggatattattgaaagggccttgagcatcttggattttgcctaataaaaaacatttattttcatcgcatacaagaataaaacaagcgcggccgattaagaggatacttcaggggcgcaagat

SEQ ID NO: 154190 - DNA, 1734 bp, Homo sapiens; identical to SEQ ID NO: 146906

SEQ ID NO: 154191 - DNA, 2454 bp, Homo sapiens; identical to SEQ ID NO: 146907

SEQ ID NO: 154192 - DNA, 2661 bp, Homo sapiens; identical to SEQ ID NO: 146908

SEQ ID NO: 154193 - DNA, 3266 bp, Homo sapiens
atgcggctgcacagacttcacgcgcggccgagcgcggtggcctgtgggctcctgctgcttctcctccagggtcactatgaggctcccgcggagggcctgtgctgccggccggtaataacagtaatagcttctggcagcagctggctctcaatgtgtggcgtccttggccaagggggcgcgctgagccctccaaaggggcctcagacaagcatgatgagaaagcctgcctgttttgatggttccaagcttggaaagtttgggaaagaatccaagaacatggcaggttatcaaggcgttatcagctgggacacaaaaggagagaagggcgggaagatgccgcgcgtcgtgcccgaccagagaagcaagttcgagaacgaggagttttttaggaagctgagccgcgagtgtgagattaagtacacgggcttcagggaccggccccacgaggaacgccaggcacgcttccagaacgcctgccgcgacggccgctcggaaatcgcttttgtggccacaggaaccaatctgtctctccagttttttccggccagctggcagggtagatcagcgacaaacacctatccgagagtatgtcgacttagaaagagaagcaggcacggtatatttgaaggctcccatgattctgaatggagtctgtgctatctggaaaggctggattgatctccaaagactgcatggtatgggctgtctggagtttgatgaggagcgagcccagcaggaggatgcattaacacaacaggcctttgaagaggctcggagaatgacacgcgaatttgaagatagagacaggtctcatcggcaggaaatggaggcgagagtttcacagctgctggcagtaactggcaagaaaacaactagaccctaggcctggttccaatttaggtggtggtgatgacctcaaacttcgttaattaatagcacagcagatgtgtgctgcccatcttttacatacacattgctttctaagtttggcagaaataattgattaaaagaccagaaactgtgataactggaggtactacggtctatttcttcaaccttaggcagtaatagacatcacaaactgccatggttttgcactatgattataatacctggcatttctaaatttttttaagccatgtagccagtaataatttgaagttttttttctatgcaagcttaccttgttggcattattttagggagttgaaactatcaactgtaaagctccttttcttccactttaatttaaaagttcatgtcatttaaaaacaagtcaagaaattaaaattgtatcagagggttttctctaatcattttttctatttttttttttgtacttctaaacgtttgggttatacagcttcattttagatgaccattcttattttttggtttgcttgccccatttccttttgggtttttatagcctatagcattttaaaactgctgatgttgtttgcattatttacaggctaaaaacttaataccataaagctgtctgccacagccttctgacaaagtttacagttattaaagttgcagcctccttttaaatgctagtaatcagcactctttcttttttttttttttaatagagacagggtctcgcagtgttgcccaggctggtctcgaactcctggcatcaagggaaccccccggccttagcctcccagagtactgggattacaggctctttctttttaaacataaaagttttaaattggtattaactctgtactctggccctagattgttttaggcttctgttctgtaatcatgagtttggttggagatattctccatagatgatcttctactgaaatgcctaaagaagtcacaggctggcttctgttttattcagggatttttttaaaaagtcaatcagaaaagggatactggagcttcttcatgtatgtaacagcatattaaactggagacagtgatgaatccagctaccaaagggtaatattgtaattaaaatcatggttaaagatagctgcttttatgtgtattttatattgcatgcttttgcaaaaacatgctgggtgatgaaagattagttttagagagaaaatgttcatctgggcagaggatgcattttcttccattaattctggaaaaaacgttcacaggtatatatatggtattttgccaaagggctatttaaaggaccctttggaaaggaattaaggtaagaatattttttaaataggcttactgtcaaattgcaactttttttttagatacagagtggaaaacagtgctaaagtccatttggcacctccttacaaataattgtgcaagggtcacatttaattaaatggttactacatttcctgaattttttggaaaatgtattttatccattaaatggcattattttcaaagggtgaaaaactgacacagtcaattcagaaaatggactgaagtctgaataaggtcattgcatttaaaaagcatataactgtacttgactgatgagggaggtgttactttcattgtatataggtcttatttcataaacagatatcctgtatcaaataaaagtatttgttatatatttgaacgttatgcatggaaacggagtgtgtttaaattgttacaaacaataatgcgtcattaaaggccatgctgatcttgcataactataagtactatgaatgaatttggttggttttggtgttgtacagctcacatgtttacacactcagtgccctaatttcccctgagggaatcgctttttaagtgatccttacagtggtgttttatgttactttattacagagctccttggttttttacttctgcacttaaatttttttaaataacatgatgatgggaccattttcctctaatggtctagctaagggcttttcggtccacccagtaaataagatcaaatggctccttaaaaggttccctgttaccatccctaaaggtaaaatactggattttcctgtcatttggcacccatgctgcttctgtctgtcttaatgctggcattaagatcatgagccctttttctccagtagtacaggctttgaaaactactttctattaagttattgatgcaatttgatattttttcgataatctatatttaaacaaaattacatcattgcatcatctttttctaaatccatctccattaaaacttgccttaagctaccagattgcttttgccaccattggccatactgtgtgtttgtttgtttaatttactttcacaataaacttctgtgtagtaaaaaaaaaaaaaaaaa

SEQ ID NO: 154194 - DNA, 237 bp, Homo sapiens; identical to SEQ ID NO: 125401

SEQ ID NO: 154195 - DNA, 4291 bp, Homo sapiens
  misc_feature (1)...(4291): n = a,t,c or g
ctgcgggcggcgggcggcgggcgcaccatgccctccttcgacgaggcgctgcagcgggtgggcgagttcgggcgcttccagaggcgcgtgtttttgctgctgtgcctgacgggcgtcaccttcgccttcctcttcgtcggcgtggtcttcctgggcacgcagcccgaccactactggtgccgcgggccaagtgccgcggcgctggccgagcgctgcggctggagcccggaggaggagtggaaccgcacggcgcccgcctcccgcggcccagagccccccgagcgccgcggccgctgccagcgctacctcctggaggcggccaacgacagcgcctccgccactagcgctctcagctgcgcggacccactcgccgccttccccaaccgttcggctccccttgtgccgtgccgcggcggctggcgctacgcccaggcccactccaccatcgtcagcgagtttgaccttgtctgtgtcaatgcgtggatgctggacctcacccaagccatcctgaacctcggcttcctgactggagcattcaccttaggctatgcagcagacaggtatggcaggatcgtcatttacttgctatcctgccttggtgttggcgtcactggggttgtggtggcctttgcaccaaacttccctgtgtttgtgatcttccgcttcctgcaaggagtatttttttagtttgacgtggatgacttgctacgtgattgtgacagaaatagtaggttcgaaacaaaggaggattgtgggaatcgtgattcaaatgttctttacccttggaatcataattctccctggaattgcctacttcatccccaactggcaaggaatccagttagccatcacgctgcccagctttctcttcctcctttattactgggaggtccctgagtctccccgttggctgattactcggaagaaaggagataaagcattacagatcctgagacgcattgctaagtgcaatgggaaatacctctcatcaaattactcagagatcactgttacagatgaggaagctagtaatccatcctttttagatctggtgagaactccccaaatgaggaaatgcacacttattcttatgtttgcttggttcacaagcgcagtggtgtatcaaggacttgtcatgcgcctgggaattatagggggcaacctctatatagactttttcatctcgggcgtggtggaactgccaggagctctcttgatcttactaaccattgagcgccttggacgacgcctcccctttgcagcaagcaatatagtggcaggggtggcatgccttgtcactgcgttcttaccagaaggaatagcatggttgaggaccacagtggctacattgggaagactagggataaccatggcctttgaaattgtttatttggtaaattcagaattgtacccaacaacattacgaaatttcggagtttcgctctgttcaagtctgtgtgattttgggggaatcatagccccatttctgctctttcggctagcagccgtgtggctagaactacctctgatcatctttggtatcctggcatccatctgtggtggccttgtgatgcttttgcctgaaaccaagggtattgccttgccagagacagtggatgatgtagaaaaacttggcagtccacattcctgtaaatgtggcaggaataagaaaaccccagtttcccgctctcacctttgaggcccccgacaaagacagaaagaaggagctatccagggagctgatcctccttgcaaagctgtgccttgcaggagatgcacgtgtgcatttcagcttacattcatgccgcgctgtttgttaatactgtattaaaggaccttcaattctattccagagttatttttnattattaatgttgggatgagttaggatttgtaatgctgttgaagtttctgggaacacataatatgtagccagtttaacaaagaagctgtcaggtgcacagcccttcctgggtttttttcttgtgttccccctgtggcctctgacccccattaggcctaaagagagacaagagaagcccccccaaccctgattcctcatgacagctcccatcaaagaatgtgggatgtgcccgacccaaggatttgagaaagttgtacagaaatgtgttccatcaaatctggtcaagggacctaagctccctagctgacccattcattctgaagattgcatggaggatgaacatctgggaatcctgttaatgagaaggctgaatcacaggcacctggggccaaagggtgtgagcattcatgttctctgctcaccttggtttccgcacaccttcgcaatgtgaacaggtcaggagtccctcccgtccacctcctctgtaacaagctgggggttccagggcatgggttttagggccctgtttccagcaattaggaaccaatctggctggtacaatcttgaagggacttgggtcctgttaattacaaaatggatgctgtgggttctgagattatttgggacatttttggctctcctttagtggacacctagagccacagattcccttctttactaaacaaatcccatggattctgatttctgggtcttaggattttaaaagtgaagggatatttttcttatatttgtgagttcagttccgatggtgcccgtggtcaaaagcgaaaaacatggacaattcctaattcattcttagcactttgacatgtcttgggggaaaagcttacattttaatttaaaagaaagatcaattatatccatgcttaacaggatcagcaggagctttataaatgactttacagagactaataagggatttgatctttctttttttgttatcgaggcttttgaaatgtggaacttgtgtgttctgctttatatgttatattccaatatcttttcagatgcagtctatattttatgctgagttttaaaaaaggaaatacctttatgccaaacaggcaaaattgggtncccaaagggaaacattaaccatgaggaagagcatttttcctaaggagaacaggtgacaatatacacatgtgtgcctaatccgtaaaatgagcatccttagtctttaaaacacatcagaattgaatacgaataatctatttgtcgatgaaataaacacaactctttgaggatttgagactacattcaccctttattcacagtcacttgcagttttgcttttctctgcatttctctgctgtaagatgactgttgcattgttgaattgtattttgagtggatatttttgtttggtaacaatattttaaatggtaaaacgtgtgcctttgtcctttctcttccttctaaacatgtatctctcccacaggtcattctcctgtcaccgtgtgtactgcagactgtttcaaaaccgggcagggcanttaggcaatggggaaataaggtgggtcccacccttcaatatttgcttggtgttcatttacatgcttcttggcaccaatcctagactcacgtgtgcccccagaataacattcagactctcagttggtcttgtgttaacacatcccatggaaccggttccactccatccatatacagctctctgctccggtgtcccctgggctcaagtcaaggcagtcggtgacagatttcattcccaataacagaatcggttcgcatgactccccatgcatgttgcagctttgaaaaccattcatctcagtgtcaggaaataaagacagtaaaaaatgccatgtcaagccctcgttagctgatgaggtaaatgcgtggacaacttcctaggacttctcggctctgccctctgtgaccttgcagcctgctcaggtctttgtgcagctgttccttatcaaaaacagcacaaccccctcaatctgcccatttaaaaattggtggagtgaacaaagagcatgaaaatgttgaagaccacatccaaaatttactcaaatcaaagttaagtacagagtttatttttaacaaatgtcatagctatgtcaccttactacagaatccagcagtcagaaaataacacaaaaaatgccgaggtttggcgtagctggtagctggggacagtgtcttcgtttgattactgccagttatttccagcatgctaaatccctacccacgttccagcctctaggtgagtcagtgcgtcactctgtctcccgtccaattaattatttctcatcactccctcaatccaagtaacaaaccttgaaacacgaacatagacaccaggcttattggggcgtgcacagccaagaccccaagaagtgactccttgtaaaatgtatttgtccttctcaaagcaaacca

SEQ ID NO: 154196 - DNA, 370 bp, Homo sapiens
  misc_feature (1)...(370): n = a,t,c or g
natttactttcagttctcccagagataacctctctcagcccatacctgctccctctgttttgatcaaggaattctgtagcaggaagcacaatatcgaattgaatcggcgttccaggcgcgatcagctcctctgcttcaggtagactggctgttgctttgggaacaatcttgtcattttcattttccatctctgaatttttcaggttctggctcagggttgtcggtcaggtagatctgtctggagatgttgtttattgcacatatccactcttcattttcctttctgctctcagcctggaggattattcccctgaaacaaaagtgtttaagtaattaaaaacaaaacatgattctcatatgactgggaatt

SEQ ID NO: 154197 - DNA, 1913 bp, Homo sapiens
atcagggaagcacttaattacttagacacttttgtttcaggggaataatcctccaggctgagagcagaaaggaaaatgaagagtgttcttttttaatgtcctctacagtggatatgtgcaataaacaacatctccagacagatctacctgaccgacaaccctgaggcagtcgcgatcaagttgaatcaaaccgctctgcaagcagggactcccattacaagttttggaaaaaaacaagaaagctcatgccccagccagaacctgaaaaattcagagatggaaaatgaaaatgacaagattgttcccaaagcaacagccagtctacctgaagcagaggagctgatcgcgcctggaacgccgattcaattcgatattgtgcttcctgctacagaattccttgatcagaacagagggagcaggcgtaccaacccttttggtgaaactgaggatgaatcatttccagaagcagaagatcaacagcagcaggaagtaaatgagatcctgagtggaaaatgctgtcttccagattctcttttgcagcagatgtttatagttcggtttttgggatcaatggcagttaaaacagacagcactactgaagtgatttatgaagcgatgagacaagtattggctgctcgggctattcataacatcttccgcatgacagaatcccatctgatggtcaccagtcaatctttgagagcacctgggggaaggggtggctgtgggcgcagtttcagcagacttaaatgttcctgcctgccagctctcaagagagcagcaggtctcccagcacaacgcttgagctctgctaagggacagactgcctcctcaagtgagtccctgactctggtggttcctgacggggagacacctcccagcaggaatcgacagacacctcatacaggagagttccagctggcatctggtcaccagcatcaaagaccaaaggtagataaatccacaaagatgaggaaaaagcagcacagaaaggctgaaaattccaaaaaccagaatgcctctcctcctccaaaggatcacaactcattgccagcaagggaacaaaattggacggagaatgagtttgaagaatttacagaaagaggcttcagaagtgacagggagaatggaaccaagttagaaaacactcttcaggatattatccaggagaacttccacaacctagcaagacaagccaacattcaaattcaggaaatacagagaacaccacaaagatactcctcgagaagagcaaccccaagacacataatcatcagattcaccaaggttgaaatgaaggaaaaaatgttaagggcagccagagagaaaggtcaagtagttacccacaaagggaagtccatcagactaacagcggatctctcagcagaaaccctacaagtcagaagagagtgggggccaatattcaacaaccttaaagaaaagaattttcaacccagaatttcatatccagccaaactaagcttcataagcaaaggggaaataaaattcctttacagacaagcaaatgctgaaggatgttgtcaccaccaggcctgccttaacaagagctcctgaaggaagcactaaacatggaaaggaaaaaccagtaccagccactgcaaaaacataccaaaatgtaaaaaccatcagcactgttgaagaaactgcatcaactaacaggcaaaataaccagctaccatcataatgacaggatcacattcacacataacagtattaaccttaaatgtaaacaggctaaatgccccaattaaaagacacagactggcacattggataaagagtcaagacccatcagtttgctgtattcaggagacccatctcatgtgcagagacacacataggctcaaaataaagggatggaggaagatttaccaagcaaatggaaagcaaaa

SEQ ID NO: 154198 - DNA, 335 bp, Homo sapiens
aaatttaatcagaaccctctataagtagcaattaaaggagactttcacattttacagctcccttccccttatcattgaattaatccttatcagaaatttgggatagaaaggggcctttccttgaatgtcctataagctactctcttcaagttacttgatgggataatgaatggaatctggtgcttactgactccacacctatgttaagccaagcttctctttgtgtgtacaggtacaacagaatagctcgggaatggactcagaagtatgcgatgtaattaaagaaattattggataacctctacaaataaagataggggaactctgaaaaaaaa

SEQ ID NO: 154199 - DNA, 2194 bp, Homo sapiens
  misc_feature (1)...(2194): n = a,t,c or g
cacccgcctcccaccatggctctgaagagaatccacaaggaattgaatgatctggcacgggaccctccagcacagtgttcagcaggtcctgttggagatgatatgttccattgggcaagcctacaataatggggccaaatgacagncccctatccagggtggagtatttttcttgacaattccatttccccaacagattacccccttcaaacccacctaaggttgcatttacaacaagaatttatcatcccaaatattaaccataatgggcagcatttgtcttgatattctacgatcacagtggtctccagcactaactatttcaaaagtactcttgtcccatctgttctctgttgtgtgatcccaatccagatgatcctttagtgcctgagattgctcggatctacaaaacaagatagagaaaacgtacaacagaatagctcggggaatggactcagaagtatgcgatgtaattaaagaaattattcggataacctctacaaataaagatacggggaactcttgaaagagaaagtccttttggatttccatttgacttgcttttctatggagcccacgcctcatcttcccctgtgcacatgtttacctgatacagcagtgctgccgtgttggtacatacttgggaaccaccaacctagaaatacttgtacttctggtaccaacattggcctcctaggcagagaagtgtgtgtgtgacaagccagttctacaggcattacctaggtgtgagacttaaaagcttttcttattgacttaaatttgggataacagcaaggtgtgaggggggtggtggggtatgggtgtgtgcttgggatggggaaagaaaaggctccactcacctataggagattatttttaagtggaatccatttaaactcaaaaccagttatgaaaggccaaggtgaagaagaacatgaagctgtgtcctgtattcattttattcccgaaggagcctacgtcttaagggtgaaaagttatgccccaacccagattaaaactctaccccaacatcctgccattttaaaggtctaaggtttaactggtcaaccatttaaatgggattgggagctattagtacatcaaagtgtgatgttgctttgttccccaactctttttacatcttccctacccccttcaaacctttggccttttcagcccttctttctctcttccatattctttggtttcgtatgtggtttcctcagttaatacataggctaatagctcttatttttccttatgtttttaaccgcttagggtctatttggatgtaaggggtgaaaattcatttgatggaaatacttggtggtatatttaaagaccccaattctgcctctggagcttggtactttcaagaatgattaatctgtggtaataaacatagattaatacagtcattacatataattttgtgtgaataggctttttcatttttaaaaagtttgtctaactgaaattagtggtggattttctcccacttctgaaatgttccatttatactgcgctgcattttaaggatcatgaaaccaattcccagttaccattgtaaaaaggatatcttacggagtaattttattgaacaagttagaggcataagcttaagagcatttcccatgaaacaacacatgcagcattcccaggaacttgattgttaaattcaataagaaatttgctttattaatgaaactaagctgcatttcatcaaaaccttgtgacattcccttggtacataggacataaaacacagaggcattgctatttggtaagttaagcttctgtgattgtaattataaaagagcaacattgaccaaacctgggaaacaagagcacagtcttgtttggagagtctacataattactttgcactaacatttgcaggatgttcacacaattttaaattgtactgtatgtggctttttgaagtcttcccttgaccctagtaaaatatagcttgaaacttgtaaacaactgtgtttgccagaaacatcattcatgtgaactaggcaagttaccttttttccccccttcttttcctaattgtaaactaggccaacctgaaagccatggctgatgctctagccatcaggttctttcaaatgcatctttacactcttgcccaaaagttaaggaataaatgtcccctgcttttggttttaaaaaaaaaaaaaaaaaa

SEQ ID NO: 154200 - DNA, 475 bp, Homo sapiens
  misc_feature (1)...(475): n = a,t,c or g
gctgcatgagcaantccgacgaggttgcctcaggtaacaaactacagaaagtgaaattgcagataaaggggattactgttcctttgctctaaaattggtgtttgggtgatcagaagcaggtagccaatgggaagagcacttctgagtgataactaaagcagcttggtggccttttcacattctccaatgttcaaacatattttccactttccattttctctttcacctcattttgcctctctatcccccatccctgcttatttcttaagcccattgatggcactcattaaattgtatttagggctaatgagtcattgttccttaatatcgttttcaatatgccacaccttataaaattgtaatcaaagatatctcactctgtcattgttaatctaagaataaaaacactgactttaatacggctttactaaagttcaacctttttaattagggaggccttctaggaattctggcg

SEQ ID NO: 154201 - DNA, 339 bp, Homo sapiens; identical to SEQ ID NO: 144666

SEQ ID NO: 154202 - DNA, 2358 bp, Homo sapiens; identical to SEQ ID NO: 150777

SEQ ID NO: 154203 - DNA, 1555 bp, Homo sapiens
  misc_feature (1)...(1555): n = a,t,c or g
gactttatttatatattaggtagatccatttattttttaaatacaagtataattttggaaggggtatttgacaaattcagcattaactgccaacttctatagacatgttttaacaaaaagcaaaacaaaacaaaacaaaaaaacaaaacaaggcatttactcttggccctttcagtacaggcgaaagtgttctattgcatcacaagtgctagtgatgcagtaacagatccaaggggcataatattaaatatggtttttttccaactgcgatttagttgaaaaataaccataatacaaacatatattaatggctatcaagacccagcagtgatctgcagaataccctagagggcctaccctaatttaggaagggttggaaaccttagttaaacccgtatttaaagtcagtggtttttaattcctaggatttaacaatgacagagtgagatatcctttgattaccaattttataaggtgtggttggggaattgagaggagacagatattgggggaagcctggccagtgtgtgcctgagttaagagttgggaatgtggctccaaattagtccaatattggattaggattattgttttagaaaattttaaatgtgcccctaaattgtggcatattgaaaacgatatttaaggaacaatggactcaattacccctaaatacaatttaatgagtgccatcaatgggcttaagaaataagcagggatgggggatagagaggccaaaatgaggtgaaagagaaaatggaaagtggaaaatatgtttgaacattggagaatgtgaaaaggccaccaaagaaactgctttagttatcactcagaagtgctcttcccattggctacctgcttctgatcacccaaacaccaattttagagcagaggagcagtaatcccctttatctgcaatttcactttctgtagtttgttacctgaggcaaccttgggccaaaaaatataatgtggaaaattccagaaataaacaattcatgttttaaatcataagccggccgggcatggtggcgcatgccctataatccccagcactttgggaggccgaggcgagtggatcacctgaggtcaggagttcaagaccagcctggccaaacatggtgaaacccccatctctactaaaaggtccaaaaattggctgggcatggtggcggacgcctgtaatccccagctacttgggaggctgagnccaggagaactgcttgaacccaggaggcagaggttgcaagtgagccaagatcgcaccactgcactccagcctgggcaagagtgagactccatctcaaaaaaaaaaaagaataaaataaaataaatcacaagccatcctggagtgatgaaatctcatgatctcctgctctgtcctgcctgggatgtgaatcacccctttgtcctgcttatccacactgtatactacctgccccttagtcacttagtagccgccttggttgtcagactgaaaaaacatagttgataaagggttcagtactatctgaggtttcaggcatccactaggggtcttggaatgtatctctta

SEQ ID NO: 154204 - DNA, 824 bp, Homo sapiens
  misc_feature (1)...(824): n = a,t,c or g
atgtnagaaaaaccnttagnttaaatacntagtgaaagtgttttcaattaancccccggatcaaccctagttcaagatgactgatgccacattaaaataggcaaatgtgcccaagtttccaggttttatttacttgaaataatatcacatctcctactgggcgcggtggcttatgcctgtaatcccagcactttgggaggttgagatgggcggattgcctgaggtcgggaattcaagaccagcctggacaacatggtgaaaccctctctctactaaaaatacaaataattagccaggagtggtggcacatgcctgcagtcccagctacttgcgaggctgaggcaggagaatcacttcagcctgggaggagaaggttgcagtgagccgagatcaggccactgcaccccagcctgggcgagagttgacactccgtcttaaaaacaaacgaacaaaaaaattccagtactttacacacaaaaagtcattggattttccaatttcctgggcactaggatgttacattgacaaaagcagacgtaaagcctgggatttggggacaatcaagggaatagttacaaacacattattcaaattcccaaaacaaagaatctcaggttgggaaattttcccttaatctattgggggacctacttatgtagggaaaaccattaggttaatactaggtgaagtgtttttcattattccaggatcaacctagttcagatgactgatgcacattaaataggcaaatgtgccaagtttcaggttttatttacttgaataatatcacatctctactgggcgcggtggcttatgctgactat

SEQ ID NO: 154205 - DNA, 422 bp, Homo sapiens
aatgaagaaaaacttaactttattgagcataggaatagacgggctttcaaattattttttgctttatggttattacttttataaaccatctgatccacggcaaaactacattgcttaaggtggtaataaggggtcagatgctctacagcaaccttcaagcacaggcaccgatttgcattttatgcaaaacttcaggttttactcaatttttacactggtggaagctgatgtcagtaacttaaaaggcaagcaaatacttttccaattcttagctgaacaaaaaatacacacaatgtagcgtttttattgggcaagacttgctttttatatttcacgtgagaatgcaatataacccttccttgaacaaaatgaccagggtactaataaaaccatctttgcaggagtgtttaataagcatattt

SEQ ID NO: 154206 - DNA, 561 bp, Homo sapiens
aaaataggcatatagatatattccaagccgcctgacgatctaattgtaaaaagtaaagcatacaaatactagaagaaaatggaggaaaacgacattatatgtgacttaaaacctagaagaaataaataaaactattgatcaattttaactacataaaaatgtttataggacaagaaaaaccccaccataacccaaggcaaacaatgtattgacaggattccaataattaagaatacttcatacaaaaagaaatgtaaatgacctttaacatgtaaagatgctcaccttgttcagaagagaataaaccagtgtttttacctttcacttgaaaaagaagtataaaaacaactgtattgagttgaggctgtggagaaataaggacacatatatgggaatggaatgcaaaagttaaactttggttaacaagaatatttgggcaggtgcagtggctcacacctgtaatcccaacaccttgggaggccaaggtggggcggatcacttgaggtcaggagttcaagaccatctggcccaacatgggtggaaccctgtctctacttgaaa

SEQ ID NO: 154207 - DNA, 1117 bp, Homo sapiens
tggcggccttcatgctgggctcgctgctgcggacgttcaagcaggtcaggcctctacttttatccacaccgctacccctcaccgctgaatctcataacccacgggtcccccacggctctgccacctgtagtgctcgatggttccttcatcagcttcaggccaagttcgaagtcactatgtagactggagaatgtggcgcgatgtgaagagacgaaaaatggcctatgaatacgcagatgagaggctacgtattaattcactcaggaagaataccattttgccaaaaattcttcaggatgtggctgatgaagaaattgctgcccctcccccgggagtagctgtcctgttagaatcagaaatcggtgtgttatgacgtcccgtccgcgtgggtgtgaagcggcgctggaggcttagtcgtatagtcttccgtcacttagctgaccatgggcaactttctgggatccagcgagcgacatgcctcaactcaatacagttgtttttatacttctttttcaagtgaaaggtaaaaacactggtttattctcttctgaacaaggttctcaatctgttacccaagctgcagtacagtggcatcatcatagctcactgcagccttaaactcctgggctgaagtgatcctccagccttagtagctgggattacgggcgccagccttcatgcctggcttcaattcgctttctctgatctaactgtgttggctaatacctccaggaaaataaagtaatggagatcacaggcactggtcctgacttcagggggaatagggagtaattcctactaaaagcctgagtttttctgacatactcctaggacaaataaatcataaaactgttctaatgaagaaaaacttaactttattgagcctaggaataggacggggctttcaaattattgttttggctttatggttattacttttataaaccatctgatccacggcaaaactaactggtaccatacaaagatatgtctattattgtcatgtttagattttctattccacattcaatcacaggtgtttctatctagatttaaatatatttgtcaatgaatgtggaatagaaaatctaaacatacaaagatatgtctattattg

SEQ ID NO: 154208 - DNA, 361 bp, Homo sapiens
  misc_feature (1)...(361): n = a,t,c or g
cgtctggctaccagctccccgctgccctgagctcggcgggctggcattcggcccggtgaagggcggagcaggtctgcgaggctaagtgtctccgcggcgcacctcgcggcgagaatccggaggagaaggagactgcaaggataggcccagaaaaacaaccagnnnnnnnnnntctcatcatggcaaatattcaccaggaaaacgaagagatggagcagcctatgcagaatggagaggaagaccgccctttgggaggaggtgaaggccaccagcctgcaggaaatcgacggggacaggctcgccgacttgcccctaattttcgatgggccatacccaataggcagatccatgatgggatggc

SEQ ID NO: 154209 - DNA, 1025 bp, Homo sapiens
ggagaggaccgagaagagtgacagggctgtgcgctctggggcacctcatgcagacgggagtagggaggctgttttttgcgcgtgcatatggcggtggcgggtggggggaagggggagatcctgctgcactggccgcccaagttggggggcgagctcggcggtgacgcgcggtcctcacgtgacccggagctgcagagctacgcagccttcgttgcagtcgtcactcgcatctggctaccagctccccgctgccctgagctcggcgcgctcggcattcggcccggggaaaagcggagcagggtctgcgacggctaagtgtctccagcggcgcacctcgcggcgagaatccggaggagaaggagactgcgaggataggcccaggaaaaacgaagaagatggagcaaccctatgccagaatggaagaggaagaccgcccctttggggaggaggtgaaggcccacccagccctgccaggaaaatcgaacggggaacaggctcggccgacttgccccctaaattttcgaatgggcccataccccaataggccagaatcaatggatggggatgggtggaagatggagatggatatgggaaaatattccatgggagggagatgaagagaaatccagaaggaaaactttaggggagctggcagtttgagggaatttgttcttgccgttattccttattggggggagctcttcttaattcaccatgacccatccatgaatgaaattttgcccttaatgcccttgactccctgcccatttatcatgagattaatactgtgattccccgctggtttcctttttgccttgccattttcctaaatatgcctttactgatcccggtttgctgtgaaccctatgttaatttccatgtgtcaagtgggtcttgtgttgccagcttccaatttgaagattgcctttgcaactcagttgtaagtttctgtcagcagtagttttcacccatttgctatggaaaaaatttaaaggctaattaaaggcaatttaaaaaggcaatcc

SEQ ID NO: 154210 - DNA, 2014 bp, Homo sapiens
gcggcagcggcagcggcctcgggcggggccggccggacggacaggcggacagaaggcgccaggggcgcgcgtcccgcccgggccggccatggagggcgcctccttcggcgcgggccgcgcaggggccgccctggaccccgtgagctttgcgcggcggccccagaccctgctccgggtcgcgtcctgggtgttctccatcgccgtcttcgggcccatcgtcaacgagggctacgtgaacaccgacagcggccccgagctgcgctgcgtgttcaacgggaacgcgggcgcctgccgcttcggcgtcgcgctgggcctcggagccttcctcgcctgcgccgccttcctgctgctcgatgtgcgcttccagcaaatcagcagcgtccgcgaccgccggcgcgcggtgttgctggaccttggcttctcaggactctggtccttcctgtggttcgtgggcttctgcttcctcaccaatcagtggcagcgcacggcgccagggccgtttcacgacgcacgcgggggacgcggcgcgggccgccatcgccttcaacttcttctccatcctcagctgggtggcgctcaccgtgaaggccctgcagcggttccgcctgggcaccgacatgtcactcttcgccaccgaacagctgagcaccggggcgagccaggcctaccccggctatccggtgggcagcggcgtggagggcaccgagacctaccagagcccgcccttcaccgagaccctggacaccagccccaaagggtaccaggtgcccgcctactatcggctggcaggcacagaccagggctccaaggccaccccaccaacgcaggccccagggtctccgggacctcccttgggtccttccagctcagtgccgcggacagagtaggtggccgctttgcgccatccggggccaagagggggtggacccgcgtgtctgggctgcccctggcgaagttcccccagtccctcagcacctgggcccagggactgagggtcctgagaaggggatagcactgcccaggacgtgtgtccttagcctggaatggactggggctggggaaggctttcccctcttgggccacacctgctcactctggggttgggggtccagctgccctctacgatcaggtgcaggggctgcccaggacaaagcgggggcaggggaaagacaccacccttcgccccaagactggggatcctggccactgttcccatcccatgtccctgtgggtagttgattgtcttcgtttctgtcatgggggggcgtcccgtccggagccactctccactttctctcacaggctgctagaacagcccagccctgtcagtgttgtgatcatgggccagtcttcgggtttcacctcctagtactccacaagctgctcctttctctgtggccccggcccctgcccaggtgtgggtggttctggccaggaaggcacaaggtagctgtgggccaagacaccagccctggtcctagcccttcagtaagaccttgccaggagaggagaaggatgcctgggtgccaggcaagacaaagcccctcagcaggagagaggcccagaggctccagctggccaccgtgccccacaagatggcccctgtgtggttccctttaccttggcttcctggcccagtcccctgcctctccaacctgcaccctgcttcctgggcccagtcccaggttggagtccctctggcatagctgacttacttcatgcattgcttcaaagctggctttttcacatttaagttcaacaccaaacgtggtttggccacattttcattcagacagacacctccctctgggagatgcagttgagtgacaaccttgttacattgtagcctagaccgaattctgtgtggatatttaagtgaacatgtttacaatttttgtatatatcactctctccctctcctgaaagaccagagattgtgtattttcagtgtcccatgttccgactgcaccttctttacaataaagactgtaactgagctgactgtgaaaaaaaa

SEQ ID NO: 154211 - DNA, 1947 bp, Homo sapiens
atggctgatagaaccaaggaactggaaagtattccagacagtaggaatcgaggaagcatcatgggaaattctagggattttgccgatttcggaaccaccatcaaacaggattttcgcctgctggggcaaaccagcgtggaccgcttgctgcaactctctcagggccaggcggtgaagggcaatcagctgttgcccgtctcactggtgaaaagaaaaaccaccctggcgcccaatacgcaaaccgcctctccccgcgcgttggccgattcattaatgcagctggcacgacaggtttcccgactggaaagcgggcaggattttgccgatttcggaaccaccatcaaacaggattttcgcctgctggggcaaaccagcgtggaccgcttgctgcaactctctcagggccaggcggtgaagggcaatcagctgttgcccgtctcactggtgaaaagaaaaaccaccctggcgcccaatacgcaaaccgcctctccccgcgcgttggccgattcattaatgcagctggcacgacaggtttcccgactggaaagcgggcagtggactcttgttccaaattggaacaccactcaacccttatctggggatattcttttgatttataagggattttgccgatttcggaaccaccatcaaacaggattttcgcttgctggggcaaaccagcgtggaccgcttgctgcaactctctcagggccaggcggtgaagggcaatcagctgttgcccgtctcactggtgaaaagaaaaaccaccctggcgcccaatacgcaaaccgcctctccccgcgcgttggccgattcattaatgcagctggcacgacaggtttcccgactggaaagcgggcaggttatctgtcagaagggttggtaacaaagtggtaccgttccccacgactgctcctttcccccaataactacaccaaagccatcgacatgtgggccgccggctgcatcctggctgagatgcttacggggagaatgctctttgctgagcgggatagagcctctgcatcctccttgctcaccattgcttgcctgctattaacaaagcagccctcctctgtggcctaccagatggcccctcttcttctctatcttgtcctcccgtgccagcacctcatctcatctcccatcatcccccacactgaggctgttggcacctacgtcatggcctccctctccacaattggtcccacatcattctggctggattttgccgatttcggaaccaccatcaaacaggattttcgcctgctggggcaaaccagcgtggaccgcttgctgcaactctctcagggccaggcggtgaagggcaatcagctgttgcccgtctcactggtgaaaagaaaaaccaccctggcgcccaatacgcaaaccgcctctccccgcgcgttggccgattcattaatgcagctggcacgacaggtttcccgactggaaagcgggcaggattttgccgatttcggaaccaccatcaaacaggattttcgcctgctggggcaaaccagcgtggaccgcttgctgcaactctctcagggccaggcggtgaagggcaatcagctgttgcccgtctcactggtgaaaagaaaaaccaccctggcgcccaatacgcaaaccgcctctccccgcgcgttggccgattcattaatgcagctggcacgacaggtttcccgactggaaagcgggcagaattttgccgatttcggaaccaccatcaaacaggattttcgcctgctggggcaaaccagcgtggaccgcttgctgcaactctctcagggccaggcggtgaagggcaatcagctgttgcccgtctcactggtgaaaagaaaaaccaccctggcgcccaatacgcaaaccgcctctccccgcgcgttggccgattcattaatgcagctggcacgacaggtttcccgactggaaagcgggcagtga

SEQ ID NO: 154212 - DNA, 681 bp, Homo sapiens
atgggggtcgaaggcaggtaccctgtgagcctgtcgtcggacctggagtggcggcctgaccggtgccaggacgccagcgaggtacagcgcgacccgcgcgcgggttcggcgccactggctgaggacgtgcaggtggacccgcgcaaggactcgcacagcagctccgagcgcttcctagagcagtcgcactcgtccatggagcgcgccttcgaggccgactacgggcgctcctgcgactacaaggtggggtcgccgtcctacctggacaagctgctgtggcgcgacaacaagccgcaccactactcggagcccaagctcatcctggacctgtcgcactggaagcaggcggccggcgcgccccccacggccacggggctggcggacacgggggcgcgcgaggacgagccggccagcctctttctggagaatccgcaaggggtcaagagcacccaaggcggcccaaaacaccccagcccgcccgcccacgaccccgagcgccgcttggctgcctcgccccccggccgcccggcccgactttggcagactcttgctctgtcaccaagtggggccaggtatagtgacgggtaccgagctcgaattcgtaatcatggtcatagctgtttcctgtgtgaaattgttatccgctcacaattccacacaacatacgaggcggaagcataa

SEQ ID NO: 154213 - DNA, 4742 bp, Homo sapiens
  misc_feature (1)...(4742): n = a,t,c or g
gcggccgcagacaaagggcggctcgcgcccgggccgccacgctctcgggctctgcctcgggaaggagacttggtctgaaagatgccacattcctgcagcctctcttggtgcagtggaatacagtcttgggcgaggtggcgtggatgagctggtgaaagaggatgctgcccacatccaaaggctccagaggatcctggcctggcagctgagctcccctgcatttggaacctcaggcgtaacttggtgtagagctcatgaaaggtgcttgtgtttctccagcttttttcaccagtgccttaccagactgggctcaggttttggaatctaaggtgaagcctggtagaaacaggagaggtaagaaagaagcccctgggattgcctccagaattcatttgatggggattccctgcatactggcttgggaacacagaaagaggctgtgacacagctgagctttggagcatcttaaggagctccagctccagcaaaacaaactcttgcatttcagcccagaaagagcctcttgtaacaaagtattccaaaggggagagtttctgcatcttttactttgcagtccactatggtagaaaacttgacattccatagataatgatactgggttttctttccaagatgccagctttaaaagaaatatgagccattctaagctttaagaagggttcaggaaacacaggaattagtagacagccctcccaatgcaggttaagacgacagcctgcgcccccaactagcacagctcagcgagcatgaccatatgccattctcgtctccagagagctggtggcagtgacctcactaggagaaaacacatccctcagccgtgggacttgacagaatgaggtgcgcgagggaggccgctagccgagacttggcctttcctgactgcccctgtgttacctgggcagctccagatcactgagcccacaatggctgagaagggtgactgcatcgccagtgtctatgggtatgacctcggtgggcgctttgttgacttccaacccctgggcttcggtgtcaatggtttggtgctgtcggccgtggacagccgggcctgccggaaggtcgctgtgaagaagattgccctgagcgatgcccgcagcatgaagcacgcgctccgagagatcaagatcattcggcgcctggaccacgacaacatcgtcaaagtgtacgaggtgctcggtcccaagggcactgacctgcagggtgagctgttcaagttcagcgtggcgtacatcgtccaggagtacatggagaccgacctggcacgcctgctggagcagggcacgctggcagaagagcatgccaagctgttcatgtaccagctgctccgcgggctcaagtacatccactccgccaacgtgctgcacagggacctgaagcccgccaacatcttcatcagcacagaggacctcgtgctcaagattggggattttcgggttggccaaggaatcgttgaatcagccattactcccaacaagggttatctgtcagaagggttggtaacaaagtggtaccgttccccacgactgctcctttcccccaataactacaccaaagccatcgacatgtgggccgccggctgcatcctggctgagatgcttacggggagaatgctctttgctggggcccatgagctggagcagatgcaactcatcctggagaccatccctgtaatccgggaggaagacaaggacgagctgctcagggtgatgccttcctttgtcagcagcacctgggaggtgaagaggcctctgcgcaagctgctccctgaagtgaacagtgaagccatcgactttctggagaagatcctgacctttaaccccatggatcgcctaacagctgagatggggctgcaacacccctacatgagcccatactcgtgccctgaggacgagcccacctcacaacaccccttccgcattgaggatgagatcgacgacatcgtggctgatggccgctaaccagagccagctgtccaactgggacacgtgcagttccaggtaccctgtgagcctgtcgtcggacctggagtggcggcctgaccggtgccaggacgccagcgaggtacagcgcgacccgcgcgcgggttcggcgccactggctgagaacgtgcagaaggacccgcgcaaggactcgcacagcagctccgagcgcttcctagagcagtcgcactcgtccatggagcgcgccttcgaggccgactacgggcgctcctgcgactacaaggtggggtcgccgtcctacctggacaagctgctgtggcgcgacaacaagccgcaccactactcggagcccaagctcatcctggacctgtcgcactggaagcaggcggccggcgcgccccccacggccacgggggctggcggacacgggggcgcgcgaggacgagccggccagcctcttcctggaggatcgcgcagtgggtcaagagcacgcagggcggcccagagcacgcccnacccgcccgccgacgaccccgagcgccgcttgtctgcctcgccccccggccgcccggccccggtggacggcgggcgccagcccccagttcgacctggacgtgttcatctcccgcgccctgaagctctgcaccaagcccgaggacctgccggacaataaactgggcgacctcaatggtgcgtgcatccccgagcaccctggcgacctcgtgcagaccgaggccttctccaaagaaaggtggtgagggcggaggggccgctccaggccccacagagcaggagacccccagagaaagccggggctggcaggaggcggccgcctccgccctctctgctgccttggggttggcagaacacgtgaaggatccgaggagcgagaggaatgtccatttcttaaactgccttaataactagcctttaacctgtgggagcgggtttgaactggaccctggcttaggggttgatcactttcctagcaaaggggagaccacatgtggtgcacagggaagaaacggctttagacagcagtctgcgggccccacctgggtggcaggatgccgagaaatcttgcagaggtagctccgaaaccatctgggcccaactagccttcaacttgacagctgagggaaagggcaatttagggcccagaggaggcagagacactcgcttaagatcacaggcttagtgtgaggacgagcttgaaatcccagtctcctggcccccaggccagggttcttgtccaccatagaatgtcttcctctacttggggtcgttctggctttttgttagaaacttggtctgagatgtttcttccctgtccattaccattcgatgttcttttattcagagcaatgtttcttgtattctgaaactggaaactgaaccagtttgcctttctcctagtcaccaagcatactttcctggctccccaagtacttaaatgttctcatctgtcgcacccctgtatttgcctcacccctgcatggtcggaaatcttcgtttcaggtcagaacagcccgggggtctgtggggtaaaatcagcccttctcccagggcctgtgcacacaccccctcagcactccctatggcaatttcctgacacggaaagacacagccctctttccccactgggcgtcctaccccagtgaggttgaagggcaccaatttccaagaatccctccaacctccctgccaggcactcccccttcaccccacacccggcccccccaccctaaccacagcgcctctccagacctacctcgggacctaatgttctctacatgaactgctcatttggaggacagcagttaaggtcctgccatagagcaaatgtgttagggagagaaggttttcacatggggacccaacattcctttcattcaatacttttcctggagtttggatcatccatttaggccttggaacaaacagcagacccttacagagatgtgttgggagaggcacgttgtgaccttgggggcaaggaatccagaaaggtaggaagatatgaaaagagaggtgtcaacagcaagggctcttaggggtcaggcaccagcatggagacctcatgacaaaggaagggactcaaagcagcaatgcccctcatagtgtaggctaaggtgagtttggggcatgcaaacctgtgtgctcacccacagagcatggggtaatggtgtggagacacaggccctctgccgaagcgtggggtggggacactgacagcccctatctggtccccagggaacattctaccatttctgccactggtgttcagctccttctcttcccccaacactcccaaagatacccacaggaagttccagccagtttccaggtagaggattccaccagttggtcttgggctgcgttcacccctcacattcacagcaccctttaaatcctaatcaggcaaacctataaatttgtacgttggaaccctgcaacacatttggaaactttatatttaaaaaccggaattaatcaccacttgcccaaccttttaaatgggaaaatatgtaaataggaagtgtttgggttttgttttttcttttgagaaaaagaaatgtacacccactcctcatgtgccattttgtcctcagagggcggctttacttttttggtaaaggaacaagctgctggccttgaccaggagttcatatataactgttattacagaggaattgttataactactaatgtttttaaaaaatttattaaacattattaaacttgatcaggtcaggccaaataaagttttattggaac

SEQ ID NO: 154214 - DNA, 571 bp, Homo sapiens
gcggtggaattccccgtgtattcctgtacgagctgctccccgagtcccctttcttcctggagtgcaacagcttcacgtcgcctgacccccacaagggcctcgtcctcctgcctaagacggagtgcgacgtgcgggaagtggagctgatgcggtgcctgcggctgcgtcagtcctccctggagcctgtggccttccggctgccccgagtccggaaagagttcttccaggatgacgtgttcccagacacggctgtgatctgggagcctgtgctcagtgccgaggcctggctgcaaggcgctaatgggcagccctggcttctcagcctgcagcctcctgacatgagcccaggtgcaccgagggactgggtgtggggaggaagcgggatgggggttggagaaagggacagaaggcccaggttgaagttccattcctgttggcacgcagaatcctctggcctttgggagggtggagtggctgtgtcaatcagtctctgagccagtggagggcagggctcgtggtctgtgttttcatcacaggtcccccccccccccaaaaaaaaaaaaaaaaaaaa

SEQ ID NO: 154215 - DNA, 1359 bp, Homo sapiens
atgggtacaaactgctgccctgcctttcaaggacttctgctgcaactggacacaaatggatccatcccaggcttgttgccaaagactgcagaagccacaagctacacctatcctcagtgccagtcagaatatgatcccgtgttctccaggcagaagctcaaaaatgatgccaggacacgcaggatggcggcctactacccagggtgccagcctccaagaaccatggcccaggccctttccatggcccagaccaagcccaggccttggccaggccccttcagctctgaaacacctgcttcagcccccaaacccccttgcagccaaagtgagcgccagctgctcctatatgaagctgaggccctggccggcggacccttggcagtgttgggcctggacgtggctccctcaaccctgctgcccagctacgacccagacactggcctggtgctcctgaccggcaagggcgacacccgtgtattcctgtacgagctgctccccgagtcccctttcttcctggagtgcaacagcttcacgtcgcctgacccccacaagggcctcgtcctcctgcctaagacggagtgcgacgtgcgggaagtggagctgatgcggtgcctgcggctgcgtcagtcctccctggagcctgtggccttccggctgccccgagtccggaaagagttcttccaggatgacgtgttcccagacacggctgtgatctgggagcctgtgctcagtgccgaggcctggctgcaaggcgctaatgggcagccctggcttctcagcctgcagcctcctgacatgagcccagtgagccaagccccccgagaggcccctgctcgtcgggccccatcctcagcgcagtacctggaagaaaagtctgaccagcaaaagaaggaggagctgctgaatgccatggtggcaaaactggggaaccgggaggacccactcccccaggactcctttgaaggcgtggacgaggacgagtgggccaagtacctggcccagatcattgtgatgggcgtgcaggtggtgggcagggcctttgcacgggccttgcggcaggagtttgcagccagccgggccgcagctgatgcccgaggacgcgctggacaccggtctgcagccgcttccaacctctccggcctcagcctccaggaggcacagcagattctcaacgtgtccaagctgagccctgaggaggtccagaagaactatgaacacttatttaaggtgaatgataaatccgtgggtggctccttctacctgcagtcaaaggtggtccgcgcaaaggagcgcctggatgaggaactcaaaatccaggcccaggaggacagagaaaaagggcagatgccccatacgtga

SEQ ID NO: 154216 - DNA, 2879 bp, Homo sapiens
atgctgctggcaggctcggccggggcagcaggcctggggtgtctcgtgcctctgctggaccctgactctgggctcctggtcctggcaggaaaggggttcagtcagcaaacggggctcagttcagactcatttcagggcgagaggcagctgtactgttacgaggtggtcccgcagcagccggcgctgagcccagtgacccagtgtgtcctggagagcgtgctgcgtggggctgcccttgtgccccggcaggcgctggccgtcatgagctgcgaggtactccgcgtcctacagctgagcgacacagccatcgtgcccatcggctaccatgtgccccgcaaggctgtggagttccacgaggacctgttcccggacactgccggctgtgtgcctgccaccgacccccatagctggtgggctggggacaaccagcaggtgcagaaggtcagcctcaaccccgcctgccggccccacccgagcttcacttcctgtctggtgccccctgcggagcccctccctgacacagcccagcctgcggtgatggagacacccgtgggtgatgcagacgcaagccctggggccctcactctccagcaccagtggcatcgggaccagccccagtttgaggtcgctgcagagcctgctggttccaagttccgccatgctcagggcactgtcctgcaccgagacagccacatcaccaacctcaaggggctcaacctcaccacacctggtgagagtgacggcttctgtgccaacaagctgcgtgtggccgtgccgctgctcagcagcgggggacaggtggctgtgcttgagctacggaagcctggccgcctgcccgacacggcactgcccacgctgcagaatggggcagctgtgactgatctggcctgggacccctttgacccccatcgcctcgctgtggctggtgaggacgccaggatccgactgtggcgggtacccgcagagggcctggaagaggtgctcaccacgccagagactgtgctcacaggccacacggagaagatctgctccctgcgctttcacccacttgcaagccatgggctgggcctcgccctcctatgacctaactgttcgcatctgggaccttcaggctggagctgatcggctgaagctgcagggccaccaagaccagatcttcagcctggcctggagtcctgatgggcagcagctggccactgtctgcaaggatgggcgtgtgcgggtctacaggccccggagtggccctgagcccctgcaggaaggcccagggcccaagggaggacgcggagctcgcattgtctgggtatgtgatggtcgctgtctgctggtgtctggctttgacagccaaagtgagcgccagctgctcctatatgaagctgaggccctggccggcggacccttggcagtgttgggcctggacgtggctccctcaaccctgctgcccagctacgacccagacactggcctggtgctcctgaccggcaagggcgacacccgtgtattcctgtacgagctgctccccgagtcccctttcttcctggagtgcaacagcttcacgtcgcctgacccccacaagggcctcgtcctcctgcctaagacggagtgcgacgtgcgggaagtggagctgatgcggtgcctgcggctgcgtcagtcctccctggagcctgtggccttccggctgccccgaattccggaaagagttcttccaggatgacgtgttcccagacacggctgtgatctgggagcctgtgctcagtgccgaggcctggctgcaaggcgctaatgggcagccctggcttctcagcctgcagcctcctgacatgagcccagtgagccaagccccccgagaggcccctgctcgtcgggccccatcctcagcgcagtacctggaagaaaagtctgaccagcaaaagaaggaggagctgctgaatgccatggtggcaaaactggggaaccgggagggacccactcccccaggactccctttgagggcgtggacgagaacgagtgggactagcctgcgcccccgtcacctccacctcacctgtgctgccacttcctagtgcacacctcacggctcatcctcaagctggaagatacctctctggccccggcacatgtcacccctgcactcctgccttcccgtgggcacttccacatcctctgggcctctggcagttcccagggactgttttcacctctgctgtctctggggtcagctgctgctcatcagctgcccgctagcatgtggccaggggtgcaagggtggcaggggggtcagcaagcaatgtcccctgggcaaggccctgggcaccctgtctccccctggtctcactgctgaccctgggctggtcccagcctggattggcctcatccaaggatctttggtcaccccacgctgccccatcttgcctgctgttccagttctggtcaagggccttgggggctggcccccccccaggcccttctagagcagcaccagtctcaggggccctgggaccagctgccctacttcccaggtttgtagccaggagaagggggcatcacagagctgatggtccaataaggggggtgtgagccccgcagggactggcccgcacctgccttggatgttttcagcaattaaacttttttaagctggccacctcttgtgctgctgtggtctctgggctggctggaaagggaaggggacaggaatgtgggtgacaggggtctggccctgggctcccctttatctcagcctcactctggtcccaaggcccaatcacctgcgcactgctgggagtcattcgctcaccatgcaggttcctggcagtgctctggatggcgggatgctataaaggacaggagagataaggtcttgcaaggaccttcagctt

SEQ ID NO: 154217 - DNA, 395 bp, Homo sapiens
  misc_feature (1)...(395): n = a,t,c or g
atccttactcagtgcggtggattccaacctactctggataaattttccagtagggcatctgaaattgctttggcaaaagcaaaacaggttatcaatacaccaaggacatcaagtagttttaatgcaactacagtgttgagtgcttttttactgggagaaaaatcctagcagaacctgctactctgggcgcattaggtagttttatgcaactatagtattaagagttttattggaagaaaaaacactgtcagagcttactgctccagaccttttttttaatagaagagactggtaaaaatgatgcaggggctgaatgaaagccagctctgctcnnnnnnnnnnnnnnnnnnnnnnnnnnnnnnnnnnnnnnnnnnnnnnnnnnnnnntcgctaggc

SEQ ID NO: 154218 - DNA, 5569 bp, Homo sapiens
  misc_feature (1)...(5569): n = a,t,c or g
aacactatacatgatacgatcgagctgtacctctctcgctgctgggtgtgctgtgctgtcagtgcgatcgcgagggcgcgagctgcgctccccaatataatcgtaggcgagaagggcggcgcgggaagtgctaggagcagcccgcgccgtgcggccgctgagtgcgcccagatcccacagccgcgacgcagtccagcggtgcaggccgagccagctcgcaggtcgcgctttcccccattcacacttcagggcgctttcagctctgcgattattggagccggaattggtggcacttcagcagcctattacctgcggcagaaatttgggaaagatgtgaagatagacctgtttgaaagagaagaggtcgggggccgcctggctaccatgatggtgcaggggcaagaatacgaggcaggaggttctgtcatccatcctttaaatctgcacatgaaacgttttgtcaaagacctgggtctctctgctgttcaggcctctgggtggcctactggggatatataatggagagactcttggtatttgaagagagcaactggttcataattaacgtgattaaattagtttggcgctatggatttcaatccctccgtatgcacatgtgggtagaggacgtggtagacaagttcatgaggatctaccgctaccagtctcatgactatgccttcagtagtgtcgaaaaattacttcatgctctaggaggagatgacttccttggaatgcttaatcgaacacttcttgaaaccttgccaaaagcccggctgttctgagaagctcctcaatgaaatgattggtcctgttatgagggtcaattatggccaaagcacggacatcaatgcctttgtgggggcggggtcactgtcctgttctgattctggcctttgggcagtagaaggtggcaataaacttgtttgctcagggcttctgcaggcatccaaaagcaatcttatatctggctcagtaatgtacatcgaggagaaaacaaagaccaagtacacaggaaatccaacaaagatgtatgaagtggtctaccaaattggaactgagactcgttcagacttctatggacatcgtcttggtggccactccgttgaatcgaaaaatgtcgaatattacttttctcaactttggatcctccaattggaggaatttccatcaatattatcaacatatagtgacaactttagttaagggggaattgaatacatctatctttagctctagacccatagataaatttggccttaatacagttttaaccactgataattcagatttgttcattaacagtattgggattgtgccctctgtgagagaaaaggaagatcctgagccatcaacagatggaacatatgtttggaagatcttttcccaagaaactcttactaaagcacaaattttaaagctctttctgtcctatgattatgctgtgaagaagccatggcttgcatatcctcactataagccccccnggagaaatgccccctcctatcattctcccatgatcgactttattaccctcaatggcatagagtgtgcagcaagtgcccatggagatgagtgccattgcagccccacaacgctgcactccttgcctatcaccgctggaacgggcacacagacatgattgatcagggatggcttatatgagaaacttaaaactgaactatgaagtgacacactcctttttcccctcctagttccaaatgactatcagtggcaaaaaagaacaaaatctgagcagagatgattttgaaccagatattttggccattatcattgtttaataaaagtaatccctgctggtcataggaaaacacacggttctaattaagtgtgaaggtatagctattgcacttatgccatctccaaaatttctttaagtattcttttcactatccattagggagtttttcttaaacttgtctgataataagaatcacctggagttaggaggtggtggttgcagtgagccaatctcaccattgcacttcagcctgagcaacacgagcaaaactccgtctcaaaagtaaataaaaataatcacctggagtttgttaaaccatatggattctcaggctcctctcttgaagattctgattcagtaggtctgggagtggcgccctggattttgatcaaaattgtagagcattttaaggtgagtacctgagggagaacttaaagacatcttagttggggagtagtccttttgaattttacagctagatataatcttcagtcagataaaatttatgggagctggtgtcttatgcctgactcttagtaatttcataccggtttgaagtacgtgtgcccatgcctaaagccttgactttcagaatgttgtcttttgattcttctgtcttgatttgattaggggtgaaatttagaagtcttagtaatgtaacttgaagatgttaaacaaaaatctcaagtaaaatgaaaagcaaatatgggctactgaattaagaaactggcattctagtattaaatcctcacttcaggagcttttaaaaatactgagacccccccataaccagagattcagattcaaagactgaggataggaccttagcattgtagctatttaaagtttctaatgtgcacccagggttgggaatcaccaatgtgggtgtgaaaatgcctacaaagggttttagtgccttagaagtcctaagaagcccaatctgtatcaaagcagatccattttgcaaggatctttcttttagaacttttctcaggtcttttaggaagaaactttaaaaggaaatctttggtaataagcacagacagcctaacagcagaggcaacttaaaataactccctgnagccagttggccactagaacagaatacttggaatgacacccaaagtttaacccaagtcccagccatatgtcccaaagagttaagtgtttccatttactgtagcattcctgggtgagaaattggttgctgaaatcttaagacaagtggtctcaacccttggctgcacattggaaatcacctgtagggttttaaagccatcccaaatgggtaatttaacaggccagcaaaacttccagaactagttcctgcatcctactgtgcaaagatcatgattaactgtcaagacactgggtagaacagaacaagccaaagattaagagttcaaaagtaaatgcaaccaatttaacatgtagtgttattaaaaaattacaaaggcctagaccagcctgggcaacatggtgaaacccccatctctacaaaaaatttttaaaaagttggccaggcatggtaatgcgcgcctgtggtcccagctgctcgggaggctgaggtgggaaggatcacttgagcctatgaagatcaaggcagcagtgaatccatgatcatgcccactgtactccagcctgggcaacagagaccatcttaaaaaaaaaaaatccttccattgaatagaaacttcaaagtccttcatcagatcatggcattagctactttagcaaaatagtgtaaactttggttctgagtaaaaatgacttcttccctaccacagttgtgaatgttaatatgctgataaaactgccaagatatatttgataggtaggggattaaactcatggtttgtcaaaagagtgtttttttctagttttattcttaacagatatgttgaggtattcatatttgtttccttttgtggttttaatgaagacaatttgtaaagtaatactgttatgtatatgctaaatgttggtaaatactaattaatttccatcatttgtagacttgttttgcaatgggatatatttttacttataataccaatttaggctgggcgcagtggctcacgcctgtaatcccagcactttgggaggccaaggcaaacggatcacgaggtcaggagatcaagaccatcctggccaacatggtgaaaccccatctctactgaattacacaaaaattggctggacatggtggcgcatgtctgtaatcccagctactgtaatctcagctacttgggaggctgaggcaggagaattgcctcaaccgggaggcggaggttgcagtgagccaagattcgcaccactgcactccagccttggcaacagagcgagactctgtctcagaaaaaaaaaaacaaaaaccagtttaggctgggtatggtggctcaccagcacttatgggaggctgaggcaggtggatctcttggaggtcgggagtttgagaccagcctggccaacatggtgaaaccctgtctttactaaaaatacaaaaaattagccgggcatggtggtgggtgcctgtaatcccagctacttgagaggctgaggcaggataatcccttgaacccaggaggcagaggttgcagtgagcagagattcgcaccattgcactccagcctgggcaacaagagtcaaactccatctcaaaaggaaaaaaaaaaaattaaaaatgttgctggtattacatcaaacctactctggataaattttccagtagggcatctgaaattgctttggcaaaagcaaaacaggttatcaatacaccaaggacatcaagtagttttaatgcaactacagtgttgagtgctttttttactggggagaaaaatccttgcagaacctgctactctgggcgcattaggtagttttatgcaactatagtattaagagttttattggaagaaaaaacacttgtcagagcttactgctccagaccttttttttttaatagaagagactggtaaaaatgatgccaggggctgaatgaaagcccactctgctcccagtggctctctgagttgagcatgcatcagttaccttaaggggcttgtttaaaacatccgctaggctccacccgtgtttattcaataagtttgttatgggatataaagaagatgcattttaattaaagttccccagtgatgctgctgttccactataggaaccacacttgaagaactagttctacaattcagctggtatgttgtaaaggagtccaagtccatggaaggagttataaagagtttgctgaaaaatggaggtaacagtggtatggggacttcacatcagttctccctaattggatggttagtttgatccctcttgttcttttgttgtaaacattttctataattagggaaatgcccatttaagagtgagagagggtatataccctaggagcccattgtgtttgggtgttttaccaaggaactttacccatactgggtgtgtagtccattctgtaccagtttaaaagtgattcacggatttgcaggctttttatccagatcacaaaaaaaatcagtctttaagcatttgcttggtaaggtttcttaagaataggttaaaaaatccaaccatctgtaatgtatcctctcgtttgagcttgtgggccatacaattcattaactagatgaaatacattgtggacagcatcctcactacccctctctactcactcacaaagaaccatgatacactggaatgtttttctctggaatcctctttctactcttgtattaaaatttttccccacttcatgattatattcaaaataaacgaactacatcatta

SEQ ID NO: 154219 - DNA, 397 bp, Homo sapiens
  misc_feature (1)...(397): n = a,t,c or g
aagcctttttcaaaaaaacccaaaccccctggttggttnnnnnnnnnnnggcaaagctttgccccagggccccccccctttattccccccccttgggggggccgggccggggggttcccagggccggggatggggccccccccggcccccctgggggaaccccnnnnnnnnnnaaaatcccaaaatttggccggccaaggggggggcccccttttcccccccttccgaaaagggttaggccgggggattttttttaccccnnnnnnnnnnntttccattaacccaaattnnnnnnnnnnnnnnnnatttggggggaaaaagtaaaccccccttccnnnnnnnnnnnnnnnngaatagacagggcacatcatggatgatgcaggggtgggggcctcag

SEQ ID NO: 154220 - DNA, 1557 bp, Homo sapiens
ttcccgggtcgacgatttcgtcgcggagtattccaggcgcctgcaactaaacgtggccgggtctgtctgctatgtgccagcggggaaagtttccctgcttcttatcgtctgctttaacgccttaaatagcccgctgaaggctgcagcaggtgctaggtagcagcctcccggccctcgggaaaggcggggtggggaggcgagagcagcttatcctcctcgacctcccttcctggtgacggacgaacagttcccgtagaatttcgcttcaccgagtgaccttgagcccagggcgacggtcagcttgttaattcctggctgcaggaactttgtgagaattttaatgcatggaaaagctgtccatgttccaactgctgtacatcccaaagtctcagtgtaatagcaggaccaaaatattctgtcaatcagctgaccatatacttaatgactcctaaaatctcgtggacttctaagaaagcgccatggcctgtggctgctgttatgattcctgggttgttgcggtgctctgttggagccatccgtattgaggctgcgtcactgagattgacactcagcactttgcgccaccttactctaaccagcataatgaaatccaaaaggaaaactgatcacatggagagaactgcaagtgtccttcgacgggagactatagaaagctaatctaccacctgaaggggtgtcaagggctgagaaataaaggatcctcaccctttacctcaattgtgtcagcagctaaggtgtgtggagctgccagtgagtcaccgtcagtgaagagcctctgcttgcttgttgctgatcaagacttttcctttaaagctggccagtgggttgatttctttattccaggagtctctgtggttggtgggttttcaatatgctccagtcccagactgctagaacaagagagagtgatagaattggcagtgaaatatacgaaccaccctcctgccctctgggttcacaatacgtgtacacttgactgtgaagtggctgtgagagtgggtggagagttcttctttgaccctcagcctgcggatgcctctagaaacctcgtgttgattgcaggaggagtcggaattaaccctctgctttccatcctgcggcacgcagcagcatctcctcagagagcaggcaaacaaaagaaatggatatgagataggaacaattaaaactattctacagtgcaaaaaatacccagcggaactcctgtttaagaaaaatatccttgatttagtaaatgaatttcctgagaagattgcatgcagtttgcatgttacaaaaacagactacacaaatccaatgcggaactcaaagccatacatcacggaaggaagaataacggagaaggagataagagatcatatttcaaaagagactttgttctatatttgtggcccacctccaatgacagactttttctccaagcaactggaaaacaaccatgtacccaaagaacacatttgctttgaggaagtggtggtaggaggcagacaaaggcagaaaaaataaagaggtgagatctaaaaaaaaaaaaaaaaa

SEQ ID NO: 154221 - DNA, 756 bp, Homo sapiens
atgagctccgcagccaggtcccgcctcacccgcgccacccgccaggagatgctgttcttggcgttgctgctcctgccagttgtggtcgccttcgccagaggtgagagcagaaaccaggctgggagggccagcagcggcgagggggagtccgggaagccctggggctgggaggaatcctctaggatcatgatcgcagctgctcttattgcgcgcgtgctgagtctgcgggtacagtgccaggcactgcacgtgcacctcgccacctgctcagcacaacctctgtctgagagaggtctgatttacggctaaggaaaagaaagctgaaggtagtggaaaaggtccctaaagtatctctggctactcaggagtcacaactcccacccctcctcctctcttactccctccctttccccctcagctgaagctgaagaagatggggacctgcagtgcctgtgtgtgaagaccacctcccaggtccgtcccaggcacatcaccagcctggaggtgatcaaggccggaccccactgccccactgcccaactcatgtgagtcctcgcactgcatcagttagtgctcccgctccgtgcctcctctgcccatccctcccccttctaatgccatttgcaaacccaaggactgaaagtcacgtctcttctcttttccctgccagagccacgctgaagaatgggaggaaaatttgcttggatctgcaagccctgctgtacaagaaaatcattaaggaacatttggagagtt

SEQ ID NO: 154222 - DNA, 534 bp, Homo sapiens
ggcacgaggagacccagcccgagtttcccatcgcactgagcactgagatcctgctggaagctctgccgcagcatgagctccgcagccgggttctgcgcctcaacgccccgggctgctgttcctggggttgctgctcctgccacttgtggtcgcctttcgccagcgctgaagctgaagaagatggggacctgcagtgcctgtgtgtgaagaccacctcccaggtccgtcccaggcacatccaccagcctgggaggtgatcaaaggccggacccccactgccccacttgcccaacttgatagccacgctgaaagaatggaaggaaaatttggcttgggacctggcaagccccgctgttacaaggaaaataatttaaggaaactttttgggagagtttagctaattagctggcctacgtgtgtgcatttgctatatagcatacttcttttttccagtttcaatctaactgtgaaagaacttctgatatttgtgttatccttatgattttaaataaacaaaatgaaacaaaaaaaaaa

SEQ ID NO: 154223 - DNA, 193 bp, Homo sapiens
acaaaccacagcaaatttattactcaagatccagtgccacattatagcaccacccgaagccctcaccttccccctcccaacctggcccctagagtacacccaaaacagaaaaaaaaaaggaaaagtgggaggaaagggcactgcctgaggagtccgggagtctggtcatcccggggatgcacgcaggagcttc

SEQ ID NO: 154224 - DNA, 1085 bp, Homo sapiens
tgtcggaattcccagcccgcaccccgcgtcggtgcccgcgcccctccccgggccccgccatgggcctcaccgtgtccgcgctcttttcgcggatcttcgggaagaagcagatgccgattctcatggttggcttggatgcggctggcaagattcacatattctgtacaaactgaagttgggggagattgtcaccaccatcccaaccataggcttcaatgtagaaacagtggaatataagaacatctgtttcacagtctgggacgtgggagggcagggacaagattcggcctctgtggcggcactacttccagaacactcagggcctcatctttgtggtggacagtaatgaccagggagcgggtccaagaatctgcttgattgaactccagaagatgctgcaggaggacgagctgcgggatgcagtgctgctggtattttccaaacaagcaagacatgcccaacgccatgccccgtgagcgagctgacttgacaagcttggggctacagcacttacgcagcccgcacgtggtatgtcccaggcccacctgttgcccacccaaggcacaggttttgttacgatggttttggactggcttttcccacgagcttttcaaagcgcttaaccagccatggggcaggcccctggatgcccgtaaatctcgctgcgtgcaatcccccacgatgagccagaactccccgactcctcgaggcaagtgccctttccctcccactttttccctcccccatagcccacaggcctctgcttctgctccttgttcctgcctgcatgttctctctgttgttggagccgtggagcccttgctctctgggcacagaggggtcccactcttcctgcctgctgggacctatggaaggggcttcgctgggccaaggcccccctcttccagaggaggagcagggatctgggtttcctttttttttttctgttttgggtgtactctagggggccaggttgggagggggaaggtgagggctttcgggtggtgctataatgtggcactggatcttgagtaataaatttgctgtggtttgtaaaaaaaaaaaaaaaaaaaaaaaaaaagggc

SEQ ID NO: 154225 - DNA, 2095 bp, Homo sapiens
  misc_feature (1)...(2095): n = a,t,c or g
tttttttttttttttttgctgtaaaaatcgtaagtttatttgttaaaaaaaatactgtatttgaaaagtaccttcccttctgggattttcaaataatttgtacactacattttattcatctacacattggaaatgagtaaactggtgaacatatagctttttatacatttaacacaaccagtgcaaattctcctgcctctgaagaaggcagcagaagccctttactcaggaaggttcttcaaattctaggcattactcccaactcctaggggaaattttcggggtggggtgcctatgggtggtataacccatctggattccctcaggggacagggacagggatttcaggcaaggggagctttaaaatattttaaggtaattgttcaacattccatgggtgactctccccaaaaaatctagtggtaggaaaataatctgtacttattcctctttctgcacacaaaggccctcatttaaatttgtgagcctgcttggggatccattacctagccattcagagatcctgtcaaatgcacagcagattggatactcaccatcccaaaggggttcctcccacctggatggggccaatctctagttgacagtgcccctcagagtgcaccatggagatggaatgtcccttccagagagacttttacacagggaaaagcatttgttggctgggctccaactctcatttggtacaaaaagctttacattcttttccctttttacattacattcttcaaagacttccgtgcttgcccagctggataacaactcaagctcctagtgtttactccttgcacagccccaaacccttggaaactcagcttcgttctatcagtgacatcccccattgtgggccgaggaaccacaaaaaccttaaaatacaggcttaaattcagcaagcgaagaacattccatattgaatgggcatgagatatgcctaatcagattgtgtgtgtgtgccgccgtttttttaaaaaaacagcccaattacaccgtatctagtcaaaatgaaccggaatcctaaagcaaccctgcctgggatgttcccacttagtcctaatgcctgttgccccactgtacgcccacagcacccggacagtgttcctttgggaccatcctctgggaaaatgcctctggaacatgcctcccttgatggaaaaccactaatttttgaaagaagtagatgtctggaggcaggtctggtgaataaactgaatagtactgccttggaccccnagctgaggggtggcagtaagcaatgaggatgggctataaagctgttaacgtggctaagggccatccttgggcaggcatttcagacacatctgtagagagggcagtagcatctccgataggccagctctgaaggaagcttaatgcttaatacagtcacactgcataaattagcttagaatgctctcttgggtaaaaaatattaatagtgtatatgcacttgaaaagcaaaattcctcaagaaaaaaagtttaatagcaaggagtttccatcagtcccggtctttgtgaggattaccacaacaaacacttaaaaggatacaacaggtacttattaaatgctgccttgccttttacctcttccttttttttttttttttgagatggagtctcgctctgctgcctatccttgaagtgcagtggtgtgatctcggctcactgcaacctccgccttccaggtttaggtgattctcttgcctcggcctcccgagtagctgggatggactacaggcacatgtcaccatgcccagctaattttttgtatttttagtagagacggggtttctgtgttagccaggacggtctggatctcctgatttcatgatccgcccgcctcggcctccctacctcttcctttacttaataaggaatgcggtctaaattttcagggtgccaagcccccaaactcctcttctagccttctgaattgtggtaataaaaccaggaaacaggtgatccagctgtgcgaaaacagacctcaaatgtatttccagactaaaaagccagacttgcagtgaaatcctatgttccaagtcatcagatcagtttaaggactagaagactagaatgac

SEQ ID NO: 154226 - DNA, 1194 bp, Homo sapiens
cggacgcgtgggacagagcacatcaaaagttcccaaagagggcttgctctctcttcacctgctctgttctacagcacactaccagaagacagcagaaatgaaaagcatttactttgtggctggattatttgtaatgctggtacaaggcagctggcaacgttcccttcaagacacagagggagaaatccagatcattctcagcttcccagggcagacccactcagtgatcctgatcagatgaacgaggacaagcgccattcacagggcacattcaccagtgactacagcaagtatcttggactccaggcgtgcccaagatttttttgcagtgggttgatgaataccaagaggaacaggaataacattgccaaacgtcacgatgaatttgagagacatgctgaagggacctttaccagtgatgtaagttcttatttggaaggccaagctgccaaggaattcattgcttggctggtgaaaggccgaggaaggcgagatttcccaggagagggtcgcccattgttgaagaacctggccggcagacatgctggatggttctttctctgatgagatgaacaccattcttgataatctgccccgccagggcactttataaactggttgactccgcaccaaaattcactgacagggaaataacctatatcacctattcagagatcatcttcacaaacatcaccctgctagcccacgtgggatgtttggaaatgtttaagtcctggtaaaattttaaggaggtgtatttctggaggccaacattggctttgcatgcaaataaataaattttctttttagtgttgggtaggccaaaaattacaaattggaataaagttttatcaaaattattgctaaaatatcagctttaaaatatgaaagtgctagattctgttattttcttcttattttggaatgaaggtaccccccaacctgtttacatttagcgataaaattaatttttctatgatataatttgtaaatgtaaaatattccgatctgacatatctgccattataataataggagaatagaaaaattggtaaccacagtggtgaaattggaaagagaacttttcttcctgaaacctttgttcttaaaaatactcagctttcaatgtatcaaagatacaattaaataaaattttcaagcttcaaaaaaaaaaaccaaaaagggcggccgctc

SEQ ID NO: 154227 - DNA, 273 bp, Homo sapiens; identical to SEQ ID NO: 135410

SEQ ID NO: 154228 - DNA, 386 bp, Homo sapiens
ggcgttttatccccacccgtcaagtccatggacctcaacaagccaattgacaagcggatttcgaagggcgcccagcccacctgccacgatttcaaccagttcactgctgccaccgagaccatctcgctgctggtgggcttctcagcgggtcaagtgcagtacctggatcccatcaaaaaggacaccagcaagctgttcaatgaggaggtgattgcagcccccagagcccccaatttctctgccttctcacctacccactatatgccattaggatgcagctgcctgcggaacagtgtaggcctgagaggggcaggaccagggagagatggagaatggggtgacagcagctaatgacagctgcctttactgtacccaggcctgtatcg

SEQ ID NO: 154229 - DNA, 677 bp, Homo sapiens; identical to SEQ ID NO: 135412

SEQ ID NO: 154230 - DNA, 6910 bp, Homo sapiens
  misc_feature (1)...(6910): n = a,t,c or g
atggcggcgggcggcgcggagggcggctcgggccccggcgccgccatgggggactgcgcggagattaagtcgcaattccgcacgcgcgagggtttctacaagctactcccgggcgacggcgccgctcgcaggtcgggtccggcttccgcccagactccggtgccgcctcagccaccgcagcccccgcccggccctgcctccgcctccggtcccggcgctgcaggccccgcgtcgtccccgccgcccgcaggccccggacccgggcccgccctgcccgccgtgcgcctcagcctcgtgcgcctcggggagccggacagcgccggggccggggagccgcccgccacgcccgcggggctgggctcggggggagaccgcgtctgcttcaacttgggccgtgagctctatttctacccaggctgctgtcgtcgtgggagccaacggtggcatacaccattaactccttttctcccacccctcaagtccattgacctcaacaagccaattgacaagcggatctacaagggcacccagcccacctgccacgatttcaaccagttcactgctgccaccgagaccatctcgctgctggtgggcttctcagcgggtcaagtgcagtacctggatctcatcaaaaaggacaccagcaagctgttcaatgaggagcggttgatcgacaagaccaaggtgacatatctgaagtggctgcctgagtcggagagcctgttcctggcatcacacgccagtggccacctgtacctgtacaacgtcagccacccctgcgcctcggccccgccccagtacagcctgctgaagcaggtcatggggcttctctttctatgctgccaagagcaaggcaccccgcaacccgctggccaagtgggcggtgggtgaggggcccctcaacgagttcgccttctcgcccgatggccggcacctggcctgtgtgagccaggatggctgcctgcgcgtcttccacttcgactccatgctcctgcgtgggctcatgaagagctactttgggggcctgctgtgtgtgtgctggagccctgacggccgctacgtggtgacgggtggcgaagatgacctggtcaccgtgtggtccttcaccgagggccgcgtggtggctcgaggccatggccacaagtcctgggtcaacgctgtggcctttgactctctctacaccacaagggcagaggaggcggcgacagcagccggtgctgatggggagcggagcggcgaagaggaggaggaggagcccgaggctgcgggcacaggctcggccgggggcgccccactctctccactgcccaaggctggctccattacttaccgctttggctcggcgggccaggacacgcagttctgcctgtgggacctcactgaagacgtgctctacccgcacccgcccctggcccgcacccgcaccctccctggcacacctggcaccacgccaccggccgccagcagctcgaggggtggcgagcctggcccaggccccctgcctcgctcgctgtcccgctccaacagtctcccgcacccagctggcgggggcaaggcgggcggcccgggtgtggcggcagagcctggcacaccattcagcattggccgcttcgccacgctcacactgcaggagcggcgggaccggggggcagagaaggagcacaagcgctaccacagcctgggcaacatcagccggggtggcagtggcggcagtggcagtggtggggagaagcccagcggccctgttccccgcagccgcctggaccccgccaaggtgctgggcactgcgctgtgcccgcgcatccacgaggtgcccctgctggagccccttgtgtgcaagaagatcgcccaggagcggctcacagtcctcctgttcctggaggactgcatcatcactgcctgccaggagggcctcatctgcacctggccgcggccgggcaaggcgttcacagacgaggagaccgaggcccagacaggggaaggaagttggcccaggtcacccagcaagtcagtggtagagggcatctcctcccaaccaggcaactccccgagtggcacagtggtgtgaagccatggatatcgggccccccccaaccccatgcccccagcctcctagccataaccctccctgctgacctcacagatcaacgtattaacaagactaacccatgatggatggactgctccaagtccccccacctgcacaaaatttgggggccccccaagactgggcccggacaccggaaattgtaatagcccttgtgggcctcagccgttgtcccccacccacttgccaagtacaatggacctcttcctcttgaaacatcagtgtttaccctcatcccttgtccccaagcatgttgactgggtcactcctgggggagacactccccggcccctggccacaagagccccaggtctgcagtgtgcccctcagttgagtgggcagggccgcgggtggtccagccctcgcccggcccccaccccaggttgcccttgctattgtctgtggttttggaagagtgttaaaattatgggaaggcccttcaggtttcctccctgttcccgcaggacctgtttattttatactaaagttccctgtttttttcaggggggtttgttccccttcggaggagatggatgtaggaggacctgtgtgtgtaatttgttgggtttaagggagttccgtttttccccagaggaggagtgcaggcctgctcccagcccagcgcctcccaccccttttcatagcaggaaaagccggagcccagggagggaacggacctgcgagtcacacaactggtgacccacaccaagcggctgggagcagggaccctcttggggagaagagcatccttgcccgcagccagggcccctcatcaaagtcctcggtgttttttaaattatcagaactgcccaggaccacgttttccaaggccctgcccagctgggactcctcggtccttgcctcctagtttctcaggcctggccctctcaaggcccaggcacccccaggccggtttgaggcccccgacttcccactttggagaaccggtccaccctggaaaagaagagctcagattcctctgtgctctcggagccgcagggaggtgtgtcttcccgcgccaccctccaccccccgaaatgtttctgtttctaatcccagcctgggcaggaatgtggctccccggccaggggccaaggagctattttggggtctcgtttgcccagggagggcttggctccaccactttcctcccccagcctttgggcagcaggtcacccctgttcaggctctgagggtgccccctcctggtcctgtcctcaccaccccttccccacctcctgggaaaaaaaaaaaaaaaaaaaaaaaaaagctggtataaagcagagagcctgagggctaaatttaactgtccgagtcggaatccatctctcagtcacccaagaagctgccctggcctcccgtccccttcccaggcctcaacccctttctcccacccagccccaacccccagccctcaccccctagcccccagttctggagcttgtcgggagcaagggggtggttgctactgggtcactcagcctcaattggccctgtttcagcaatgggcaggttcttcttgaaattcatcacacctgtggcttcctctgtgctctacctttttattggggtgacagtgtgacagctgagattctccatgcattccccctactctagcactgaagggttctgaagggccctggaaggagggagcttggggggctggcttgtgaggggttaaggctgggaggcgggaggggggctggaccaaggggtggggagaaggggaggaggcctcggccggccgcagagagaagtggccagagaggcccagggggacagccagggacaggcagacatgcagccagggctccagggcctggacaggggctgccaggccctgtgacaggaggaccccgagcccccggcccggggaggggccatggtgctgcctgtccaacatgtcagccgaggtgcggctgaggcggctccagcagctggtgttggacccgggcttcctggggctggagcccctgctcgaccttctcctgggcgtccaccaggagctgggcgcctccgaactggcccaggacaagtacgtggccgacttcttgcagtgggcggagcccatcgtggtgaggcttaaggaggtccgactgcagagggacgacttcgagattctgaaggtgatcggacgcggggcgttcagcgaggtagcggtagtgaagatgaagcagacgggccaggtgtatgccatgaagatcatgaacaagtgggacatgctgaagaggggcgaggtgtcgtgcttccgtgaggagagggacgtgttggtgaatggggaccggcggtggatcacgcagctgcacttcgccttccaggatgagaactacctgtacctggtcatggagtattacgtgggcggggacctgctgacactgctgagcaagtttggggagcggattccggccgagatggcgcgcttctacctggcggagattgtcatggccatagactcggtgcaccggcttggctacgtgcacagggacatcaaacccgacaacatcctgctggaccgctgtggccacatccgcctggccgacttcggctcttgcctcaagctgcgggcagatggaacggtgcggtcgctggtggctgtgggcaccccagactacctgtcccccgagatcctgcaggctgtgggcggtgggcctgggacaggcagctacgggcccgagtgtgactggtgggcgctgggtgtattcgcctatgaaatgttctatgggcagacgcccttctacgcggattccacggcggagacctatggcaagatcgtccactacaaggagcacctctctctgccgctggtggacgaaggggtccctgaggaggctcgagacttcattcagcggttgctgtgtcccccggagacacggctgggccggggtggagcaggcgacttccggacacatcccttcttctttggcctcgactgggatggtctccgggacagcgtgcccccctttacaccggatttcgaaggtgccaccgacacatgcaacttcgacttggtggaggacgggctcactgccatggtgagcgggggcggggagacactgtcggacattcgggaaggtgcgccgctaggggtccacctgccttttgtgggctactcctactcctgcatggccctcagggacagtgaggtcccaggccccacacccatggaagtggaggccgagcagctgcttgagccacacgtgcaagcgcccagcctggagccctcggtgtccccacaggatgaaacagctgaagtggcagttccagcggctgtccctgcggcagaggctgaggccgaggtgacgctgcgggagctccaggaagccctggaggaggaggtgctcacccggcagagcctgagccgggagatggaggccatccgcacggacaaccagaacttcgccagtcaactacgcgaggcagaggctcggaaccgggacctagaggcacacgtccggcagttgcaggagcggatggagttgctgcaggcagagggagccacagctgtcacgggggtccccagtccccgggccacggatccaccttcccatctagatggccccccggccgtggctgtgggccagtgcccgctggttgggggccaggccccatgcaccgccgccacctgctgctccctgccagggtccctaggcctggcctatcggaggcgctttccctgctcctgttcgccgttgttctgtctcgtgccgccgccctgggctgcattgggttggtggcccacgccggccaactcaccgcagtctggcgcccgcccaggagccgcccgcgctccctgaaccctagaactgtcttcgactccggggccccgttggaagactgagtgcccggggcacggcacagaagccgcgcccaccgcctgccagttcacaaccgctccgagcgtgggtctccgcccagctccagtcctgtgatccgggcccgccccctagcggccggggagggaggggccgggtccgcggccggcgaacggggctcgaagggtccttgtagccgggaatgctgctgctgctgctgctgctgctgctgctgctggggggatcacagaccatttctttctttcggccaggctgaggccctgacgtggatgggcaaactgcaggcctgggaaggcagcaagccgggccgtccgtgttccatcctccacgcaccccacccccttcggttggttcgcaaaagtgaaaagctttcttgtgcatggacgccctgctttgggggagcgtctggcgcgatctctgccctgcttactcggggaaatttgcttttgccaaacccgcttttttcggggatccccgcgcccccctcctcacttgcgctgctctcggagccccagccggctccgcccgcttcggcggtttggatatttattgacctcgtcctccgactcgctgacaggctacaggacccccaacaaccccaatccacgttttggatgcactgagaccccgacattcctcggtatttattgtctgtccccacctaggacccccacccccgaccctcgcgaataaaaggccctccatctgcccnnnnnnnnnnnnnnnnngggggggccgttttaaagaacccttgggggggccaaggtttacgggggctggcaaggtaatagttttttccttatagggagccgtataataacctacctgggaattttggaaaagaacccttctttttggggggggacatattggaacaacctccctacagaaatttaaggctttagggaaaatataaacttttaaagggaaaagggggtaaaacaacctgcataggctggctgctggaaag

SEQ ID NO: 154231 - DNA, 1158 bp, Homo sapiens
atgggcgggactacgctggcctggagcatggcacgtgattccgccggcctggttgccgggaatctggacctgagcgagaagcacgatccccggccgcccccgctcttgcatccccctggtcctactgctgtgcttgctggcgacggttcgttccggaacccagccctgggcaagccccttacgaagtctcaggctacctggatgaccaccctttcttatgatgctgcaaggagggcaggtggtggaggtgatgggccaggggggccggagccgggctgggttgatcctcggacctggctaagcttccaaggccctcctggagggccaggaatcgggccgggggttgggccaggctctgaggtgtgggggattcccccatgccccccgccgtatgagttctgtggggggatggcgtactgtgggccccaggttggagtggggctagtgccccaaggcggcttggagacctctcagcctgagggtgaagcaggagtcggggtggagagcaactccgatggggcctccccggagccctgcaccgtcacccctggtgccgtgaagctggagaaggagaagctggagcaaaacccggaggaggcaaggaaggtattcagccaaacgaccatctgccgctttgaggctctgcagcttagcttcaagaacatgtgtaagctgcggcccttgctgcagaagtgggtggaggaagctgacaacaatgaaaatcttcaggagatatgcaaagcagaaaccctcgtgcaggcccgaaagagaaagcgaaccagtatcgagaaccgagtgagaggcaacctggagaatttgttcctgcagtgcccgaaacccacactgcagcagatcagccacatcgcccagcagcttgggctcgagaaggatgtggtccgagtgtggttctgtaaccggcgccagaagggcaagcgatcaagcagcgactatgcacaacgagaggattttgaggctgctgggtctcctttctcagggggaccagtgtcctttcctctggccccagggccccattttggtaccccaggctatgggagccctcacttcactgcactgtactcctcggtccctttccctgagggggaagcctttccccctgtctctgtcaccactctgggctctcccatgcattcaaactga

SEQ ID NO: 154232 - DNA, 1734 bp, Homo sapiens
  misc_feature (1)...(1734): n = a,t,c or g
aaaaaaggactcaagattcatggggcctacactggaattccagatcgggcactgacacaatggacacattattcaacatttccaaatcttggcattcttatccacaaagtgaagataataattgtcaattcacaggtgattatgatttaaagagattacttttgaagagttcctaacacattcagtcaacatttaatgatgcttcaggcactgagttcattgctagtgagcgtatgacacacacagccatacggtcacagagctttcaatgaaaagtaacataattgctcatttcaccaggcccccggcttggggcgccttccttccccatggcgggacacctggcttcggatttcgccttttcgccccctccaggtggtggaggtgatgggccaggggggccggagccgggctgggttgatcctcggacctggctaagcttccacacgccctcctggagggccaggaatcgggccgggggttgggccaggctctgaggtgtgggggattcccccatgccccccagccgtatgagttctgtggggggatggcgtactgtgggccccaggttggagtggggctagtgccccaaggcggcttggagacctctcagcctgagggcgaagcaggagtcggggtggagagcaactccgaatggggcctccccggagcccgtgcaccgtcacccctggtgcccgtgaagctggagaaggagaagctggagcaaaacccggagaagttcccaggacatcaaagctctgcagaaagaactcgagcaatttgccaagcttcctgaagcagaagaggatcaccctgggatatacacaggccgatgtggggctcaccctgggggttctatttgggaaggtattcagccaaacgaccatctgccgctttgaggctctgcagcttagcttcaagaacatgtgtaagctgcggcccttgctgcagaagtgggtggaggaagctgacaacaatgaaaatcttcaggagatatgcaaagcagaaaccctcgtgcaggcccgaaagagaaagcgaaccagtatcgagaaccgagtgagaggcaacctggagaatttgttcctgcagtgccccgaaaccccacactggcagcagattcagccacatcgcccagcagcttgggctcaagaagcatgtagtccgagtggtccgagtgtggttctgtaacccggcgccagaagggcaaagcgatcaagcagcgactttgccacaacgagaggattttgaggctgctgggtctcctttcttcagggggacccagtgtcccttttccctcctgcccccagggccccattttggtaccccaggctatgggagccctcacttcactgccactgtactcctcggtcccttttccgtgagggggaagcctttccccctgtctctgtcaccattctggggctctcccatgcattcaaactgaggtgcctgcctgcccttctaggaaatgggggacagggggaggggaggagctaggggaaagagaacctgggagtttgtgccaggggctttttgggaatttaagttcttcatttcacttaagggaaggaatttngggaacacaaagggtgggggcaggggagtttggggcaactggttggagggaaggtgaagttcaatgatgctcttgattttaatcccacatcatgtatcacttttttcttaaataaagaagcttgggacacagtagatagacacacttaaaaaaaaaaa

SEQ ID NO: 154233 - DNA, 822 bp, Homo sapiens
atggttcctgatgaaaggtacatcactcaggaaggccacaagctggaaacaggggccccgcggccaccagccaccgtcaccaacgcggtgtcctggcggtccgaaggcatcaagtatcggaagaatgaggtgttcttggacgtcatcgagtctgtcaacctcttgcagcttgaggttacgttctttgctggagaaaagcgttttgaaacagaaacgcccacggtgtccctgacgctgagttgtggaaaccccaggctcatcgtcgctagagcaaccccacctcccttcctggagcagctcagccaatcaaagagaagcgaggcggccattcgggcggaaatagtgtttgcaaacaggaagtgtggcactccagctaccgaagcactggagagtgtcatggaggcctacgagcaggtccaaaagggacccctgaagcttgaaaggcttcgcagagctgggagtgaccaagcggaaggaagaaaaaggaaggacaaagacaaagcgaaactcctggaagcaatgggaacggagcaaaaagaacggaggaggagaagcggcgcggcctggacaagcggaccccggcccaggcggccttcgagaaaatgcaggagaagcgggtgctcatctgccggaactaccgtggcgacgtggacatgtcagaggtggagcacttcatgcccatcctgatggagaaggaggaggaggggatgctgtcgcccatcctggcccacgggggggtccgtttcatgtggatcaaacacaacaacctgtatcgtatccctttgctgggggtgctcccaggggactcctgtgtgggtgttg

SEQ ID NO: 154234 - DNA, 1686 bp, Homo sapiens
  misc_feature (1)...(1686): n = a,t,c or g
cggccgcgtcgacggagagtggcatggtggcctactatcaggtccaaaagggacccctgaagctgaaaggcgtcgcaaagctgggagtgaccaagcggtgaggcccgagggcccgcgggattccgtcttcatcccccttaaaccttttctcgggacccctgggcctgatcctccgacccgccgccttctcatgtttttttccaggaagaagaaaaagaaggacaaagacaaagcgaaacatcctggaagcaatgggaacgagcaaaaagaacgaggaggagaagcggcgcggccttggacaagcggaccccggcccaggcggacttcgagaaaatgcaggagaagcggcaaatggaaaggatcctaatgaaggctatccaaaccccacaggcagagagtggaggacttcaacagacacctgggacacactcacggagcattaccgacattcccaaagtcaacttggacgaagtagcccgcctgcccccagtatggagcagcatcgaagggttcgcaaaaaggggcacactgggggttgtgtgtggtttcctttgggtatattctnggaaaacatggcttacaccacacccttgcatcttcttgctacagactgcttttccgaagctgtgttaccctcattctggaacttgattaaagtaagatcgtccttgtactcagtttaggcttcttggcaacatacagaagatacacccttttcgtttggatgggaaagtttcttaagtttatccagaggtaaagcccattgtgtgtctgtgtcatgttaaaaatgttttcacccgagttgcatgttaacgctctgagggccagccagctgtcttctcctgggatgagacagactccagagggtaaggagctagcgccatggtggccctgcagtatgcagagccccgtcagggacccagcgtgggcgcccttccaagcttcctctaagctttggggcctatgctgcccccttgcagggccntaggggaaggccatttggcaactatggctggccttcaagacttcctccttcagcccacctgggccactgaggacagcattagcctggggttaacgggaacagcccacctaagggcaagatttgggaacgggacaacactttgttcctttttttgaggcccgttttcccaaaacccccttttccagggtgcttctaatgggttgttgcccatagcagaacgctgctaatgccatcaacagcattcctttgaaaatggaacccagacacagccctgccctcctcaatccctccagcctgggggctccctagccagccctcttgtatttacctcagagttggacacattcacacagatccctgtttggccatttccctaccttaccggacggtcttccagggggtgaccagggggcccaggnagaagccccgggttaacaaaacagaccaagggctggcagtccaaatgggggagggtccaggtgtcccgtgttggagggctgggactcttgtagggcctgtgcgcccctggctgaggatcaaaccacatatgttattgggagaaacgatttctgttgacgtagatattgaaagaataatgaaggcagaaatataaaaacgaagtgtgggaatttgggggttgtcctgtgttaaattaccacaataattgcaaaagtcagttattgtacaaaaaaaaaaaaaaa

SEQ ID NO: 154235 - DNA, 465 bp, Homo sapiens
tcggacaaacaagtcagcaccatgtggccctccgcaccacccagcatcactgggccctcggtcagcaccgcgtggccctccacactgtggaatattacttagccctgaaaaggaaggaaatggacacaggctgcaacgtggatggaacttgagtatattgtgctgagtggaataagccagtcacaggaggacatgcactgtatgatcccatttgtgtcaggtccctagagtcattgcattcatagggacggaggtaggatggtgcagcctggtgatgccaggggccggggaaggtgggaatggggagttggggttgaatgggtagtttcagttgcgcaaggtgaagagagttctcgggatggatggcggtgagggctgcacaacagcatccacgcacgtagtgccactgacctgcacactgaaaaatggttcaaacggcaagttttacgttatatttaccacaat

SEQ ID NO: 154236 - DNA, 1983 bp, Homo sapiens; identical to SEQ ID NO: 138255
  misc_feature (1)...(1983): n = a,t,c or g

SEQ ID NO: 154237 - DNA, 1917 bp, Homo sapiens
atgatcggcctgtcgcttgcggtattcggaatcttgcacgccctcgctcaagccttcgtcactggtcccgccaccaaacgtttcggcgagaagcaggccattatcgcgcatggcggccgacgcgctgggctacgtcttgctggcgttccgacgcgaggctggatggccttccccattatgattcttctcgcttccggcgcatcgggatgccgcgttgcaggccatgctgtccaggcagcactcagggcgcaagggctgctaaaggaagcggaacacgtagaaagccagtccgcagaaacggtgctgaccccggatgaatgtcagctactgggctatctggacaagggaaaacgcaagcgcaaagagaaagcaggtagcttgcagtgggcttacatggcgatagctagactgggcggttttatggacagcaagcgaaccggaattgccagctggggcgccctctgcgcaggggccgcggttctttttgtcaagaccgacctgtccggtgccctgaatgaactgcaggacgaggcagcgcggctatcgtggctggccacgacgggcgttccttgcgcagctgtgctcgacgttgtcactgaagcgggaagggactggctgctattgggcgaagtgccggggcaggatctcctgtcatctcaccttgctcctgccgagaaagtatccatcatggctgatgcaatgcggcggctgcatacgcttgatccggctacctgcccattcgaccaccaagcgaaacatcgcatcgagcgagcacgtactcggatggaagccggtcttaaggatctgatgcgcagggatcaagatctgatcaagagacaggatgaggatcgttcgcatgatgaacaagatgatgcacgcaggtctccggccgcttggtggagagcgtattcggctatagctgcgacaacagacaactcggggcgcccggttctttttgtcaagaccgacctgtccggtgccctgaatgaactgcaggacgaggcagcgcggctatcgtggctggccacgacgggcgttccttgcgcagctgtgctcgacgttgtcactgaagcgggaagggactggctgctattgggcgaagtgccggggcaggatctcctgtcatctcaccttgctcctgccgagaaagtatccatcatggctgatgcaatgcggcggctgcatacgcttgatccggctacctgcccattcgaccaccaagcgaaacatcgcatcgagcgagcacgtactcggatggaagccggtcttgtcgatcaggatgatctggacgaagagcatcaggggctcgcgccagccgaactgttcgccaggctcaaggcgcgcatgcccgacggcgaggatctcgtcgtgacccatggcgatgctgcttgccgaatatcatggtggaaaatggccgcttttctggattcatcgactgtggccggctgggacatagcgttggctacccgtgatattgctgaagagcttggcggcgaatgggctgaccgcttcctcgtgctttacgttcttctgagcgggactctggggttcgaaatgaccgaccaagcgacgcccaacctgccatcacgagatttcgattccaccgccgccttctatgaaaggttgggcttcggaatcgttttccgggacgccggctggatgatcctccagcgcggggatctcatgctggagttcttcgcccaccccgggctcgatcccctcgcgagttggttcagctgctgcctgaggctggacgacctcgcggagttctaccggcagtgcaaatccgtcggcatccaggaaaccagcagcggctatccgcgcatccatgcccccgaactgcaggagtggggaggcacgatggccgctttggtccggatctttgtgaaggaaccttacttctgtggtgtgacataa

SEQ ID NO: 154238 - DNA, 2040 bp, Homo sapiens
tcacacagccaggtggtggtagagctgggctttgaacccagagcgcgtgtcctcagcccccagccctgatgccctggacctggcgtggtggccagcggggacgggccctcttgggcactcacctcgctgccgcacttggatggtcctgagcgccagtacattctgctcatccgacaggaactgcttcatcttgatgaagggctccttgcccttcaccgtgagcttgcgccagggcttgggccgggctaggatctcgctgaccgagccctgcgacagccccagcacgtaatgcccaaacacccgctgcccgatgttgtgtttcagcagctgctccttcacctggaaggcgatctctgccgtgtccagctgctcctcctctgccccgggccccgccgctccgcccccaccaccatccgcgggctcaggaccgcccagtggctcagggccaggggccggggtggcaggggctgtggggggcttggcgccatagaaggctggggggaacaccagcaggccgcccgcctctcccttgaaggcggctgggggcatcatcagtctctcccctgatgccaggctggggaagggggacagcgagaaagtccgagtgccgtcaggccccaagctggggcccagcaggggctgcccggggctgggagacagggggtcttctggccctggtggaggtgggagctgctgaggggaggggtaggactgctccgtgcccagtgaatccttgatggaatcgtcctctgatgggtcttcctcagggctggccaggaggctgggcttctccagaaggaatttctgcgtggggaagaaggcctcctttgcaataagcagtgagtcttcaggcttggccatgccctgggggaggctgcaggtgctggaggccagcttcatggctttcaggatgctcagctccgttttaatttcctcatagtcagactgggcctggagcttctcttccagcttttctatggcctcggacttggccgtgagctgccgctccaggtcggcgatctggttggcggatgcctcctccagctcctgcagtgagctctggaggtgctgcacgtccttcagcagccgcaggatctccctgtccttggaggccagcgcggcctccagccgagggcccgagcacagagtgaagttcaccttatcccagtcagctccttccggtgggcgcggggcatgactatcgtcgccgcacttatgactgtcttctttatcatgcaactcgtaggacaggtgccggcagcgctctgggtcattttcggcgaggaccgctttcgctggagcgcgacgatgatcggcctgtcgcttgcggtattcggaatcttgcacgccctcgctcaagccttcgtcactggtcccgccaccaaacgtttcggcgagaagcaggccattatcgccggcatggcggccgacgcgctgggctacgtcttgctggcgttcgcgacgcgaggctggatggccttccccattatgattcttctcgcttccggcggcatcgggatgcccgcgttgcaggccatgcaacccttggcagaacatatccatcgcgtccgccatctccagcagccgcacgcggcgcatctcgggcagcgttgggtcctggccacgggtgcgcatgatcgtgctcctgtcgttgaggacccggtggttagcagaatgaatcaccgatacgcgagcgaacgtgaagcgactgctgctgcaaaacgtctgcgacctgagcaacaacatgaatggtcttcggtttccgtgtttcgtaaagtgcttctggagaaactcaacgagctggacgcggatgaacaggcagacatctgtgaatcgcttcacgaccacgctgatgagctttaccgcagctgcctcgcgcgtttcggtgatgacggtgaaaacctctgacacatgcagctcccggagacggtcacagcttgtctccctgttgcagttctgcgctgtcacaaacgactctgctggtgtggctgtccctccgtctgctgtgggggcttcttgcagccagggaccgagttccat

SEQ ID NO: 154239 - DNA, 2931 bp, Homo sapiens; identical to SEQ ID NO: 138276

SEQ ID NO: 154240 - DNA, 3690 bp, Homo sapiens; identical to SEQ ID NO: 124481
  misc_feature (1)...(3690): n = a,t,c or g

SEQ ID NO: 154241 - DNA, 3528 bp, Homo sapiens
atgaacatgaacatcaaaaaaattgtaaaacaagccacagttctgacttttacgactgcacttctggcaggaggagcgactcaagccttcgcgaaagaaaataaccaaaaagcatacaaagaaacgtacggcgtctctcatattacacgccatgatatgctgcagatccctaaacagcagcaaaacgaaaaataccaagtgcctcaattcgatcaatcaacgattaaaaatattgagtctgcaaaaggacttgatgtgtgggacagctggccgctgcaaaacgctgacggaacagtagctgaatacaacggctatcacgttgtgtttgctcttgcgggaagcccgaaagacgctgatgacacatcaatctacatgttttatcaaaaggtaaaccacacatttatcgactatcgaaccggaagattacaacctgctattccccagagtctccctgaagctctccgtttggctgccgacctggcagagcaaaagcaacggctggagcaaaaaatgcttatggatgcacctaaagtcgaattcgctgaacgcgttgctaccgccagaaaggttctaatcggcaactatgccaaagtgctcggcctgggccaaaactatctcttcacctggttgcgtgataacggaattctgatcgcaaccggtgaacgcaggaacgtccccaaacaagaatacatatctcgtgggtatttcacccttaaagaaaccgtgatcgatacaagcaatggaagcaggatttctttcacgactcgtataaccggcaaaggtcagcagtggctgatgaagcgattgcttgatgctgacgtagtaagaaccaccagcattgtaatgctggctaaagtcactttcctgagctgtataacgatgagcgattttactttttctggctatgaattggcctgctttgtaacacactccggtctatcccgtagcgccgggcatatcctgtcgcaatgtgcaaatctcgcggcaacaaccagtgaatacttcattcacaagcctcaccgcctgatcgcggcagaaactggttatagccaatcaaccgtcgttcgtgcattccgtgaagctgtaaacaaaggaattctgtctgtagagattgttatcggcgatcaccgtgaacgtcgcgctaacctgtaccggtttacaccatcctttttggccttcgcacaacaagccaaaaatgcgctgatagaaagcaaattaaagatctcttcagcggcaaccaaggttaaagctgttctcgctaagacattggctttatttaattttttatccacacccccatgtcaaaatgataccccctccccctgtcaggatgacgtggcaataaagaataagaagtcacaagttaaaaaaacaaaaagatcagtttccggcggtgccggaacaaccagcctcaaaaaattgacttcatggatcgctaaggcaaaagcaaaggctgacaatctgcggttatccaaaaaacgcactcaaaaacatgagttcaagcagaaagtagaggcggctgcgcggaaatatgcttacctgaagaacaagcgttcgcctgatattggcgggatatcaaacttcgataacctaccgcattgcatgacggtaaacgaagctcttaatgcggttttagccaaaaataaagataacgaacaatggggtgcggttgctggcgcctatatcgccgacatcaccgatggggaagatcgggctcgccacttcgggctcatgagcgcttgtttcggcgtgggtatggtggcaggccccgtggccgggggactgttgggcgccatctccttgcatgcaccattccttgcggcggcggtgctcaacggcctcaacctactactgggttgctttctaatgcaggagtcgcataagggagagcgtcgaggagaagaggaagacatgtcattcttttctacgttaaaaacagctttgtctttgaaggagaaacttgctgctactggtgttcttgttctgatttgcgcacttgttggtgctgggtttgcatgggaacgtcatcagctaaagcaagccatagagaaaattggcagtcttgatcaggctgttaaggaacgtgataagtcaataatggatcttaaccagaccattgagacgatgaacaaagcagagcaacattttcacagccaggaagtgaaaaatgaatcagaacaagccaagtatgctgacaggcaaatggaacgaaaagctgaagttcagaaacaactggttgcggcgggtaatgttcgccagcgtattcctgctgacactcagcggttgctccgggagtcgatcagcgaatttaacgccgacgccgacaaagggatttttatgtctgataaagtaacagtaaagcaaactatcaacaaagcgacttcaatctacaaaattgagcaaatcactgttggcaagccaggatctgaacaataccgtcgtgctttcgagcttgccgatcagcttggtttaaaacacccggattgcattgagcatgtatttccgacctatgctgatgagcaatgtactcatgttcttaccgaagaggattttttcagcactgaagaacgagaaggcgttgatcgctgcattggtgtgatttgttcttcggtaagtgatgagttattccctaatgtgcctgaatatggtggtattggataccaattcctgtacgagggcgatgagcttaaatgctatgaacatgacattgaaagtaaggcaaaagaactaacagttaattcaaacaacactgtgcagcctgtagcgttgatgcgcttgggggtattcgtgccgaagccatcaaagagcaaaggagaaagtaaagagattgatgccaccaaagcgttttcccagctggagatagctaaagccgagggttacgatgatattaaaatcaccggtcctcgactcgatatggatactgatttcaaaacgtggatcggtgtcatctacgcgttcagcaaatacggcttgtcctcaaacaccatccagttatcgtttcaggaattcgctaaagcctgtggtttcccctcaaaacgtctggatgcgaaactgcgtttaaccattcatgaatcacttggacgcttgcgtaacaagggtatcgcttttaagcgcggaaaagatgctaaaggcggctatcagactggtctgctgaaggtcgggcgttttgatgctgaccttgatctgatagagctggaggctgattcgaagttgtgggagctgttccagcttgattatcgcgttctgttgcaacaccacgccttgcgtgcccttccgaagaaagaagctgcacaagccatttacactttcatcgaaagccttccgcagaacccgttgccgctatcgttcgcgcgaatccgtgagcgcctggctttgcagtcagctgttggcgagcaaaaccgtatcattaagaaagcgatagaacagcttaaaacaatcggctatctcgactgttctattgagaagaaaggccgggaaagttttgtaatcgtccattctcgcaatccaaagctgaaactccccgaataa

SEQ ID NO: 154242 - DNA, 3945 bp, Homo sapiens
atgttgatgaaggcccacaagggggtcctaggggagcaggagaaggtaccaaggagactgatgaaggtcctcaagggggtcccaggagaacaggagaaggtgctctgggaagcaagggaggagggcgtttccagcaggtggacagggtcacccatgggctgtgagcagagagtttggatgggggatgagcaagccatggagcccctgggcttggccgatgggaagctttggaggaccttcatgggagcagctgatgccgaaaggaaagaaggccgggggatgaaggtggctccagcccctgctgtcgtgaagaagcaggaggccaagaaagtggtgaatcccctgtttgagaaaaggcctaagaattttggtgttggacaggacatccagcccaaaagagacctcacccgttttgtgaaatggccccgctatatcaagttgcagcatcagagagccttcctctataaacggctgaaagtgcctcctgcaattaaccagttcacccaggccctggaccgccaaactgctactcagctgcttgagctggcccacaagtacagaccagagacaaagcaagagaagaagcagaggctcttggcccaggccgaggagaaaactgctggcaaaggggacatctccactaagagactacctgtccttcaagcaggagttaactgggaagacaaaagtgctttggctaagctggtggaaggtataaggaccaattacaatgagagatacaatgagatccaccatcactggggaggcaatgtcctgggtcccgagtctgtggctcgcatcgccaagctcaaaaaggcagatgggagcttacgtctggactttactgtgtgcaaaaaggcatggatagtaagccaccctgtttcccagagaaaactgccccagcagaaaaggcagaacaggaagaagcggcaggaagttcaggcctggggctctggaccttgcctgagcctggtggtgggttcagagccagccacaggcgggagcagctgctccgagacgagtggttttggaaagagctgtaaagtgaaagaaacaaaccctcagccgatggcagcgaccccaacgctggagcaaggggaggcagttgctgcccacgccgaaatcccaccagcctgcagccacggacaggtgccggcagcgctctgggtcattttcggcgaggaccgctttcgctggagcgcgacgatgatcggcctgtcgcttgcggtattcggaatcttgcacgccctcgctcaagccttcgtcactggtcccgccaccaaacgtttcggcgagaagcaggccattatcgccggcatggcggccgacgcgctgggctacgtcttgctggcgttcgcgacgcgaggctggatggccttccccattatgattcttctcgcttccggcggcatcgggatgcccgcgttgcaggccatgctgtccaggcagcctaacttcgatcattggaccgctgatcgtcacggcgatttatgccgcctcggcgagcacatggaacgggttggcatggattgtaggcgccgccctataccttgtctgcctccccgcgttgcgtcgcggtgcatggagccgggccacctcgacctgaatggaagccggcggcacctcgctaacggattcaccactccaagaattggagccaatcaattcttgcggagaactgtgaatgcgcaaaccaacccttggcagaacatatccatcgcgtccgccatctccagcagccgcacgcggcgcatctcgggcagcgttgggtcctggccacggtctggaaacgcggaagtcagcgccctgcaccattatgttccggatctgcatcgcaggatgctgctggctaccctgtggaacacctacatctgtattaacgaagcgctggcattgaccctgagtgatttttctctggtcccgccgcatccataccgccagttgtttaccctcacaacgttccataaccgggcatgttcatcatcagtaacccgtatcgtgagcatcctctctcgtttcatcggtatcattacccccatgaacagaaatcccccttacacggaggcatcagtgaccaaacaggaaaaaaccgcccttaacatggcccgctttatcagaagccagacattaacgcttctggagaaactcaacgagctggacgcggatgaacaggcagacatctgtgaatcgcttcacgaccacgctgatgagctttaccgcagctgcctcgcgcgtttcggtgatgacggaaacagctatgaccatgattacgccaagcttgcatgcctgcaggtcgaaggccgtggcggcggcacttttgcccatgaattgctcgctgtggagtacgcaggctggatttctcccgcgtttcggctgaaggtaaaccagacatttatcgactatcgaaccggaagattacaacctgctattccgcagagtctccctgaagctctccgtttggctgccgacctggcagagcaaaagcaacggctggagcaaaaaatgcttatggatgcacctaaagtcgaattcgctgaacgcgttgctaccgccagcggggttctaatcggcaactatgccaaagtgctcggcctgggccaaaactatctcttcacctggttgcgtgataacggaattctgatcgcaaccggtgaacgcaggaacgtccccaaacaagaatacatatctcgtgggtatttcacccttaaagaaaccgtgatcgatacaagcaatggaagcaggatttctttcacgactcgtataaccggcaaaggtcagcagtggctgatgaagcgattgcttgatgcaagaaaccgtgatcgatacaagcaatggaagcaggatttctttcacgactcgtataaccggcaaagcgccgggcatatcctgtcgcaatgtgcaaatctcgcggcaacaaccagtgaatacttcattcacaagcctcaccgcctgatcgcggcagaaactggttatagccaatcaaccgtcgttcgtgcattccgtgaagctgtaaacaaaggaattctgtctgtagagattgttatcggcgatcaccgtgaacgtcgcgctaacctgtaccggtttacaccatcctttttggccttcgcacaacaagccaaaaatgcgctgatagaaagcaaattaaagatctcttcagcggcaaccaaggatgacgtggcaataaagaataagaagtcacaagttaaaaaaacaaaaagatcagtttccggcggtgccggaacaaccagcctcaaaaaattgacttcatggatcgctaaggcaaaagcaaaggctgacaatctgcggttatccaaaaaacgcactcaaaaacatgagttcaagcagaaagtagaggcggctgcgcggaaatatgcttacctgaagaacaagcgttcgcctgatattggcgggatatcaaacttcgataacctaccgcattgcatgacgatcctctacgccggacgcatcgtggccggcatcaccggcgccacaggtgcggttgctggcgcctatatcgccgacatcaccgatggggaagatcgggctcgccacttcgggctcatgagcgcttgtttcggcgtgggtatggtggcaggccccgtggccgggggactgttgggcgccatctccttgcatgcaccattccttgcggcggcggtgctcaacggcctcaacctactactgggctgcttcctaatgcaggagtcgcataagggagagcgtcgaggagaacttctaaagatcgtcgttttgccaggtgaccacgttggtcaagaaatcacagccgaagccattaaggttcttaaagctatttctgatgttcgttccaatgtcaagttcgatttcgaaaatcatttaattggtggtgctgctatcgacctgcaggggggggggggaaagccacgttgtgtctcaaaatctctgatgttacattgcacaagataa

SEQ ID NO: 154243 - DNA, 3285 bp, Homo sapiens
tcaaatgacctgaacaaattcaataatctgttcatttgctagagtctctccccgagactccattgatgggtgatttatcagagcagctggggcaggcgcaggggcattctctgcgtttgctttgaagccccgatgccaaagcacattatcaggtctgaaggtcattatttctacagaaaacaatggtttgtggttaataccacccctcccccagggtattaacggaacttggacatctgccccaacctgacaataactgaggggcaccaccctcatggcggcaaaagaaataggggccgcggtacttaatgggtgcttttggacgaagcagagcggcctaggcctgcaaggacgcacctgcgtcaccaccgccctatgcgtcagccgaatgtgtgcagcgtacgctgccccgccaacatcaagccgaaaaattcttgatgggaaaaggggcgaacaacaaggttcacggacaattggattctgggccaaaagggttttgggcccacccggggaaatcttaattggaaaaaacccctttcctttccggttttggccacagctaaattttttacaaacatccttttcaggacgaacgcgactggttcggcagttgggatcgtttgcatcggaagggtgcctcagacgaatgacactcgttgaagcgggattgcactttcgccgagcactgctgtgtgtgccaagagacaagaacacgcccagagcttgaacggaacggcgaacgaaatgcggaatgaacggaactattggttgcttttgaccgaagcaaccgtaataaccggggctttttccttcggttaagaatacaagaagcgggaaagctgaactgtacagtgttgtcagctctactagggtgagttggaccttgggtttgatgtttgtgttgatgtggacatgtggttcctttgctataagcttttcttttggaaacctttcccacgggtccaggccaagggaagtttttggcccacggccgaacaattcaagttccaaagaaattcttggtaatgggaaaatgggggccgacgaaccagcttccaggggaacaatttggaatccttcgggcaagaaggggtttttggccgccaccaccggtgggaaaatcttcatatcggaagaatcaacccttccttttccggttcctgggcccaaactttcaaattttttaaccaacctccaagtgggcttggccattcgggcggtaaccttcccttgggggcacccccaaaaagaaccacccatttggaaaggaaaccaaggggtggaagaaaatggccattcggattgaagggccgggcaacccgcctttgctggtggggaacaaccaaaccgctttgttggcccaacccgggctttccgggcccagcttgggggaatccgttttggcccattccggggaagggggggcccttcacgttgcggaactgtgaaacaaatttccgtttgggaagggggcccggtatattggcccacctttttccgggccaaaaaccaacattgggccttgttggtttgttggcccccgaaggagaggcacacagtgggaacaaatactttcccccaagaagagcctcttaaaaacccggggaaaaatgtgcccaaaaaaaccccgaaaattttgccccggggcaatttaaagggttccggatcaattctcatgtttgacagcttatcatcgataagtgccgggcctcttgcgggatatcgtccattccgacagcatcgccagtcactatggcgtgctgctagcgctatatgcgttgatgcaatttctatgcgcacccgttctcggagcactgtccgaccgctttggccgccgcccagtcctgctcgcttcgctacttggagccatgtcagctgtccttgctccaggatgctgtttttgacaacggatgttttattgcctttgatgttcattaagaagcttggcgcaaatgttgcctttttatcctcgaagaagcctctgtttgtcatgtagcttgtgataaccacattgttgcctttggcttgcggcactgcgaagtgagagtaagtgaatgtcacatcgtttggatcaagacccatttgcagcacaagccctgttttgttcagcggcttgtaagggccggttaaagagtttgatacataaccaagcatgtaaatatcgtttgagttaataccatcgatcgtcatttttgaaccgcgtgaatcagtgaacaagtaccatttgccgttcattttgaaaacattcgcgcgctcgatttcatcagttaccgtgtttgaagtgatcagcggcttcattacttttttcaatgtgtaatcattatttaactctatgataccgagggcgccgttcgctaactcagcatcgcgttttttagcgctctgctgaagcttctggctttctttacggaagaagttcgtgccgccgccgtagtacgctttgttaaataaagattcttcgccttggtatccgttttctgttcccgtgttggcttcgaatacaaggtatttatggcctttgtcttcaacgtagtgagggtctctcagcgtatggttgtcgccggatgtataattgccttcatcgataaactgctgaacgttctgatatgtttttccgtctccgtcaaaaatcgttttgtgatcttccactccgttgattttgagtgtgtcatcagattttgacacatttacctgcgctgttgtcaggctttgtttgccgtaatgtttaccggaatagtcagtgtagaataaacggatttttccgtcagatgtaaaggttgcagaaccggaccattcttgcgtctgatctttcaggatcggatcgttggcgtcgaacttatcgctgtctttaaagacacggcccgcgtttttccagctgtcgattgagttgtcgccgaccttttgataaaacatgtagattgatgtgtcatcagcgtctttcgggcttcccgcaagagcaaacacaacgtgatagccgttgtattcagctactgttccgtcagcgttttgcagcggccagctgtcccacacatcaagtccttttgcagactcaatatttttaatcgttgattgatcgaattgaggcacttggtatttttcgttttgctgctgtttagggatctgcagcatatcatggcgtgtaatatgagagacgccgtacgtttctttgtatgctttttggttattttctttcgcgaaggcttgagtcgctcctcctgccagaagtgcagtcgtaaaagtcagaactgtggcttgttttacaatttttttgatgttcatgttcat

SEQ ID NO: 154244 - DNA, 2379 bp, Homo sapiens
atggctaaaatgaaaaatcagataatacctagtgttggtgagaagctggaacaacagaaaccctcctacgatgctcgagccttcgtcactggtcccgccaccaaacgtttcggcgagaagcaggccattatcgccggcatggcgaccgacgcgctgggctacgtcttgctggcgttcgcgacgcgaggctggatggccttccccattatgattcttctcgcttccggcggcatcgggatgcccgcgttgcaggccatgctgtccaggcagcctaacttcgatcattggaccgctgatcgtcacggcgatttatgccgcctcggcgagcacatggaacgggttggcatggattgtaggcgccgccctataccttgtctgcctccccgcgttgcgtcgcggtgcatggagccgggccacctcgacctgaatggaagccggcggcacctcgctaacggattcaccactccaagaattggagccaatcaattcttgcggagaactgtgaatgcgcaaaccaacccttggcagaacatatccatcgcgtccgccatctccagcagccgcacgcggcgcatctcgggcagcgttgggtcctggccacggtctggaaacgcggaagtcagcgccctgcaccattatgttccggatctgcatcgcaggatgctgctggctaccctgtggaacacctacatctgtattaacgaagcgctggcattgaccctgagtgatttttctctggtcccgccgcatccataccgccagttgtttaccctcacaacgttccaagaaaagcaacggctggagcaaaaaatgcttatggatgcacctaaagtcgaattcgctgaacgcgttgctaccgccagcggggttctaatcggcaactatgccaaagtgctcggcctgggccaaaactatctcttcacctggttgcgtgataacggaattctgatcgcaaccggtgaacgcaggaacgtccccaaacaagaatacatatctcgtgggtatttcacccttaaagaaaccgtgatcgatacaagcaatggaagcaggatttctttcacgactcgtataaccggcaaagacgtagtaagaaccaccagcattgtaatgctggctaaagtcactttcctgagctgtataacgatgagcgattttactttttctggctatgaattggcctgctttgtaacacactccggtctatcccgtagcgccgggcatatcctgtcgcaatgtgcaaatctcgcggcaacaaccagtgaatacttcattcacaagcctcaccgcctgatcgcggcagaaactggttatagccaatcaaccgtcgttcgtgcattccgtgaagctgtaaacaaaggaattctgtctgtagagattgttatcggcgatcaccgtgaacgtcgcgctaacctgtaccggtttacaccatcctttttggccttcgcacaacaagccaaaaatgcgctgatagaaagcaaattaaagatctcttcagcggcaaccaaggttaaagctgttctcgctaagacattggctttatttaattttttatccacacccccatgtcaaaatgataccccctccccctgtcaggatgacgtggcaataaagaataagaagtcacaagttaaaaaaacaaaaagatcagtttccggcggtgccggaacaaccagcctcaaaaaattgacttcatggatcgctaaggcaaaagcaaaggctgacaatctgcggttatccaaaaaacgcactcaaaaacatgagttcaagcagaaagtagaggcggctgcgcggaaatatgcttacctgaagaacaagcgttcgcctgatattggcgggatatcaaacttcgataacctaccgcattgcatgacggtaaacgaagctcttaatgcggttttagccaaaaataaagataacgaacaatggggtgcggttgctggcgcctatatcgccgacatcaccgatggggaagatcgggctcgccacttcgggctcatgagcgcttgtttcggcgtgggtatggtggcaggccccgtggccgggggactgttgggcgccatctccttgcatgcaccattccttgcggcggcggtgctcaacggcctcaacctactactgggctgcttcctaatgcaggagtcgcataagggagagcgtcgaggagaacttctaaagatcgtcgttttgccaggtgaccacgttggtcaagaaatcacagccgaagccattaaggttcttaaagctatttctgatgttcgttccaatgtcaagttcgatttcgaaaatcatttaattggtggtgctgctatcgacctgcaggggggggggggaaagccacgttgtgtctcaaaatctctgatgttacattgcacaagataa

SEQ ID NO: 154245 - DNA, 1632 bp, Homo sapiens
atgaaatctaacaatgcgctcatcgtcatcctcggcaccgtcaccctggatgctgtaggcataggcttggttatgccggtactgccgggcctcttgcgggatatcgtccattccgacagcatcgccagtcactatggcgtgctgctagcgctatatgcgttgatgcaatttctatgcgcacccgttctcggagcactgtccgaccgctttggccgccgcccagtcctgctcgcttcgctacttggagccactatcgactacgcgatcatggcgaccacacccgtcctgtggatcctctacgccggacgcatcgtggccggcatcaccggcgccacaggtgcggttgctggcgcctatatcgccgacatcaccgatggggaagatcgggctcgccacttcgggctcatgagcgcttgtttcggcgtgggtatggtggcaggccccgtggccgggggactgttgggcgccatctccttgcatgcaccattccttgcggcggcggtgctcaacggcctcaacctactactgggctgcttcctaatgcaggagtcgcataagggagagcgtcgaccgatgcccttgagagccttcaacccagtcagctccttccggtgggcgcggggcatgactatcgtcgccgcacttatgactgtcttctttatcatgcaactcgtaggacaggtgccggcagcgctctgggtcattttcggcgaggaccgctttcgctggagcgcgacgatgatcggcctgtcgcttgcggtattcggaatcttgcacgccctcgctcaagccttcgtcactggtcccgccaccaaacgtttcggcgagaagcaggccattatcgccggcatggcggccgacgcgctgggctacgtcttgctggcgttcgcgacgcgaggctggatggccttccccattatgattcttctcgcttccggcggcatcgggatgcccgcgttgcaggccatgctgtccaggcaggtagatgacgaccatcagggacagcttcaaggatcgctcgcggctcttaccagcctaacttcgatcattggaccgctgatcgtcacggcgatttatgccgcctcggcgagcacatggaacgggttggcatggattgtaggcgccgccctataccttgtctgcctccccgcgttgcgtcgcgaacgctcggttgccgccgggcgttttttattggtgagaatcgcagcaacttgtcgcgccaatcgagccatgtcgtcgtcaacgaccccccattcaagaacagcaagcagcattgagaactttggaatccagtccctcttccacctgctgatctgcgacttatcaacgcccacagcttccgctgtcttctcagttccaagcattgcgattttgttaagcaacgcactctcgattcgtagagcctcgttgcgtttgtttgcacgaaccatatgtagctatatgcaaattgaaacaaaagagatggtgatctttctaagagatgatggaatctcccttcagtatcccgatggtcaatgcgctggatatgggatagatgggaatatgctgatttttatgggacagagttgcgaactgttcccaactaaaatcattttgcacgatcagcgcactacgaactttacccacaaatag

SEQ ID NO: 154246 - DNA, 2715 bp, Homo sapiens
atgatgggacttcgaaatagctatgatgtaaaagaaaggttgaagcatcaagtaaggggtggtaaagcacccaaggctgtcaatagtgggaagctattgccatttccaaggctgaaggagctggcgggggtggaggggatgggtaactgttacctgggcagaacccagccaggaacaagaatgcaatggagccccatgaagctgtccgtagaacttagagcagggcagagaagccttctaagagaaagcaaaggaaaagagatcccagagcccaggtgtgcagctgttggaggaaaagagcctgaagcaaagccgccgaaagttcctcgaccgatgcccttgagagccttcaacccagtcagctccttccggtgggcgcggggcatgactatcgtcgccgcacttatgactgtcttctttatcatgcaactcgtaggacaggtgccggcagcgctctgggtcattttcggcgaggaccgctttcgctggagcgcgacgatgatcggcctgtcgcttgcggtattcggaatcttgcacgccctcgctcaagccttcgtcactggtcccgccaccaaacgtttcggcgagaagcaggccattatcgccggcatggcggccgacgcgctgggctacgtcttgctggcgttcgcgacgcgaggctggatggccttccccattatgattcttctcgcttccggcggcatcgggatgcccgcgttgcaggccatgctgtccaggcaggtagatgacgaccatcagggacagcttcaagggatcgctcgcggctcttaccagcctaacttcgatcattggaccgctgatcgtcacggcgattttatgccgcctcggcgagcacatggaacgggttggcatggatttaaccgggcatgttcatcatcagtaacccgtatcgtgagcatcctctctcgtttcatcggtatcattacccccatgaacagaaatcccccttacacggaggcatcagtgaccaaacaggaaaaaaccgcccttaacatggcccgctttatcagaagccagacattaacgcttctggagaaactcaacgagctggacgcggatgaacaggcagacatctgtgaatcgcttcacgaccacgctgatgagctttaccgcagctgcctcgcgcgtttcggtgatgacggaaacagctatgaccatgattacgccaagcttgcatgcctgcaggtcgaaggccgtggcggcggcacttttgcccatgaattgctcgctgtggagtacgcaggctggatttctcccgcgtttcggctgaaggtaaaccagacatttatcgactatcgaaccggaagattacaacctgctattccgcagagtctccctgaagctctccgtttggctgccgacctggcagagcaaaagcaacggctggagcaaaaaatgcttatggatgcacctaaagtcgaattcgctgaacgcgttgctaccgccagcggggttctaatcggcaactatgccaaagtgctcggcctgggccaaaactatctcttcacctggttgcgtgataacggaattctgatcgcaaccggtgaacgcaggaacgtccccaaacaagaatacatatctcgtgggtatttcacccttaaagaaaccgtgatcgatacaagcaatggaagcaggatttctttcacgactcgtataaccggcaaaggtcagcagtggctgatgaagcgattgcttgatgcaagaaaccgtgatcgatacaagcaatggaagcaggatttctttcacgactcgtataaccggcaaagcgccgggcatatcctgtcgcaatgtgcaaatctcgcggcaacaaccagtgaatacttcattcacaagcctcaccgcctgatcgcggcagaaactggttatagccaatcaaccgtcagattgttttcggcgatcaccgtgaacgtcgcgctaacctgtacccgtttacacccatcctttttggccttcgcacaacaagccaaaaatgcgctgattgaaagcaaattaaagatctcttcaacggcaaccaaggcaaaagcaaaggctgacaatctcgcgggtatccacggaagacgcactcaaaaacatgagttcaagcacaaagttgaggcggctgcgcggaaatatgcttacctgaagaacaagcgttcgcctgatattggcgggatatcaaacttcgataacctaccgcattgcatgacggtaaacgaagctcttaatgcgggtttagccaaaaataaagataacgaacaatggggtgcggttgctggcgcctatatcgccgacatcaccgatggggaagatcgggctcgccacttcgggctcatgagcgcttgtttcggcgtgggtatggtggcaggccccgtggccgggggactgttgggcgccatctccttgcatgcaccattccttgcggcggcggtgctcaacggcctcaacctactactgggctgcttcctaatgcaggagtcgcataagggagagcgtcgaggagaacttctaaagatcgtcgttttgccaggtgaccacgttggtcaagaaatcacagccgaagccattaaggttcttaaagctatttctgatgttcgttccaatgtcaagttcgatttcgaaaatcatttaattggtggtgctgctatcgacctgcaggggggggggggaaagccacgttgtgtctcaaaatctctgatgttacattgcacaagataa

SEQ ID NO: 154247 - DNA, 2637 bp, Homo sapiens
atgcccttgagagccttcaacccagtcagctccttccggtgggcgcggggcatgactatcgtcgccgcacttatgactgtcttctttatcatgcaactcgtaggacaggtgccggcagcgctctgggtcattttcggcgaggaccgctttcgctggagcgcgacgatgatcggcctgtcgcttgcggtattcggaatcttgcacgccctcgctcaagccttcgtcactggtcccgccaccaaacgtttcggcgagaagcaggccattatcgccggcatggcggccgacgcgctgggctacgtcttgctggcgttcgcgacgcgaggctggatggccttccccattatgattcttctcgcttccggcggcatcgggatgcccgcgttgcaggccatgctgtccaggcaggtagatgacgaccatcagggacagcttcaaggatcgctcgcggctcttaccagcctaacttcgatcattggaccgctgatcgtcacggcgatttatgccgcctcggcgagcacatggaacgggatgctgctggctaccctgtggaacacctacatctgtattaacgaagcgctggcattgaccctgagtgatttttctctggtcccgccgcatccataccgccagttgtttaccctcacaacgttccataaccgggcatgttcatcatcagtaacccgtatcgtgagcatcctctctcgtttcatcggtatcattacccccatgaacagaaatcccccttacacggaggcatcagtgaccaaacaggaaaaaaccgcccttaacatggcccgctttatcagaagccagacattaacgcttctggagaaactcaacgagctggacgcggatgaacaggcagacatctgtgaatcgcttcacgaccacgctgatgagctttaccgcagctgcctcgcgcgtttcggtgatgacggaaacagctatgaccatgattacgccaagcttgcatgcctgcaggtcgaaggccgtggcggcggcacttttgcccatgaattgctcgctgtggagtacgcaggctggatttctcccgcgtttcggctgaaggtaaaccagacatttatcgactatcgaaccggaagattacaacctgctattccgcagagtctccctgaagctctccgtttggctgccgacctggcagagcaaaagcaacggctggagcaaaaaatgcttatggatgcacctaaagtcgaattcgctgaacgcgttgctaccgccagcggggttctaatcggcaactatgccaaagtgctcggcctgggccaaaactatctcttcacctggttgcgtgataacggaattctgatcgcaaccggtgaacgcaggaacgtccccaaacaagaatacatatctcgtgggtatttcacccttaaagaaaccgtgatcgatacaagcaatggaagcaggatttctttcacgactcgtataaccggcaaaggtcagcagtggctgatgaagcgattgcttgatgcaagaaaccgtgatcgatacaagcaatggaagcaggatttctttcacgactcgtataaccggcaaagcgccgggcatatcctgtcgcaatgtgcaaatctcgcggcaacaaccagtgaatacttcattcacaagcctcaccgcctgatcgcggcagaaactggttatagccaatcaaccgtcgttcgtgcattccgtgaagctgtaaacaaaggaattctgtctgtagagattgttatcggcgatcaccgtgaacgtcgcgctaacctgtaccggtttacaccatcctttttggccttcgcacaacaagccaaaaatgcgctgatagaaagcaaattaaagatctcttcagcggcaaccaaggatgacgtggcaataaagaataagaagtcacaagttaaaaaaacaaaaagatcagtttccggcggtgccggaacaaccagcctcaaaaaattgacttcatggatcgctaaggcaaaagcaaaggctgacaatctgcggttatccaaaaaacgcactcaaaaacatgagttcaagcagaaagtagaggcggctgcgcggaaatatgcttacctgaagaacaagcgttcgcctgatattggcgggatatcaaacttcgataacctaccgcattgcatgacgatcctctacgccggacgcatcgtggccggcatcaccggcgccacaggtgcggttgctggcgcctatatcgccgacatcaccgatggggaagatcgggctcgccacttcgggctcatgagcgcttgtttcggcgtgggtatggtggcaggccccgtggccgggggactgttgggcgccatctccttgcatgcaccattccttgcggcggcggtgctcaacggcctcaacctactactgggctgcttcctaatgcaggagtcgcataagggagagcgtcgaggagaacttctaaagatcgtcgttttgccaggtgaccacgttggtcaagaaatcacagccgaagccattaaggttcttaaagctatttctgatgttcgttccaatgtcaagttcgatttcgaaaatcatttaattggtggtgctgctatcgacctgcaggggggggggggaaagccacgttgtgtctcaaaatctctgatgttacattgcacaagataa

SEQ ID NO: 154248 - DNA, 5091 bp, Homo sapiens
gaattcttacacttagttaaattgctaattttatagattacaaaacttaggaaatcgatctggatgcagggaaacaaagtggtgctgggcaaaaaaggggatacagtggaactgacctgtacagcttcccagaagaagagcatacaattccactggaaaaactccaaccagataaagattctgggaaatcagggctccttcttaactaaaggtccatccaagctgaatgatcgcgctgactcaagaagaagcttgtgggaccaaggaaactttcccctgatcatcaagaatcttaagatagaagactcagatacttacatctgtgaagtggaggaccagaaggaggaggtgcaattgctagtgttcggattgactgccaactctgacacccacctgcttcaggggcagagcctgaccctgaccttggagagcccccctggtagtagcccctcagtgcaatgtaggagtccaaggggtaaaaacatacagggggggaagaccctctccgtgtctcagctggagctccaggatagtggcacctggacatgcactgtcttgcagaaccagaagaaggtggagttcaaaatagacatcgtcgtgctagctttccagaaggcctccagcatagtctataagaaagagggggaacaggtggagttctccttcccactcgcctttacagttgaaaagctgacgggcagtggcgagctgtggtggcaggcggagagggcttcctcctccaagtcttggatcacctttgacctgaagaacaaggaagtgtctgtaaaacgggttacccaggaccctaagctccagatgggcaagaagctcccgctccacctcaccctgccccaggccttgcctcagtatgctggctctggaaacctcaccctggcccttgaagcgaaaacaggaaagttgcatcaggaagtgaacctggtggtgatgagagccactcagctccagaaaaatttgacctgtgaggtgtggggacccacctcccctaagctgatgctgagtttgaaactggagaacaaggaggcaaaggtctcgaagcgggagaaggcggtgtgggtgctgaaccctgaggcggggatgtggcagtgtctgctgagtgactcgggacaggtcctgctggaatccaacatcaaggttctgcccacatggtcgaccccggtgcagccaatgtgagatcctgcagcccagcttggggaccctagaggtccccttttttattttgaattgggagatcccaattctcatgtttgacagcttatcatcgataagctagctttaatgcggtagtttatcacagttaaattgctaacgcagtcaggcaccgtgtatgaaatctaacaatgcgctcatcgtcatcctcggcaccgtcaccctggatgctgtaggcataggcttggttatgccggtactgccgggcctcttgcgggatatcgtccattccgacagcatcgccagtcactatggcgtgctgctagcgctatatgcgttgatgcaatttctatgcgcacccgttctcggagcactgtccgaccgctttggccgccgcccagtcctgctcgcttcgctacttggagccactatcgactacgcgatcatggcgaccacacccgtcctgtggattctctacgccggacgcatcgtggccggcatcaccggcgccacaggtgcggttgctggcgcctatatcgccgacatcaccgatggggaagatcgggctcgccacttcgggctcatgagcgcttgtttcggcgtgggtatggtggcaggccccgtggccgggggactgttgggcgccatctccttgcacgcaccattccttgcggcggcggtgctcaacggcctcaacctactactgggctgcttcctaatgcaggagtcgcataagggagagcgtcgtccgatgcccttgagagccttcaacccagtcagctccttccggtgggcgcggggcatgactatcgtcgccgcacttatgactgtcttctttatcatgcaactcgtaggacaggtgccggcagcgctctgggtcattttcggcgaggaccgctttcgctggagcgcgacgatgatcggcctgtcgcttgcggtattcggaatgttgcacgccctcgctcaagccttcgtcactggtcccgccaccaaacgtttcggcgagaagcaggccattatcgccggcatggcggccgacgcgctgggctacgtcttgctggcgttcgcgacgcgaggctggatggccttccccattatgattcttctcgcttccggcggcatcgggatgcccgcgttgcaggccatgctgtccaggcaggtagatgacgaccatcagggacagcttcaaggatcgctcgcggctcttaccagcctaacttcgatcactggaccgctgatcgtcacggcgatttatgccgcctcggcgagcacatggaacgggttggcatggattgtaggcgccgccctataccttgtctgcctccccgcgttgcgtcgcggtgcatggagccgggccacctcgacctgaatggaagccggcggcacctcgctaacggattcaccactccaagaattggagccaatcaattcttgcggagaactgtgaatgcgcaaaccaacccttggcagaacatatccatcgcgtccgccatctccagcagccgcacgcggcgcatctcgggggatgatcagctgcctcgcgcgtttcggtgatgacggtgaaaacctctgacacatgcagctcccggagacggtcacagcttgtctgtaagcggatgccgggagcagacaagcccgtcagggcgcgtgagcgggtgttggcgggtgtcggggcgcagccatgacccagtcacgtagcgatagcggagtgtatactggcttaactatgcggcatcagagcagattgtactgagagtgcaccatatgcggtgtgaaataccgcacagatgcgtaaggagaaaataccgcatcaggcgctcttccgcttcctcgctcactgactcgctgcgctcggtcgttcggctgcggcgagcggtatcagctcactcaaaggcggtaatacggttatccacagaatcaggggataacgcaggaaagaacatgtgagcaaaaggccagcaaaaggccaggaaccgtaaaaaggccgcgttgctggcgtttttccataggctccgcccccctgacgagcatcacaaaaatcgacgctcaagtcagaggtggcgaaacccgacaggactataaagataccaggcgtttccccctggaagctccctcgtgcgctctcctgttccgaccctgccgcttaccggatacctgtccgcctttctcccttcgggaagcgtggcgctttctcaatgctcacgctgtaggtatctcagttcggtgtaggtcgttcgctccaagctgggctgtgtgcacgaaccccccgttcagcccgaccgctgcgccttatccggtaactatcgtcttgagtccaacccggtaagacacgacttatcgccactggcagcagccactggtaacaggattagcagagcgaggtatgtaggcggtgctacagagttcttgaagtggtggcctaactacggctacactagaaggacagtatttggtatctgcgctctgctgaagccagttaccttcggaaaaagagttggtagctcttgatccggcaaacaaaccaccgctggtagcggtggtttttttgtttgcaagcagcagattacgcgcagaaaaaaaggatctcaagaagatcctttgatcttttctacggggtctgacgctcagtggaacgaaaactcacgttaagggattttggtcatgagattatcaaaaaggatcttcacctagatccttttcagatctcccgatctttagctgtcttggtttgcccaaagcgcattgcataatctttcagggttatgcgttgttccatacaacctccttagtacatgcaaccattatcaccgccagaggtaaaatagtcaacacgcacggtgttagatatttatcccttgcggtgatagatttaacgtatgagcacaaaaaagaaaccattaacacaagagcagcttgaggacgcacgtcgccttaaagcaatttatgaaaaaaagaaaaatgaacttggcttatcccaggaatctgtcgcagacaagatggggatggggcagtcaggcgttggtgctttatttaatggcatcaatgcattaaatgcttataacgccgcattgcttacaaaaattctcaaagttagcgttgaagaatttagcccttcaatcgccagagaaatctacgagatgtatgaagcggttagtatgcagccgtcacttagaagtgagtatgagtaccctgttttttctcatgttcaggcagggatgttctcacctaagcttagaacctttaccaaaggtgatgcggagagatgggtaagcacaaccaaaaaagccagtgattctgcattctggcttgaggttgaaggtaattccatgaccgcaccaacaggctccaagccaagctttcctgacggaatgttaattctcgttgaccctgagcaggctgttgagccaggtgatttctgcatagccagacttgggggtgatgagtttaccttcaagaaactaattagggatagcggtcaggtgtttttacaaccactaaacccacagtacccaatgatcccatgcaatgagagttgttccgttgtggggaaagttatcgctagtcagtggcctgaagagacgtttggctgatcggcaaggtgttctggtcggcgcatagctgataacaattgagcaagaatcttcatcggggctgcagcccacgatgcgtccggcgtagaggatctctcacctaccaaacaatgcccccctgcaaaaaataaattcatataaaaaacatacagataaccatctgcggtgataaattatctctggcggtgttgacataaataccactggcggtgatactgagcacatcagcaggacgcactgaccaccatgaaggtgacgctcttaaaattaagccctgaagaagggcagcattcaaagcagaaggctttggggtgtgtgatacgaaacgaagcat

SEQ ID NO: 154249 - DNA, 2100 bp, Homo sapiens
atgagcgccgccccctgctccacggtgccaagtcccatcgaccacccaagggctgaggagtgtgggcacacagcgcgggactggcaggtagctccacctgcagcccagagccatgatgatgatgaggaggaggaggaggacgagaaggaggaggaggaggaggaggaggagttgttgttagctggctccccatattctcccactgtcccgtgttttccgctggagtgcccctgccttgagaatgggagccggcagaagcaggacaagcacacgccgggctttaagcacaagtttcaacacgcattctttttctccttccccctcgcaactataacccattccttttgggtagccgagcacagcttgaggttagaaggaaaacaaggtgcccagatatctccacacctccaagtgggacctggtctggtctggcagggctacctgtggcagaacagggaagctgggagcagcagagatagccacctaaacatgccatgtggtatggctgcaggtcattctcactctgggacactcttctctgaccagggcctgtgggagcagtgccagcttctgaagagcacctcggtgtttgcccgctgccaccctctggtggaccccgagccttttgtggccctgtgtgagaagactttgtgtgagtgtgctggggggctggagtgcgcctgccctgccctcctggagtacgcccggacctgtgcccaggagggaatggtgctgtacggctggaccgaccacagcgcgtgcagcccagtgtgccctgctggtatggagtataggcagtgtgtgtccccttgcgccaggacctgccagagcctgcacatcaatgaaatgtgtcaggagcgatgcgtggatggctgcagctgccctgagggacagctcctggatgaaggcctctgcgtggagagcaccgagtgtccctgcgtgcattccggaaagcgctaccctcccggcacctccctctctcgagactgcaacacctgcatttgccgaaacagccagtggatctgcagcaatgaagaatgtccagacagggagggccacaactcaaggcagcgagaagttgccctctctgcacaggttggctgcaaccacgtgaccccagctctggtttcaggacaggtgccggcagcgctctgggtcattttcggcgaggaccgctttcgctggagcgcgacgatgatcggcctgtcgcttgcggtattcggaatcttgcacgccctcgctcaagccttcgtcactggtcccgccaccaaacgtttcggcgagaagcaggccattatcgccggcatggcggccgacgcgctgggctacgtcttgctggcgttcgcgacgcgaggctggatggccttccccattatgattcttctcgcttccggcggcatcgggatgcccgcgttgcaggccatgctgtccaggcagcctaacttcgatcattggaccgctgatcgtcacggcgatttatgccgcctcggcgagcacatggaacgggttggcatggattgtaggcgccgccctataccttgtctgcctccccgcgttgcgtcgcggtgcatggagccgggccacctcgacctgaatggaagccggcggcacctcgctaacggattcaccactccaagaattggagccaatcaattcttgcggagaactgtgaatgcgcaaaccaacccttggcagaacatatccatcgcgtccgccatctccagcagccgcacgcggcgcatctcgggcagcgttgggtcctggccacgggtgcgcatgatcgtgctcctgtcgttgaggacccggctaggctggcggggttgccttactgcgaacgtgaagcgactgctgctgcaaaacgtctgcgacctgagcaacaacatgaatggtcttcggtttccgtgtttcgtaaagtctggaaacgcggaagtcagcgccctgcaccattatgttccggatctgcatcgcaggatgctgctggctaccctgtggaacacctacatctgtattaacgaagcgctggcattgaccctgagtgatttttctctggtcccgccgcatccataccgccagttgtttaccctcacaacgttccagtaa

SEQ ID NO: 154250 - DNA, 3314 bp, Homo sapiens
gaacgtctccaacagcgactggtcccgcgctcgtgtgctaccgcgccagtttagtcgcactgcgcgaggaagacaccaggtcccaggagtatgttcccttccgtggcaatagggactttgcacacgtgaagaagatgggcgggcttgggcttctggccatggacgtgcccgaggagcttggcggtgctggcctcgattacctggcctacgccatcgccatggaggagatcagccgtggctgcgcctccaccggagtcatcatgagtgtcaacaactctctctacctggggcccatcttgaagtttggctccaaggagcagaagcaggcgtgggtcacgcctttcaccagtggtgacaaaattggctgctttgccctcagcggaaccagagccttcaacccagtcagctccttccggtgggcgcggggcatgactatcgtcgccgcacttatgactgtcttctttatcatgcaactcgtaggacaggtgccggcagcgctctgggtcattttcggcgaggaccgctttcgctggagcgcgacgatgatcggcctgtcgcttgcggtattcggaatcttgcacgccctcgctcaagccttcgtcactggtcccgccaccaaacgtttcggcgagaagcaggccattatcgccggcatggcggccgacgcgctgggctacgtcttgctggcgttcgcgacgcgaggctggatggccttccccattatgattcttctcgcttccggcggcatcgggatgcccgcgttgcaggccatgctgtccaggcaggtagatgacgaccatcagggacagcttcaaggatcgctcgcggctcttaccagcctaacttcgatcattggaccgctgatcgtcacggcgatttatgccgcctcggcgagcacatggaacgggttggcatggattgtaggcgccgccctataccttgtctgcctccccgcgtttgcgtcgcggtgcatggagccgggccacctcgacctgaatggaagccggcggcacctcgctaacggattcaccactccaagaattggagccaatcaattcttgcggagaactgtgaatgcgcaaaccaacccttggcagaacatatccatcgcgtccgccatctccagcagccgcacgcggcgcatctcgggcagcgttgggtcctggccacgggtgcgcatgatcgtgctcctgtcgttgaggacccggctaggctggcggggttgccttactgcgaacgtgaagcgactgctgctgcaaaacgtctgcgacctgagcaacaacatgaatggtcttcggtttccgtgtttcgtaaagtctggaaacgcggaagtcagcgccctgcaccattatgttccggatctgcatcgcaggatgctgctggctaccctgtggaacacctacatctgtattaacgaagcgctggcattgaccctgagtgatttttctctggtcccgccgcatccataccgccagttgtttaccctcacaacgttccataaccgggcatgttcatcatcagtaacccgtatcgtgagcatcctctctcgtttcatcggtatcattacccccatgaacagaaatcccccttacacggaggcatcagtgaccaaacaggaaaaaaccgcccttaacatggcccgctttatcagaagccagacattaacgcttctggagaaactcaacgagctggacgcggatgaacaggcagacatctgtgaatcgcttcacgaccacgctgatgagctttaccgcagctgcctcgcgcgtttcggtgatgacggtgaaaactctgacacatgcagctcccggagacggtcacagcttgtctgtaagcggatgccgggagcagacaagcccgtcgaaggccgtggcggcggcacttttgcccatgaattgctcgctgtggagtacgcaggctggatttctcccgcgtttcggctgaaggtaaaccagacatttatcgactatcgaaccggaagattacaacctgctattccgcagagtctccctgaagctctccgtttggctgccgacctggcagagcaaaagcaacggctggagcaaaaaatgcttatggatgcacctaaagtcgaattgctgaacgcgttgctaccgccagcgggcgccgggcatatcctgtcgcaatgtgcaaatctcgcggcaacaaccagtgaatacttcattcacaagcctcaccgcctgatcgcggcagaaactggttatagccaatcaaccgtcgttcgtgcattccgtgaagctgtaaacaaaggaattctgtctgtagagattgttatcggcgatcaccgtgaacgtcgcgctaacctgtaccggtttacaccatcctttttggccttcgcacaacaagccaaaaatgcgctgatagaaagcaaattaaagatctcttcagcggcaaccaagatcctctacgccggacgcatcgtggccggcatcaccggcgccacaggtgcggttgctggcgcctatatcgccgacatcaccgatggggaagatcgggctcgccacttcgggctcatgagcgcttgtttcggcgtgggtgaccacgttggtcaagaaatcacagccgaagccattaaggttcttaaagctatttctgatgttcgttccaatgtcaagttcgatttcgaaaatcatttaattggtggtgctgctatcgacctgcaggggggggggggaaagccacgtgcgacaatctatcgattgtatgggaagcccgatgcgccagagttgtttctgaaacatggcaaaggtagcgttgccaatgatgttacagatgagatggtcagactaaactggctgacggaatttatgcctcttccgaccatcaagcattttatccgtactcctgatgatgcatggttactcaccactgcgatccccgggaaaacagcattccaggtattagaagaatatcctgattcaggtgaaaatattgttgatgcgctggcagtgttcctgcgccggttgcattcgattcctgtttgtaattgtccttttaacagcgatcgcgcgcaatcacgaatgaataacggtttggttgatgcgagtgattttgatgacgagcgtaatggctggcctgttgaacaagtctggaaagaaatgcataagcttttgccattctcaccggattcagtcgtcactcatggtgatttctcacttgataaccttatttttgacgaggggaaattaataggttgtattgatgttggacgagtcggaatcgcagaccgataccaggatcttgccatcctatggaactgcctcgaaacggctttttcaaaaatatggtattga

SEQ ID NO: 154251 - DNA, 2919 bp, Homo sapiens
  misc_feature (1)...(2919): n = a,t,c or g
atgcccttgagagccttcaacccagtcagctccttccggtgggcgcggggcatgactatcgtcgccgcacttatgactgtcttctttatcatgcaactcgtaggacaggtgccggcagcgctctgggtcattttcggcgaggaccgctttcgctggagcgcgacgatgatcggcctgtcgcttgcggtattcggaatcttgcacgccctcgctcaagccttcgtcactggtcccgccaccaaacgtttcggcgagaagcaggccattatcgccggcatggcggccgacgcgctgggctacgtcttgctggcgttcgcgacgcgaggctggatggccttccccattatgattcttctcgcttccggcggcatcgggatgcccgcgttgcaggccatgctgtccaggcaggtagatgacgaccatcagggacagcttcaaggatcgctcgcggctcttaccagcctaacttcgatcattggaccgctgatcgtcacggcgatttatgccgcctcggcgagcacatggaacgggttggcatggattgtaggcgccgccctataccttgtctgcctccccgcgtttgcgtcgcggtgcatggagccgggccacctcgacctgaatggaagccggcggcacctcgctaacggattcaccactccaagaattggagccaatcaattcttgcggagaactgtgaatgcgcaaaccaacccttggcagaacatatccatcgcgtccgccatctccagcagccgcacgcggcgcatctcgggcagcgttgggtcctggccacgggtgcgcatgatcgtgctcctgtcgttgaggacccggctaggctggcggggttgccttactgcgaacgtgaagcgactgctgctgcaaaacgtctgcgacctgagcaacaacatgaatggtcttcggtttccgtgtttcgtaaagtctggaaacgcggaagtcagcgccctgcaccattatgttccggatctgcatcgcaggatgctgctggctaccctgtggaacacctacatctgtattaacgaagcgctggcattgaccctgagtgatttttctctggtcccgccgcatccataccgccagttgtttaccctcacaacgttccataaccgggcatgttcatcatcagtaacccgtatcgtgagcatcctctctcgtttcatcggtatcattacccccatgaacagaaatcccccttacacggaggcatcagtgaccaaacaggaaaaaaccgcccttaacatggcccgctttatcagaagccagacattaacgcttctggagaaactcaacgagctggacgcggatgaacaggcagacatctgtgaatcgcttcacgaccacgctgatgagctttaccgcagctgcctcgcgcgtttcggtgatgacggtgaaaactctgacacatgcagctcccggagacggtcacagcttgtctgtaagcggatgccgggagcagacaagcccacatttatcgactatcgaaccggaagattacaacctgctattccgcagagtctccctgaagctctccgtttggctgccgacctggcagagcaaaagcaacggctggagcaaaaaatgcttatggatgcacctaaagtcgaattnnntgaacgcgttgctaccgccagcggggttctaatcggcaactatgccaaagtgctcggcctgggccaaaactatctcttcacctggttgcgtgataacggaattctgatcgcaaccggtgaacgcaggaacgtccccaaacaagaatacatatctcgtgggtatttcacccttaaagaaaccgtgatcgatacaagcaatggaagcaggatttctttcacgactcgtataaccggcaaaggtgcggttgctggcgcctatatcgccgacatcaccgatggggaagatcgggctcgccacttcgggctcatgagcgcttgtttcggcgtgggtatggtggcaggccccgtggccgggggactgttgggcgccatctccttgcatgcaccattccttgcggcggcggtgctcaacggcctcaacctactactgggctgcttcctaatgcaggagtcgcataagggagagcgtcgaggagaacttctaggatataccattctaatgtctgcccctaagaagatcgtcgttttgccaggtgaccacgttggtcaagaaatcacagccgaagccattaaggttcttaaagctatttctgatgttcgttccaatgtcaagttcgatttcgaaaatcatttaattggtggtgctgctatcgacctgcaggggggggggggaaagccacgtgcgacaatctatcgattgtatgggaagcccgatgcgccagagttgtttctgaaacatggcaaaggtagcgttgccaatgatgttacagatgagatggtcagactaaactggctgacggaatttatgcctcttccgaccatcaagcattttatccgtactcctgatgatgcatggttactcaccactgcgatccccgggaaaacagcattccaggtattagaagaatatcctgattcaggtgaaaatattgttgatgcgctggcagtgttcctgcgccggttgcattcgattcctgtttgtaattgtccttttaacagcgatcgcgcgcaatcacgaatgaataacggtttggttgatgcgagtgattttgatgacgagcgtaatggctggcctgttgaacaagtctggaaagaaatgcataagcttttgccattctcaccggattcagtcgtcactcatggtgatttctcacttgataaccttatttttgacgaggggaaattaataggttgtattgatgttggacgagtcggaatcgcagaccgataccaggatcttgccatcctatggaactgcctcgaaacggctttttcaaaaatatggtattga

SEQ ID NO: 154252 - DNA, 2823 bp, Homo sapiens; identical to SEQ ID NO: 124529

SEQ ID NO: 154253 - DNA, 2106 bp, Homo sapiens
atgacgatgtgggtactacattgcgcattcacctactttgtgagcgcatggtcgaagcatggatatgcgcatgctgtgactgccaagatcctctacgccggacgcatcgtggccggcatcaccggcgccacaggtgcggttgctggcgcctatatcgccgacatcaccgatggggaagatcgggctcgccacttcgggctcatgagcgcttgtttcggcgtgggtatggtggcaggccccgtggccgggggactgttgggcgccatctccttgcatgcaccattccttgcggcggcggtgctcaacggcctcaacctactactgggctgcttcctaatgcaggagtcgcataagggagagcgtcgaccgatgcccttgagagccttcaacccagtcagctccttccggtgggcgcggggcatgactatcgtcgccgcacttatgactgtcttctttatcatgcaactcgtaggacaggtgccggcagcgctctgggtcattttcggcgaggaccgctttcgctggagcgcgacgatgatcggcctgtcgcttgcggtattcggaatcttgcacgccctcgctcaagccttcgtcactggtcccgccaccaaacgtttcggcgagaagcaggccattatcgccggcatggcggccgacgcgctgggctacgtcttgctggcgttcgcgacgcgaggctggatggccttccccattatgattcttctcgcttccggcggcatcgggatgcccgcgttgcaggccatgctgtccaggcagcctaacttcgatcattggaccgctgatcgtcacggcgatttatgccgcctcggcgagcacatggaacgggttggcatggattgtaggcgccgccctataccttgtctgcctccccgcgttgcgtcgcggtgcatggagccgggccacctcgacctgaatggaagccggcggcacctcgctaacggattcaccactccaagaattggagccaatcaattcttgcggagaactgtgaatgcgcaaaccaacccttggcagaacatatccatcgcgtccgccatctccagcagccgcacgcggcgcatctcgggcagcgttgggtcctgcagatccggctgtggaatcttcacgctgccgcaagcactcagggcgcaagggctgctaaaggaagcggaacacgtagaaagccagtccgcagaaacggtgctgaccccggatgaatgtcagctactgggctatctggacaagggaaaacgcaagcgcaaagagaaagcaggtagcttgcagtgggcttacatggcgatagctagactgggcggttttatggacagcaagcgaaccggaattgccagctggggcgccctctggctattcggctatgactgggcacaacagacaatcggctgctctgatgccgccgtgttccggctgtcagcgcaggggcgcccggttctttttgtcaagaccgacctgtccggtgccctgaatgaactgcaggacgaggcagcgcggctatcgtggctggccacgacgggcgttccttgcgcagctgtgctcgacgttgtcactgaagcgggaagggactggctgctattgggcgaagtgccggggcaggatctcctgtcatctcaccttgctcctgccgagaaagtatccatcatggctgatgcaatgcggcggctgcatacgcttgatccggctacctgcccattcgaccaccaagcgaaacatcgcatcgagcgagcacgtactcggatggaagccggtcttgtcgatcaggatgatctggacgaagagcatcaggggctcgcgccagccgaactgttcgccaggctcaaggcgcgcatgcccgacggcgaggatctcgtcgtgacccatggcgatgcctgcttgccgaatatcatggtggaaaatggccgcttttctggattcatcgactgtggccggctgggtgtggcggaccgctatcaggacatagcgttggctacccgtgatattgctgaagagcttggcggcgaatgggctgaccgcttcctcgtgctttacggtatcgccgctcccgattcgcagcgcatcgccttctatcgccttcttgacgagttcttctga

SEQ ID NO: 154254 - DNA, 7038 bp, Homo sapiens; identical to SEQ ID NO: 153636

SEQ ID NO: 154255 - DNA, 2301 bp, Homo sapiens
atggctacaaatatggaggggctggttcagcacagagtggggacccagcaggtggctgagaactttaaaacgtttcatgccaagtggcctaacctgggtatcggcacgattaatgtcgtatgtgctgctgatgtgctgattgttcccacgcctgctgagttttctgactacacctccgcactgcagtttttcgatatgcttcgtgatctgctcaagaacgttgatcttaaagggttcgagcctgataaccggtttacgcagtttcggcttagtgaaacaaaagaaatcaccaatccgtatgccatgcgtttatacgaatccctgtgtcagtatcgtaagccggatggctcaggcatcgtctctctgaaaatcgactggatcatagagcgttaccagctgcctcaaagttaccagcgtatgcctgactttctgccgccgcttcctgcaggtgcactgagcctcatctccaaagtcacagaccgtgccaacgacagcatggagcaaggggctgaaacaagccagggagctctgggcacactggcaaatgtagtgacctcccttgccaacctaagtgaatctttgaacaacggtgacacttcagaaatccagccagaggaccagtctgcaagtgagataactcgggcatttgataccttagctaaagcacttaataccacagacagctcctcttctccaagcttggcagatgggatagacaccagtggaggagggagcatccacgtcatcagcagagaccagtcgacacccatcattgaggttgaaggccccctcctttcagacacacacgtcacatttaagtcaattcgggaggatcgaaacggcagatcgcaaaaaacagtacatacagaaggagacatgaacatgaacatcaaaaaaattgtaaaacaagccacagttctgacttttacgactgcacttctggcaggaggagcgactcaagccttcgcgaaagaaaataaccaaaaagcatacaaagaaacgtacggcgtctctcatattacacgccatgatatgctgcagatccctaaacagcagcaaaacgaaaaataccaagtgcctcaattcgatcaatcaacgattaaaaatattgagtctgcaaaaggacttgatgtgtgggacagctggccgctgcaaaacgctgacggaacagtagctgaatacaacggctatcacgttgtgtttgctcttgcgggaagcccgaaagacgctgatgacacatcaatctacatgttttatcaaaaggtcggcgacaactcaatcgacagctggaaaaacgcgggccgtgtctttaaagacagcgataagttcgacgccaacgatccgatcctgaaagatcagacgcaagaatggtccggttctgcaacctttacatctgacggaaaaatccgtttattctacactgactattccggtaaacattacggcaaacaaagcctgacaacagcgcaggtaaatgtgtcaaaatctgatgacacactcaaaatcaacggagtggaagatcacaaaacgatttttgacggagacggaaaaacatatcagaacgttcagcagtttatcgatgaaggcaattatacatccggcgacaaccatacgctgagagaccctcactacgttgaagacaaaggccataaataccttgtattcgaagccaacacgggaacagaaaacggataccaaggcgaagaatctttatttaacaaagcgtactacggcggcggcacgaacttcttccgtaaagaaagccagaagcttcagcagagcgctaaaaaacgcgatgctgagttagcgaacggcgccctcggtatcatagagttaaataatgattacacattgaaaaaagtaatgaagccgctgatcacttcaaacacggtaactgatgaaatcgagcgcgcgaatgttttcaaaatgaacggcaaatggtacttgttcactgattcacgcggttcaaaaatgacgatcgatggtattaactcaaacgatatttacatgcttggttatgtatcaaactctttaaccggcccttacaagccgctgaacaaaacagggcttgtgctgcaaatgggtcttgatccaaacgatgtgacattcacttactctcacttcgcagtgccgcaagccaaaggcaacaatgtggttatcacaagctacatgacaaacagaggcttcttcgaggataaaaaggcaacatttgcgccaagcttcttaatgaacatcaaaggcaataaaacatccgttgtcaaaaacagcatcctggagcaaggacagctgacagtcaactaa

SEQ ID NO: 154256 - DNA, 2607 bp, Homo sapiens; identical to SEQ ID NO: 124533

SEQ ID NO: 154257 - DNA, 2076 bp, Homo sapiens
atgaacatgaacatcaaaaaaattgtaaaacaagccacagttctgacttttacgactgcacttctggcaggaggagcgactcaagccttcgcgaaagaaaataaccaaaaagcatacaaagaaacgtacggcgtctctcatattacacgccatgatatgctgcagatccctaaacagcagcaaaacgaaaaataccaagtgcctcaattcgatcaatcaacgattaaaaatattgagtctgcaaaaggacttgatgtgtgggacagctggccgctgcaaaacgctgacggaacagtagctgaatacaacggctatcacgttgtgtttgctcttgcgggaagcccgaaagacgctgatgacacatcaatctacatgttttatcaaaaggtcggcgacaactcaatcgacagctggaaaaacgcgggccgtgtctttaaagacagcgataagttcgacgccaacgatccgatcctgaaagatcagacgcaagaatggtccggttctgcaacctttacatctgacggaaaaatccgtttattctacactgactattccggtaaacattacggcaaacaaagcctgacaacagcgcagtcaattcgggaagaccgaaacggcagatcgcaaaaaacagtacatacagaacgagacatgatcatgaacatcaaaaaaattgtaaaacaagccacagttctgacttttacgactgcacttctggcaggaggagcgactcatgccttcgcgaaagaaaataaccaaaaagcatacaaagaaacgtacggcgtctctcatattacacgccatgatatgctgcagatccctaaacagcagcaaaacgaaaaataccaagtgcctcaattcgatcaatcaacgattaaaaatattgagtctgcaaaaggacttgatgtgtgggacagctggccgctgcaaaacgctgacggaacagtagctgaatacaacggctatcacgttgtgtttgctcttgcgggaagcccgaaagacgctgatgacacatcaatctacatgttttatcaaaaggtcggcgacaactcaatcgacagctggaaaaacgcgggccgtgtctttaaagacagcgataagttcgacgccaacgatccgatcctgaaagatcagacgcaagaatggtccggttctgcaacctttacatctgacggaaaaatccgtttattctacactgactattccggtaaacattacggcaaacaaagcctgacaacagcgcaggtaaatgtgtcaaaatctgatgacacactcaaaatcaacggagtggaagatcacaaaacgatttttgacggagacggaaaaacatatcagaacgttcagcagtttatcgatgaaggcaattatacatccggcgacaaccatacgctgagagaccctcactacgttgaagacaaaggccataaataccttgtattcgaagccaacacgggaacagaaaacggataccaaggcgaagaatctttatttaacaaagcgtactacggcggcggcacgaacttcttccgtaaagaaagccagaagcttcagcagagcgctaaaaaacgcgatgctgagttagcgaacggcgccctcggtatcatagagttaaataatgattacacattgaaaaaagtaatgaagccgctgatcacttcaaacacggtaactgatgaaatcgagcgcgcgaatgttttcaaaatgaacggcaaatggtacttgttcactgattcacgcggttcaaaaatgacgatcgatggtattaactcaaacgatatttacatgcttggttatgtatcaaactctttaaccggcccttacaagccgctgaacaaaacagggcttgtgctgcaaatgggtcttgatccaaacgatgtgacattcacttactctcacttcgcagtgccgcaagccaaaggcaacaatgtggttatcacaagctacatgacaaacagaggcttcttcgaggataaaaaggcaacatttgcgccaagcttcttaatgaacatcaaaggcaataaaacatccgttgtcaaaaacagcatcctggagcaaggacagctgacagtcaactaa

SEQ ID NO: 154258 - DNA, 3606 bp, Homo sapiens
atgaaactcatggaaacacttaaccagtgcataaacgctggtcatgaaatgacgaaggctatcgccattgcacagtttaatgatgacagcccggaagcgaggaaaataacccggcgctggagaataggtgaagcagcggatttagttggggtttcttctcaggctatcagagatgccgagaaagcagggcgactaccgcacccggatatggaaattcgaggacgggttgagcaacgtgttggttatacaattgaacaaattaatcatatgcgtgatgtgtttggtacgcgattgcgacgtgctgaagacgtatttccaccggtgatcggggttgctgcccataaaggtggcgtttacaaaacctcagtttctgttcatcttgctcaggatctggctctgaaggggctacgtgttttgctcgtggaaggtaacgacccccagggaacagcctcaatgtatcacggatgggtaccagatcttcatattcatgcagaagacactctcctgcctttctatcttggggaaaaggacgatgtcacttatgcaataaagcccacttgctggccggggcttgacattattccttcctgtctggctctgcaccgtattgaaactgagttaatgggcaaatttgatgaaggtaaactgcccaccgatccacacctgatgctccgactggccattgaaactgttgctcatgactatgatgtcatagttattgacagcgcgcctaacctgggtatcggcacgattaatgtcgtatgtgctgctgatgtgctgattgttcccacgcctgctgagttgtttgactacacctccgcactgcagtttttcgatatgcttcgtgatctgctcaagaacgttgatcttaaagggttcgagcctgatgcagaagaaattgccaaattccttggattagataaaagaaacttcaaggcaacaagaggttccgccacacttcaccactggcagcagttggcccaacctcaccttgggggcatcctggacccccggcccggtgtggtcaccaagggcttccggacgctggatgttgacctggacgaagtgtactgccttaacgactttgaagaagatgacacagctacctccactccagttcagcacccagagacctcaggtgagaggtcccaagcacgtgtgactgtctcaggcagcagaagttacccgagccggcctcaggcttccccagaggagatgcaggagccgccagcggccacggaggaggaggaggaggaggaggaggaggaggggtctgttttatgtgctgaaagagttggccagatgactaagacatataatgacatagatgctgtcactcggcttcttgaggaggtggcatctaggttctgggtgctggcactggccagagctgcgggggaggctggtgtccacttcctttgtcctgttggcaaggctcttcaggacatacctgcctctctgctcccaggcagtgtgtggaatgattcccacatctgtctggggccaggacccctgccaaatgagctcatctgtccttggagccccaaactcatcaggggcttctcctataaccttggatgtggcccacagatggggaaaggacaaaggctcccacaccggttgaacgctggcatcccttccaactcccacggcctggagaatctgcatgaagtccttgtcctttgtgtttggcaagcaggagtagcacaggaggagacttggcactctgcatcccagctgctgctgttccagctcaagctggtgttaaagggggccaaggaatgtgcctgcacagccagtgagcatttgtactggggcccattaggtagtgtgaatgggagtccgcagggacagcagagaactcctatcagcaggaatatctcctggcaggccctggacacccatctggaaattctgctgctgaccatttgtgcagctgggacactgatgtccttcttgttctcagacctgtgggttttgatggaagcaatggaaagccgtagaagacccaaggaaggtcgacaagtttccaaagtgctaaagccagagatttggcccttccaaaataccaccaggacgcctggacccgtgggctctccgcatgtcaccactgactgccaggatgatgctgcacctcccttccttgagacacaacagagagacagtgagtcacccaagactgggatcatcagaggctcctcatgcttgctacagagaagcaacgggctgattcctaaagccctgggtgcaggaggagcgactcaagccttcgcgaaagaaaataaccaaaaagcatacaaagaaacgtacggcgtctctcatattacacgccatgatatgctgcagatccctaaacagcagcaaaacgaaaaataccaagtgcctcaattcgatcaatcaacgattaaaaatattgagtctgcaaaaggacttgatgtgtgggacagctggccgctgcaaaacgctgacggaacagtagctgaatacaacggctatcacgttgtgtttgctcttgcgggaagcccgaaagacgctgatgacacatcaatctacatgttttatcaaaaggtcggcgacaactcaatcgacagctggaaaaacgcgggccgtgtctttaaagacagcgataagttcgacgccaacgatccgatcctgaaagatcagacgcaagaatggtccggttctgcaacctttacatctgacggaaaaatccgtttattctacactgactattccggtaaacattacggcaaacaaagcctgacaacagcgcaggtaaatgtgtcaaaatctgatgacacactcaaaatcaacggagtggaagatcacaaaacgatttttgacggagacggaaaaacatatcagaacgttcagcagtttatcgatgaaggcaattatacatccggcgacaaccatacgctgagagaccctcactacgttgaagacaaaggccataaataccttgtattcgaagccaacacgggaacagaaaacggataccaaggcgaagaatctttatttaacaaagcgtactacggcggcggcacgaacttcttccgtaaagaaagccagaagcttcagcagagcgctaaaaaacgcgatgctgagttagcgaacggcgccctcggtatcatagagttaaataatgattacacattgaaaaaagtaatgaagccgctgatcacttcaaacacggtaactgatgaaatcgagcgcgcgaatgttttcaaaatgaacggcaaatggtacttgttcactgattcacgcggttcaaaaatgacgatcgatggtattaactcaaacgatatttacatgcttggttatgtatcaaactctttaaccggcccttacaagccgctgaacaaaacagggcttgtgctgcaaatgggtcttgatccaaacgatgtgacattcacttactctcacttcgcagtgccgcaagccaaaggcaacaatgtggttatcacaagctacatgacaaacagaggcttcttcgaggataaaaaggcaacatttgcgccaagcttcttaatgaacatcaaaggcaataaaacatccgttgtcaaaaacagcatcctggagcaaggacagctgacagtcaactaa

SEQ ID NO: 154259 - DNA, 3267 bp, Homo sapiens; identical to SEQ ID NO: 135779

SEQ ID NO: 154260 - DNA, 2421 bp, Homo sapiens
atgaaactcatggaaacacttaaccagtgcataaacgctggtcatgaaatgacgaaggctatcgccattgcacagtttaatgatgacagcccggaagcgaggaaaataacccggcgctggagaataggtgaagcagcggatttagttggggtttcttctcaggctatcagagatgccgagaaagcagggcgactaccgcacccggatatggaaattcgaggacgggttgagcaacgtgttggttatacaattgaacaaattaatcatatgcgtgatgtgtttggtacgcgattgcgacgtgctgaagacgtatttccaccggtgatcggggttgctgcccataaaggtggcgtttacaaaacctcagtttctgttcatcttgctcaggatctggctctgaaggggctacgtgttttgctcgtggaaggtaacgacccccagggaacagcctcaatgtatcacggatgggtaccagatcttcatattcatgcagaagacactctcctgcctttctatcttggggaaaaggacgatgtcacttatgcaataaagcccacttgctggccggggcttgacattattccttcctgtctggctctgcaccgtattgaaactgagttaatgggcaaatttgatgaaggtaaactgcccaccgatccacacctgatgctccgactggccattgaaactgttgctcatgactatgatgtcatagttattgacagcgcgcctaacctgggtatcggcacgattaatgtcgtatgtgctgctgatgtgctgattgttcccacgcctgctgagttgtttgactacacctccgcactgcagtttttcgatatgcttcgtgatctgctcaagaacgttgatcttaaagggttcgagcctgatccatgcttcgttggacggcaaatatttgagctgctttatgaggatctgggacattgcagagtcttcaaaatcacagcaagctgcccccacgtgagagttaattactcataccaggccctgtttgcagcgctggctgtggaaatggttcccaatcctcagtcacgtctaagctgtgagggaggagcgactcaagccttcgcgaaagaaaataaccaaaaagcatacaaagaaacgtacggcgtctctcatattacacgccatgatatgctgcagatccctaaacagcagcaaaacgaaaaataccaagtgcctcaattcgatcaatcaacgattaaaaatattgagtctgcaaaaggacttgatgtgtgggacagctggccgctgcaaaacgctgacggaacagtagctgaatacaacggctatcacgttgtgtttgctcttgcgggaagcccgaaagacgctgatgacacatcaatctacatgttttatcaaaaggtcggcgacaactcaatcgacagctggaaaaacgcgggccgtgtctttaaagacagcgataagttcgacgccaacgatccgatcctgaaagatcagacgcaagaatggtccggttctgcaacctttacatctgacggaaaaatccgtttattctacactgactattccggtaaacattacggcaaacaaagcctgacaacagcgcaggtaaatgtgtcaaaatctgatgacacactcaaaatcaacggagtggaagatcacaaaacgatttttgacggagacggaaaaacatatcagaacgttcagcagtttatcgatgaaggcaattatacatccggcgacaaccatacgctgagagaccctcactacgttgaagacaaaggccataaataccttgtattcgaagccaacacgggaacagaaaacggataccaaggcgaagaatctttatttaacaaagcgtactacggcggcggcacgaacttcttccgtaaagaaagccagaagcttcagcagagcgctaaaaaacgcgatgctgagttagcgaacggcgccctcggtatcatagagttaaataatgattacacattgaaaaaagtaatgaagccgctgatcacttcaaacacggtaactgatgaaatcgagcgcgcgaatgttttcaaaatgaacggcaaatggtacttgttcactgattcacgcggttcaaaaatgacgatcgatggtattaactcaaacgatatttacatgcttggttatgtatcaaactctttaaccggcccttacaagccgctgaacaaaacagggcttgtgctgcaaatgggtcttgatccaaacgatgtgacattcacttactctcacttcgcagtgccgcaagccaaaggcaacaatgtggttatcacaagctacatgacaaacagaggcttcttcgaggataaaaaggcaacatttgcgccaagcttcttaatgaacatcaaaggcaataaaacatccgttgtcaaaaacagcatcctggagcaaggacagctgacagtcaactaa

SEQ ID NO: 154261 - DNA, 4041 bp, Homo sapiens
ttagttgactgtcagctgtccttgctccaggatgctgtttttgacaacggatgttttattgcctttgatgttcattaagaagcttggcgcaaatgttgcctttttatcctcgaagaagcctctgtttgtcatgtagcttgtgataaccacattgttgcctttggcttgcggcactgcgaagtgagagtaagtgaatgtcacatcgtttggatcaagacccatttgcagcacaagccctgttttgttcagcggcttgtaagggccggttaaagagtttgatacataaccaagcatgtaaatatcgtttgagttaataccatcgatcgtcatttttgaaccgcgtgaatcagtgaacaagtaccatttgccgttcattttgaaaacattcgcgcgctcgatttcatcagttaccgtgtttgaagtgatcagcggcttcattacttttttcaatgtgtaatcattatttaactctatgataccgagggcgccgttcgctaactcagcatcgcgttttttagcgctctgctgaagcttctggctttctttacggaagaagttcgtgccgccgccgtagtacgctttgttaaataaagattcttcgccttggtatccgttttctgttcccgtgttggcttcgaatacaaggtatttatggcctttgtcttcaacgtagtgagggtctctcagcgtatggttgtcgccggatgtataattgccttcatcgataaactgctgaacgttctgatatgtttttccgtctccgtcaaaaatcgttttgtgatcttccactccgttgattttgagtgtgtcatcagattttgacacatttacctgcgctgttgtcaggctttgtttgccgtaatgtttaccggaatagtcagtgtagaataaacggatttttccgtcagatgtaaaggttgcagaaccggaccattcttgcgtctgatctttcaggatcggatcgttggcgtcgaacttatcgctgtctttaaagacacggcccgcgtttttccagctgtcgattgagttgtcgccgaccttttgataaaacatgtagattgatgtgtcatcagcgtctttcgggcttcccgcaagagcaaacacaacgtgatagccgttgtattcagctactgttccgtcagcgttttgcagcggccagctgtcccacacatcaagtccttttgcagactcaatatttttaatcgttgattgatcgaattgaggcacttggtatttttcgttttgctgctgtttagggatctgcagcatatcatggcgtgtaatatgagagacgccgtacgtttctttgtatgctttttggttattttctttcgcgaaggcttgagtcgctcctccttcaggtttctctcctaccgttgtgagttcagactcctggcttggctcactggttccatacacgttgattgcacgtacacggaacttatattcgtggtcaggcagcaggtcctggacgttgaaagaggtgctgcggcatgtggctagttccttccacgtcttgttggctgagtcccagatctcgatgctgtaggactgtacagcactgcccccatcatatgaggagccataccaggacagggtcagtgaggagctccgaatgtcagaggcacaaggtgtgccagctggggggtctggcttatccacgacagtgaggttgacctgggcctgcctgctgcccagcttgttctccaccagcagtgtgtagcagccgcagtgctcctggcgcgcggccaggatggtgagcttgctgccattctcgctgttctccaccttcatgtgctcgctttcctggatctgctttcggaacttcatccaggtacaggtgatgggctgagtgcctgtcactttgccaaacagctccactgactctcctgcgcgtaccttctggtcctcagggaactggatgatctgagggggcattgctgccttcggaggtgtcttgggggcaggtttctttttcacagtcgcatcactctcagttcctagcacgggaggaagagagctcttgggcctccgggatttcatctctggggccttggtgttctcactggctggagcatcatccacggtgacttggcaggagcactccgcctggccagcgtcattcttggctacacacttgtataagcctctgtcctcaggcagtgccttctcgatggagacggagcagagtgagccttcctgggagaggatgatgaacttggtggtcttgatggtctttccgttcagcgtccagatgatggtggctggggggtcagaagacacctggcactggagcagcagcttcttgccctctgccacatgaacatcttgcagcttctgcttgaaggctggggctgtcccctggctctctgatctcttttcattatctgtggtccctgcatggcctctcttgcagttcacatcattcttaacgtctttcttgagttcttctttgctagcggatttcaggttctcatcaggcttggcattgcccatgggcttcagggtctcggcaggcttggcgttgcccattggcttcagggtctcagcaggcttggcgttgcccacgggtttcaagggccctgaaggctgtgcattgctcaggggcttggaactctccactgccttggcattcagggtctcggcactgctgctgccattctctgctggtaatttcttcttgccacccagcactgagcgaaaatccggggtggcaggttttggcggtggcaccttctcaggcacgggggtcttggaagtccccttcttggccaggacagagcgaaaatcgacctgctgggggctgtgcaccttcctctcttcctcagacacagtctttggcttcacttgccgctgcaggttggcacggaaatccatctgctcggctgggatctccttcaggtcgtcttccgatagggtctttgtactcaccttcttccccaggaggtctcggaagtccagctgctccacctcctgctggcggatcgcctcctcagtgtgctgcctcgtctccacgcgcctcttcagcacccctcgcacgtcctcgccgtcttcctcctctagccaaccctgccctcttgctggccagccaggcctcagggacccatagcggtcactaccaccaccatcagcaccaactcctccaccacagaggtcctcgcagctggcaggctccctcccccgtggaagggctctggcagagctgttctgtagcatcagtgacacctggcaactgcattcgccaacccggttccttcccatgtaacctagcaagccctggaagtccaagccccacatcagtttgtgcttcttctggctgcccagacccaggttaggggagttgagcaggatctcatactggccggcatgccagggctgcaccttctttagaaccagggtgaacacgtcctcattctgaagcacctcgaagtggccagtgtctttgcagagggctttgccatctctgagccagtgcacggtaggaaaggggtcaccagctatggcgcaggagatgaggacactctggcccagggaggctgtcactgagcgaggcttactgatgaaccagggctgggtgccatcgtgaggctcttgtaccgtgagcacggcctgggtgcggacctctccagcgctgttccaggcctcgcaggtgtacgtgcccgtgtcctccgggaacacttcctggatacaaaggctgtgctgagttcctctctgttcaaagtggaagtcctctgactcttggatctcattcccattgtgcagccagatgacttcagggggtggattccctgacacttggacagtcatagtgacctggcttccatccatgactttgagatcagagaggccctgcaggaagatgggtgcagtgggcttgctgggagccacaggcagaaggtactcactcttcctgctactcttcttttctggcagctcactggttccacctgcagctgtggaggggatcctggcctcaggcaagtctgcctccgtctgaagccccacttcctcatcggtctctacggggagtcgtggtatcat

SEQ ID NO: 154262 - DNA, 3636 bp, Homo sapiens
atgactatcgtcgccgcacttatgactgtcttctttatcatgcaactcgtaggacaggtgccggcagcgctctgggtcattttcggcgaggaccgctttcgctggagcgcgacgatgatcggcctgtcgcttgcggtattcggaatcttgcacgccctcgctcaagccttcgtcactggtcccgccaccaaacgtttcggcgagaagcaggccattatcgccggcatggcggccgacgcgctgggctacgtcttgctggcgttcgcgacgcgaggctggatggccttccccattatgattcttctcgcttccggcggcatcgggatgcccgcgttgcaggccatgctgtccaggcagcctaacttcgatcattggaccgctgatcgtcacggcgatttatgccgcctcggcgagcacatggaacgggttggcatggattgtaggcgccgccctataccttgtctgcctccccgcgttgcgtcccggtgcatggagccgggccacctcgacatgaatggaagccggcggcacctcgctaacggattcaccactccaagaattggagccaatcaattcttgcggagaactgtgaatgcgcaaaccaacccttggcagaacatatccatcgcgtccgccatctccagcagccgcacgcggcgcatctcgggcagcgttgggtcctggccacggtctggaaacgcggaagtcagcgccctgcaccattatgttccggatctgcatcgcaggatgctgctggctaccctgtggaacacctacatctgtattaacgaagcgctggcattgaccctgagtgatttttctctggtcccgccgcatccataccgccagttgtttaccctcacaacgttccataaccgggcatgttcatcatcagtaacccgtatcgtgagcatcctctctcgtttcatcggtatcattacccccatgaacagaaatcccccttacacggaggcatcagtgaccaaacaggaaaaaaccgcccttaacatggcccgctttatcagaagccagacattaacgcttctggagaaactcaacgagctggacgcggatgaacaggcagacatctgtgaatcgcttcacgaccacgctgatgagctttaccgcagctgcctcgcgcgtttcggtgatgacggtgaaaactctgacacatgcagctcccggagacggtcacagcttgtctgtaagcggatgccgggagcagacaagcccctaaaccagacatttatcgactatcgaaccggaagattacaacctgctattccgcagagtctccctgaagctctccgtttggctgccgacctggcagagcaaaagcaacggctggagcaaaaaatgcttatggatgcacctaaagtcgaattcgctgaacgcgttgctaccgccagcggggttctaatcggcaactatgccaaagtgctcggcctgggccaaaactatctcttcacctggttgcgtgataacggaattctgatcgcaaccggtgaacgcaggaacgtccccaaacaagaatacatatctcgtgggtatttcacccttaaagaaaccgtgatcgatacaagcaatggaagcaggatttctttcacgactcgtataaccggcaaaggtcagcagtggctgatgaagcgattgcttgatgctggtgtgctggtacctgtcgcggcaacgctaacagacgtagtaagaaccaccagcattgtaatgctggctaaagtcactttcctgagctgtataacgatgagcgattttactttttctggctatgaattggcctgctttgtaacacactccggtctatcccgtagcgccgggcatatcctgtcgcaatgtgcaaatctcgcggcaacaaccagtgaatacttcattcacaagcctcaccgcctgatcgcggcagaaactggttatagccaatcaaccgtcgttcgtgcattccgtgaagctgtaaacaaaggaattctgtctgtagagattgttatcggcgatcaccgagaacgtggcgctaacctggaccgggttacaccatcctttttggccttggcacaacaagccaaaagtgcgctgacagaaagcaaattaaagatctcttcagcggcaaccaagatcctctacgccggacgcatcgtggccggcatcaccggcgccacaggtgcggttgctggcgcctatatcgccgacatcaccgatggggaagatcgggctcgccacttcgggctcatgagcgcttgtttcggcgtgggtatggtggcaggccccgtggccgggggactgttgggcgccatctccttgcatgcaccattccttgcggcggcggtgctcaacggcctcaacctactactgggctgcttcctaatgcaggagtcgcataagggagagcgtcgaccgatgcccttgagagccttcaacccagtcagctccttccggtgggcgcggggcatgactatcgtcgccgcacttatgactgtcttctttatcatgcaactcgtaggacaggtgccggcagcgctctgggtcattttcggcgaggaccgctttcgctggagcgcgacgatgatcggcctgtcgcttgcggtattcggaatcttgcacgccctcgctcaagccttcgtcactggtcccgccaccaaacgtttcggcgagaagcaggccattatcgccggcatggcggccgacgcgctgggctacgtcttgctggcgttcgcgacgcgaggctggatggccttccccattatgattcttctcgcttccggcggcatcgggatgcccgcgttgcaggccatgctgtccaggcagcctaacttcgatcattggaccgctgatcgtcacggcgatttatgccgcctcggcgagcacatggaacgggttggcatggattgtaggcgccgccctataccttgtctgcctccccgcgttgcgtcgcggtgcatggagccgggccacctcgacctgaatggaagccggcggcacctcgctaacggattcaccactccaagaattggagccaatcaattcttgcggagaactgtgaatgcgcaaaccaacccttggcagaacatatccatcgcgtccgccatctccagcagccgcacgcggcgcatctcgggcagcgttgggtcctggccacggaactccatctggatttgttcagaacgctcggttgccgccgggcgttttttattggtgagaatcgcagcaacttgtcgcgccaatcgagccatgtcgtcgtcaacgaccccccattcaagaacagcaagcagcattgagaactttggaatccagtccctcttccacctgctgatctgcgacttatcaacgcccacagcttccgctgtcttctcagttccaagcattgcgattttgttaagcaacgcactctcgattcgtagagcctcgttgcgtttgtttgcacgaaccatatgtagctatatgcaaattgaaacaaaagagatggtgatctttctaagagatgatggaatctcccttcagtatcccgatggtcaatgcgctggatatgggatagatgggaatatgctgatttttatgggacagagttgcgaactgttcccaactaaaatcattttgcacgatcagcgcactacgaactttacccacaaatag

SEQ ID NO: 154263 - DNA, 3031 bp, Homo sapiens
atgcccttgagagccttcaacccagtcagctccttccggtgggcgcggggcatgactatcgtcgccgcacttatgactgtcttctttatcatgcaactcgtaggacaggtgccggcagcgctctgggtcattttcggcgaggaccgctttcgctggagcgcgacgatgatcggcctgtcgcttgcggtattcggaatcttgcacgccctcgctcaagccttcgtcactggtcccgccaccaaacgtttcggcgagaagcaggccattatcgccggcatggcggccgacgcgctgggctacgtcttgctggcgttcgcgacgcgaggctggatggccttccccattatgattcttctcgcttccggcggcatcgggatgcccgcgttgcaggccatgctgtccaggcagcctaacttcgatcattggaccgctgatcgtcacggcgatttatgccgcctcggcgagcacatggaacgggttggcatggattgtaggcgccgccctataccttgtctgcctccccgcgttgcgtcgcggtgcatggagccgggccacctcgacctgaatggaagccggcggcacctcgctaacggattcaccactccaagaattggagccaatcaattcttgcggagaactgtgaatgcgcaaaccaacccttggcagaacatatccatcgcgtccgccatctccagcagccgcacgcggcgcatctcgggcagcgttgggtcctggccacggtctggaaacgcggaagtcagcgccctgcaccattatgttccggatctgcatcgcaggatgctgctggctaccctgtggaacacctacatctgtattaacgaagcgctggcattgaccctgagtgatttttctctggtcccgccgcatccataccgccagttgtttaccctcacaacgttccataaccgggcatgttcatcatcagtaacccgtatcgtgagcatcctctctcgtttcatcggtatcattacccccatgaacagaaatcccccttacacggaggcatcagtgaccaaacaggaaaaaaccgcccttaacatggcccgctttatcagaagccagacattaacgcttctggagaaactcaacgagctggacgcggatgaacaggcagacatctgtgaatcgcttcacgaccacgctgatgagctttaccgcagctgcctcgcgcgtttcggtgatgacggaaacagctatgaccatgattacgccaagcttgcatgcctgcaggtcgaaggccgtggcggcggctacttttgcccatgaattgctcgctgtggagtacgcaggctggatttctcccgcgtttcggctgaaggtaaaccagacatttatcgactatcgaaccggaagattacaacctgctattccgcagagtctccctgaagctctccgtttggctgccgacctggcagagcaaaagcaacggctggagcaaaaaatgcttatggatgcacctaaagtcgaattcgctgaacgcgttgctaccgccagcggggttctaatcggcaactatgccaaagtgctcggcctgggccaaaactatctcttcacctggttgcgtgataacggaattctgatcgcaaccggtgaacgcaggaacgtccccaaacaagaatacatatctcgtgggtatttcacccttaaagaaaccgtgatcgatacaagcaatggaagcaggatttctttcacgactcgtataaccggcaaagacgtagtaagaaccaccagcattgtaatgctggctaaagtcactttcctgagctgtataacgatgagcgattttactttttctggctatgaattggcctgctttgtaacacactccggtctatcccgtagcgccgggcatatcctgtcgcaatgtgcaaatctcgcggcaacaaccagtgaatacttcattcacaagcctcaccgcctgatcgcggcagaaactggttatagccaatcaaccgtcgttcgtgcattccgtgaagctgtaaacaaaggaattctgtctgtagagattgttatcggcgatcaccgtgaacgtcgcgctaacctgtaccggtttacaccatcctttttggccttcgcacaacaagccaaaaatgcgctgatagaaagcaaattaaagatctcttcagcggcaaccaaggttaaagctgttctcgctaagacattggctttatttaattttttatccacacccccatgtcaaaatgataccccctccccctgtcaggatgacgtggcaataaagaataagaagtcacaagttaaaaaaacaaaaagatcagtttccggcggtgccggaacaaccagcctcaaaaaattgacttcatggatcgctaaggcaaaagcaaaggctgacaatctgcggttatccaaaaaacgcactcaaaaacatgagttcaagcagaaagtagaggcggctgcgcggaaatatgcttacctgaagaacaagcgttcgcctgatattggcgggatatcaaacttcgataacctaccgcattgcatgacggtaaacgaagctcttaatgcggttttagccaaaaataaagataacgaacaatggggtgcggttgctggcgcctatatcgccgacatcaccgatggggaagatcgggctcgccacttcgggctcatgagcgcttgtttcggcgtgggtatggtggcaggccccgtggccgggggactgttgggcgccatctccttgcatgcaccattccttgcggcggcggtgctcaacggcctcaacctactactgggctgcttcctaatgcaggagtcgcataagggagagcgtcgaggagaacttctaaagatcgtcgttttgccaggtgaccacgttggtcaagaaatcacagccgaagccattaaggttcttaaagctatttctgatgttcgttccaatgtcaagttcgatttcgaaaatcatttaattggtggtgctgctatcgacctgcaggggggggggggaaagccacgttgtgtctcaaaatctctgatgttacattgcacaagataa

SEQ ID NO: 154264 - DNA, 3074 bp, Homo sapiens
ctagtgatggcggatttcatcatatctgtcattgtaattggtcctgatagcttccaccagcttagccaaagtgtctttgtcttccgagttaacctgtgtaaagttgacagtggtgcaggtcttcctgtggactagatgtcccagtcttgccttccccttgataatgcagtaagggacccccattttatgacacaaggcaagcaggaagacaactagcttgatgggatccacttcatgtgcagtcaccaccagctgagccttcttgttctcctccaaggtggtgatggtgttaactcctgctcgaaggacaggtggtcttttagtggggacgtcccctttgccagcagctttcttcttggcctggacaaacagcctctgcttcttctcttgggaagctggcaatgtcacaggagaaacagcattgaaagaccaaccaaaagacctaatgacatcttgaactaaagtgatgacagtggaatctccttgttcctcctcctccacattgattaaatcaacaaattctgctgaaattgcctcctcaattagtccctctggccctgcattatccaatatggtagctactagccagtgggtctgttgagcacttgaaatgtggctgaccaaattgagatgtgctctcctcagcttttcttctctcccaccctgcactgtacactccactggtcctaaaattcttgttattctctcaacataccgtaacatttcactcatttgtgcctttgcatttgctgattctttaattgagggcagggaccatgtcttgtttacccttatatccacccgtgcttcaggtagtacctggttacccaggccgtgccggcacgttaaccgggctgcatccgatgcaagtgtgtcgctgtcgacggtgacccgtgtatgaaatctaacaatgcgctcatcgtcatcctcggcaccgtcaccctggatgctgtaggcataggcttggttatgccggtactgccgggcctcttgcgggatatcgtccattccgacagcatcgccagtcactatggcgtgctgctagcgctatatgcgttgatgcaatttctatgcgcacccgttctcggagcactgtccgaccgctttggccgccgcccagtcctgctcgcttcgctacttggagccactatcgatgtcagctgtccttgctccaggatgctgtttttgacaacggatgttttattgcctttgatgttcattaagaagcttggcgcaaatgttgcctttttatcctcgaagaagcctctgtttgtcatgtagcttgtgataaccacattgttgcctttggcttgcggcactgcgaagtgagagtaagtgaatgtcacatcgtttggatcaagacccatttgcagcacaagccctgttttgttcagcggcttgtaagggccggttaaagagtttgatacataaccaagcatgtaaatatcgtttgagttaataccatcgatcgtcatttttgaaccgcgtgaatcagtgaacaagtaccatttgccgttcattttgaaaacattcgcgcgctcgatttcatcagttaccgtgtttgaagtgatcagcggcttcattacttttttcaatgtgtaatcattatttaactctatgataccgagggcgccgttcgctaactcagcatcgcgttttttagcgctctgctgaagcttctggctttctttacggaagaagttcgtgccgccgccgtagtacgctttgttaaataaagattcttcgccttggtatccgttttctgttcccgtgttggcttcgaatacaaggtatttatggcctttgtcttcaacgtagtgagggtctctcagcgtatggttgtcgccggatgtataattgccttcatcgataaactgctgaacgttctgatatgtttttccgtctccgtcaaaaatcgttttgtgatcttccactccgttgattttgagtgtgtcatcagattttgacacatttacctgcgctgttgtcaggctttgtttgccgtaatgtttaccggaatagtcagtgtagaataaacggatttttccgtcagatgtaaaggttgcagaaccggaccattcttgcgtctgatctttcaggatcggatcgttggcgtcgaacttatcgctgtctttaaagacacggcccgcgtttttccagctgtcgattgagttgtcgccgaccttttgataaaacatgtagattgatgtgtcatcagcgtctttcgggcttcccgcaagagcaaacacaacgtgatagccgttgtattcagctactgttccgtcagcgttttgcagcggccagctgtcccacacatcaagtccttttgcagactcaatatttttaatcgttgattgatcgaattgaggcacttggtatttttcgttttgctgctgtttagggatctgcagcatatcatggcgtgtaatatgagagacgccgtacgtttctttgtatgctttttggttattttctttcgcgaaggcttgagtcgctcctcctgccagaagtgcagtcgtaaaagtcagaactgtggcttgttttacaatttttttgatgttcatgttcatgtctccttctgtatgtactgttttttgcgatctgccgtttcgatcctcccgaattgacttcacagtaaggtactcactgtccacgtcaagagccaagccaaggtactgttcctccaatgagtaaacagcactgctgtagggctggcctaagtcaggcagttcaagataacctgaaggagtcgaataacatctatccagtgagtcctgcaagacttcaggctctttctcatccagcagctccctgctgagcctgagtaaactcaggctgtctgtctggtcttgaaccttcatctcgataacatcgggcaacctgaaaatatcttttccagactcccttgcctgacggctaccattaggtccagcccaggggagacacaggcaggagcctggcggcggcagggacgggcctggggagcgggctgaccacacgtaactgtcatgccagggtgtgaagacacagaacatcagttcaaacctcagaggaaagagaaggctctctagcat

SEQ ID NO: 154265 - DNA, 9917 bp, Homo sapiens
gcgtgtgcacaggcagctccactcggcacatcgtgacctttgatgggcagaatttcaagctgactggcagctgttcttatgtcctatttcaaaacaaggagcaggacctggaggtgattctccataatggtgcctgcagccctggagcaaggcagggctgcatgaaatccatcgaggtgaagcacagtgccctctccgtcgagctgcacagtgacatggaggcttttaggttcttggtgcatggccacccgtacagtattacaacagcctgttttctggtcaagctctgtaaagtcaagctctgttttctagtcaagctcttctttatcttagaagagctgccgacaaatatcaaggtgacggtgaatgggagactggtctctgttccttacgtgggtgggaacatggaagtcaacgtttatggtgccatcatgcatgaggtcagattcaatcaccttggtcacatcttcacattcactccacaaaacaatgagttccaactgcagctcagccccaagacttttgcttcaaagacgtatggtctgtgtgggatctgtgatgagaacggagccaatgacttcatgctgagggatggcacagtcaccacagactggaaaacacttgttcaggaatggactgtgcagcggccagggcagacgtgccagcccatcctggaggagcagtgtcttgtccccgacagctcccactgccaggtcctcctcttaccactgtttgctgaatgccacaaggtcctggctccagccacattctatgccatctgccagcaggacagttgccaccaggagcaagtgtgtgaggtgatcgcctcttatgcccacctctgtcggaccaacggggtctgcgttgactggaggacacctgatttctgtgctatgtcatgcccaccatctctggtctacaaccactgtgagcatggctgtccccggcactgtgatggcaacgtgagctcctgtggggaccatccctccgaaggctgtttctgccctccagataaagtcatgttggaaggcagctgtgtccctgaagaggcctgcactcagtgcattggtgaggatggagtccagcaccagttcctggaagcctgggtcccggaccaccagccctgtcagatctgcacatgcctcagcgggcggaaggtcaactgcacaacgcagccctgccccacggccaaagctcccacgtgtggcctgtgtgaagtagcccgcctccgccagaatgcagaccagtgctgccccgagtatgagtgtgtgtgtgacccagtgagctgtgacctgcccccagtgcctcactgtgaacgtggcctccagcccacactgaccaaccctggcgagtgcagacccaacttcacctgcgcctgcaggaaggaggagtgcaaaagagtgtccccaccctcctgccccccgcaccgtttgcccacccttcggaagacccagtgctgtgatgagtatgagtgtgcctgcaactgtgtcaactccacagtgagctgtccccttgggtacttggcctcaactgccaccaatgactgtggctgtaccacaaccacctgccttcccgacaaggtgtgtgtccaccgaagcaccatctaccctgtgggccagttctgggaggagggctgcgatgtgtgcacctgcaccgacatggaggatgccgtgatgggcctccgcgtggcccagtgctcccagaagccctgtgaggacagctgtcggtcgaacaccgtaccctataaattactaggtaaatgtcaagtaacctcttggggaagcccaaatctgcacgttggtgagcagtattgggatcgagtgttcgtcttgtatgggaggctagccctgcgagagtggagactggatcccagtcatcctgagtgtgcctcccgggcttcacttacgttctgcatgaaggcgagtgctgtggaaggtgcctgccatctgcctgtcggctcccagtgggcctccccggagaacccctgcctcatcaatgagtgtgtccgagtgaaggaggaggtctttatacaacaaaggaacgtctcctgcccccagctggaggtccctgtctgcccctcgggctttcagctgagctgtaagacctcagcgtgctgcccaagctgtcgctgtgagcgcatggaggcctgcatgctcaatggcactgtcattgggcccgggaagactgtgatgatcgatgtgtgcacgacctgccgctgcatggtgcaggtgggggtcatctctggattcaagctggagtgcaggaagaccacctgcaacccctgccccctgggttacaaggaagaaaataacacaggtgaatgttgtgggagatgtttgcctacggcttgcaccattcagctaagaggaggacagatcatgacactgaagcgtgatgagacgctccaggatggctgtgatactcacttctgcaaggtcaatgagagaggagagtacttctgggagaagagggtcacaggctgcccaccctttgatgaacacaagtgtctggctgagggaggtaaaattatgaaaattccaggcacctgctgtgacacatgtgaggagcctgagtgcaacgacatcactgccaggctgcagtatgtcaaggtgggaagctgtaagtctgaagtagaggtggatatccactactgccagggcaaatgtgccagcaaagccatgtactccattgacatcaacgatgtgcaggaccagtgctcctgctgctctccgacacggacggagcccatgcaggtggccctgcactgcaccaatggctctgttgtgtaccatgaggttctcaatgccatggagtgcaaatgctcccccaggaagtgcagcaagggagacactggaatttttctgaagtggtcctgcattcctgccgagaaggggctgcagacctctggggcctgggtagaggcagcagatatacccctgctccctggctccccacgccggctgagccctcaggcagggtccagagggggccagggccccaaacatggacagcagtgtctcaagatgccaggtccccgggccccaggtctgcagggcggttccaacagagatcctggccagccctgcggtggagagagcacccgcagcagctctgtcatcaacaactatctggatgccaatgagcctgtgtccttggaggcccgtcttagccgcatgcacttccatgacagtcagaggaaggtcgactatgtacttgcctaccactaccggaaacgcggggtgcacctggcccaaggcttccctggccactcgctggctatcgtctccaatggggagacaggcaaggagcctcatgctgggggcccaggtgacattgagctgggaccgctcgatgccctggaggaggagaggaaggagcagcgggaggaatttgagcacaatctgatggaggctggactggagcttgagaaggacttggaggtctggcagagcctggatgtctggcatctcaacctgaattgcagcactgagtcaaagggggatatcttgggacaggtgccggcagcgctctgggtcattttcggcgaggaccgctttcgctggagcgcgacgatgatcggcctgtcgcttgcggtattcggaatcttgcacgccctcgctcaagccttcgtcactggtcccgccaccaaacgtttcggcgagaagcaggccattatcgccggcatggcggccgacgcgctgggctacgtcttgctggcgttcgcgacgcgaggctggatggccttccccattatgattcttctcgcttccggcggcatcgggatgcccgcgttgcaggccatgctgtccaggcagcctaacttcgatcattggaccgctgatcgtcacggcgatttatgccgcctcggcgagcacatggaacgggttggcatggattgtaggcgccgccctataccttgtctgcctccccgcgttgcgtcgcggtgcatggagccgggccacctcgacctgaatggaagccggcggcacctcgctaacggattcaccactccaagaattggagccaatcaattcttgcggagaactgtgaatgcgcaaaccaacccttggcagaacatatccatcgcgtccgccatctccagcagccgcacgcggcgcatctcgggcagcgttgggtcctggccacggtctggaaacgcggaagtcagcgccctgcaccattatgttccggatctgcatcgcaggatgctgctggctaccctgtggaacacctacatctgtattaacgaagcgctggcattgaccctgagtgatttttctctggtcccgccgcatccataccgccagttgtttaccctcacaacgttccataaccgggcatgttcatcatcagtaacccgtatcgtgagcatcctctctcgtttcatcggtatcattacccccatgaacagaaatcccccttacacggaggcatcagtgaccaaacaggaaaaaaccgcccttaacatggcccgctttatcagaagccagacattaacgcttctggagaaactcaacgagctggacgcggatgaacaggcagacatctgtgaatcgcttcacgaccacgctgatgagctttaccgcagctgcctcgcgcgtttcggtgatgacgaacagtggttccgggaggtccggcatgagaacagatgtgtggccctggaaaggtgtccctgcttccatcagggcaaggagtatgcccctggagaaacagtgaagattggctgcaacacttgtgtctgtcgggaccggaagtggaactgcacagaccatgtgtgtgatgccacgtgctccacgatcggcatggcccactacctcaccttcgacgggctcaaatacctgttccccggggagtgccagtacgttctggtgcaggattactgcggcagtaaccctgggacctttcggatcctagtggggaataagggatgcagccacccctcagtgaaatgcaagaaacgggtcaccatcctggtggagggaggagagattgagctgtttgacggggaggtgaatgtgaagaggcccatgaaggatgagactcactttgaggtggtggagtctggccggtacatcattctgctgctgggcaaagccctctccgtggtctgggaccgccacctgagcatctccgtggtcctgaagcagacataccaggagaaagtgtgtggcctgtgtgggaattttgatggcatccagaacaatgacctcaccagcagcaacctccaagtggaggaagaccctgtggactttgggaactcctggaaagtgagctcgcagtgtgctgacaccagaaaagtgcctctggactcatcccctgccacctgccataacaacatcatgaagcagacgatggtggattcctcctgtagaatccttaccagtgacgtcttccaggactgcaacaagctggtggaccccgagccatatctggatgtctgcatttacgacacctgctcctgtgagtccattggggactgcgcctgcttctgcgacaccattgctgcctatgcccacgtgtgtgcccagcatggcaaggtggtgacctggaggacggccacattgtgcccccagagctgcgaggagaggaatctccgggagaacgggtatgagtgtgagtggcgctataacagctgtgcacctgcctgtcaagtcacgtgtcagcaccctgagccactggcctgccctgtgcagtgtgtggagggctgccatgcccactgccctccagggaaaatcctggatgagcttttgcagacctgcgttgaccctgaagactgtccagtgtgtgaggtggctggccggcgttttgcctcaggaaagaaagtcaccttgaatcccagtgaccctgagcactgccagatttgccactgtgatgttgtcaacctcacctgtgaagcctgccaggagccgggaggcctggtggtgcctcccacagatgccccggtgagccccaccactctgtatgtggaggacatctcggaaccgccgttgcacgatttctactgcagcaggctactggacctggtcttcctgctggatggctcctccaggctgtccgaggctgagtttgaagtgctgaaggcctttgtggtggacatgatggagcggctgcgcatctcccagaagtgggtccgcgtggccgtggtggagtaccacgacggctcccacgcctacatcgggctcaaggaccggaagcgaccgtcagagctgcggcgcattgccagccaggtgaagtatgcgggcagccaggtggcctccaccagcgaggtcttgaaatacacactgttccaaatcttcagcaagatcgaccgccctgaagcctcccgcatcgccctgctcctgatggccagccaggagccccaacggatgtcccggaactttgtccgctacgtccagggcctgaagaagaagaaggtcattgtgatcccggtgggcattgggccccatgccaacctcaagcagatccgcctcatcgagaagcaggcccctgagaacaaggccttcgtgctgagcagtgtggatgagctggagcagcaaagggacgagatcgttagctacctctgtgaccttgcccctgaagcccctcctcctactctgccccccgacatggcacaagtcactgtgggcccggggctcttgggggtttcgaccctggggcccaagaggaactccatggttctggatgtggcgttcgtcctggaaggatcggacaaaattggtgaagccgacttcaacaggagcaaggagttcatggaggaggtgattcagcggatggatgtgggccaggacagcatccacgtcacggtgctgcagtactcctacatggtgaccgtggagtaccccttcagcgaggcacagtccaaaggggacatcctgcagcgggtgcgagagatccgctaccagggcggcaacaggaccaacactgggctggccctgcggtacctctctgaccacagcttcttggtcagccagggtgaccgggagcaggcgcccaacctggtctacatggtcaccggaaatcctgcctctgatgagatcaagaggctgcctggagacatccaggtggtgcccattggagtgggccctaatgccaacgtgcaggagctggagaggattggctggcccaatgcccctatcctcatccaggactttgagacgctcccccgagaggctcctgacctggtgctgcagaggtgctgctccggagaggggctgcagatccccaccctctcccctgcacctgatcctattggatgtcaggttgtaggcctggtggccattgtccctgctggcacctgtgtgctcaccttcctggttgtctttgcagactgcagccagcccctggacgtgatccttctcctggatggctcctccagtttcccagcttcttattttgatgaaatgaagagtttcgccaaggctttcatttcaaaagccaatatagggcctcgtctcactcaggtgtcagtgctgcagtatggaagcatcaccaccattgacgtgccatggaacgtggtcccggagaaagcccatttgctgagccttgtggacgtcatgcagcgggagggaggccccagccaaatcggggatgccttgggctttgctgtgcgatacttgacttcagaaatgcatggtgccaggccgggagcctcaaaggcggtggtcatcctggtcacggacgtctctgtggattcagtggatgcagcagctgatgccgccaggtccaacagagtgacagtgttccctattggaattggagatcgctacgatgcagcccagctacggatcttggcaggcccagcaggcgactccaacgtggtgaagctccagcgaatcgaagacctccctaccatggtcaccttgggcaattccttcctccacaaactgtgctctggatttgttaggatttgcatggatgaggatgggaatgagaagaggcccggggacgtctggaccttgccagaccagtgccacaccgtgacttgccagccagatggccagaccttgctgaagagtcatcgggtcaactgtgaccgggggctgaggccttcgtgccctaacagccagtcccctgttaaagtggaagagacctgtggctgccgctggacctgcccctgtcagaaggccgtgagcggcggcacttttgcccatgaattgctcgctgtggagtacgcaggctggatttctcccgcgtttcggctgaaggtaaaccagacatttatcgactatcgaaccggaagattacaacctgctattccgcagagtctccctgaagctctccgtttggctgccgacctggcagagcaaaagcaacggctggagcaaaaaatgcttatggatgcacctaaagtcgaattcgctgaacgcgttgctaccgccagcggggttctaatcggcaactatgccaaagtgctcggcctgggccaaaactatctcttcacctggttgcgtgataacggaattctgatcgcaaccggtgaacgcaggaacgtccccaaacaagaatacatatctcgtgggtatttcacccttaaagaaaccgtgatcgatacaagcaatggaagcaggatttctttcacgactcgtataaccggcaaagacgtagtaagaaccaccagcattgtaatgctggctaaagtcactttcctgagctgtataacgatgagcgattttactttttctggctatgaattggcctgctttgtaacacactccggtctatcccgtagcgccgggcatatcctgtcgcaatgtgcaaatctcgcggcaacaaccagtgaatacttcattcacaagcctcaccgcctgatcgcggcagaaactggttatagccaatcaaccgtcgttcgtgcattccgtgaagctgtaaacaaaggaattctgtctgtagagattgttatcggcgatcaccgtgaacgtcgcgctaacctgtaccggtttacaccatcctttttggccttcgcacaacaagccaaaaatgcgctgatagaaagcaaattaaagatctcttcagcggcaaccaaggttaaagctgttctcgctaagacattggctttatttaattttttatccacacccccatgtcaaaatgataccccctccccctgtcaggatgacgtggcaataaagaataagaagtcacaagttaaaaaaacaaaaagatcagtttccggcggtgccggaacaaccagcctcaaaaaattgacttcatggatcgctaaggcaaaagcaaaggctgacaatctgcggttatccaaaaaacgcactcaaaaacatgagttcaagcagaaagtagaggcggctgcgcggaaatatgcttacctgaagaacaagcgttcgcctgatattggcgggatatcaaacttcgataacctaccgcattgcatgacggtaaacgaagctcttaatgcggttttagccaaaaataaagataacgaacaatggggtataccggcaggattcagaggtgcggtagctggcgcctatatcaccgacatcaccgattggaaagatcgggctcgccactacgggctcatgagcgcttgtttcggcgtgggtatggtgtcaggccccgtggccgggggactgttgggcgccatctccttgcatgcaccattccttgcggcggcggtgctcaacggcctcaacctactactgggctgcttcctaatgcaggagtcgcataagggagagcgtcgaggagaacttctaaagatcgtcgttttgccaggtgaccacgttggtcaagaaatcacagccgaagccattaaggttcttaaagctatttctgatgttcgttccaatgtcaagttcgatttcgaaaatcatttaattggtggtgctgctatcgacctgcaggggggggggggaaagccacgttgtgtctcaaaatctctgatgttacattgcacaagataa

SEQ ID NO: 154266 - DNA, 6391 bp, Homo sapiens
atggataaattcctcaacacatacaccctcccaagactaaaccaggaagaagttgaatctctgaatagaccaataacaggctctgaaattgtggcaataatcaatagtttaccaaccaaaaggagtccaggaccagatggattcacagccaaattctaccagagaaaaattaactcaagatggattaaagacttaaatgtaagacctaaaaccataaaaaacctagaagaaaacctaggcaataccattcaggacataggcatgggcaaaggcttcataactaaaacactgaaagaaatggcaacaaaagccaaaattgacaaatgggatctaattaaactaaagcgcttcttcacagcaaaagacactatcatcgtagtgaacagacaacctacagaatgggacaaatgtttttcaatgtatccatccgacaaagggctaatatccagaagctacaaggaacttaaacaaatttccgagaataaaacaaccccatcaaaaaaaagatcaacaagacagaaaattcacaaggatattcaggacttgaactcagctctggaccaagtggaactaataatagacatctacagaactctccaccctaaatcaacagaagatacattcttctcagcaccacattgcacttattctaaaattgaccacataattggaagaaaaacactcctcagcaaatgcaaaataatggaaatcataacaatcagtctcacgggctacagtgcaatcaaattagaactcaagattaaaaaactcactcaaaaccgcacaactacatggaaactgaacaacctgctcctgaatgactactgggtaaataacaaaaggaagaatgggccccaccagagacagctggacatctacttcatttttcccaaatctccatggcagttaggaggcttatgtgcccagagcacacacaggaccttcaggaacagtgttgctcatgtccacatgcaagtctattggatcacaactcctcaccagcaagggaacaaaactcaacagaaaaatgagtttgacgagttgacagaagtaggattcagaagtgaccagctcagctccattgtctgtattcatatacacctagcccttaagccggtggctgagaacttacctgtgttttcattcattcccttgccagaaaggaatagcatcaacatcaacaaaaaggacatctacaccaaaaccccatctgtaggtcaccatcatcaaagaccaaaggtagataaaaccacaaagatggggagaaaccagagcggaaaagctgaaaattctaaaggtcagagcacctcttctcctccaaaggatcgtagctcctcaccagcaacagaacaaagctggatggagaatgactttgacaagttgacagaagtaggcttcagaagcacttattctaaaattgaccacatagttggaagtaaagcactcctcagcaaatgtaaaagaacagaaatcacaacaaactgtctctcaatcaaattagaactcaggattaagaaactcactcaaaactgcacaactacatggaaactgaacaacctgctcctgaatgactactgggtaaataatgaaatgaaggcaggaagaaagatgttctttgaaaccaatgaaaacaaagacacaacgtaccagaatctctgggacacatttcgagcagtgtgtagagggaaatttatagcactaaatgcccacaagagaaagaagaaaagatctaaaattgacaccctaacatcacaattaaaagaactagagaagcaagagcaaacacattcaaaagctagcagaaggcaagaaataactaagatcagagcagaactgaaagagacacaaaaaacccttcaaaaaatcaacgaatccaggagctggtttttttgaaaagatcaacaaaattgatagactgctagcaagactaataaagaagaaaagagagaagaatcaaatagacgcaataaaaaatgataaaggcgatatcaccaccgatcccacagaaatgcaaactaccgtcagagaatactataaacacctctacgtaaataaaccagaaaatctagaagaaatggataaattcctcgacacatacaccctcccaagactaaaccaggaagaacttgaatctctgaataaaccaataacaggctctgaaattgaggcaataattaatagcttaccaactaaaaaaagtccaggaccagatggattcacagccgaattctaccagaggtacaaggaggagctgttaccattccttctgaaactattccaatcaatagaaaaagagggaatcctccctaactcattttatgaggccagcatcatcctgataccaaagccgggcagagacacaacaaaaaaagagaattttagaccaatatccctgatgaacatcgatgcaaacatcctcaataacatactggcaaaccaaatccagcagcacatcaaaaagcttatccaccacgacgaagttggcttcatccctgggatgcaagggtggttcaacatacgaaaatcaataaacttaatcccgcatgtaaacagaaccaaagacaaaaaccacatggttatctcagtagatgcagaaaaggcctttgacaaaattcaacaacacttcatgctaaaaactctcaataaattaggtattgatgggacgtatctcaaaataataagacctatttttgacaaacccacagctgatatcatactgaataggcaaaaactggaagcattgcctttgaaaactggcacaaggcagagatgctctctctcaccactcctattcaacatagtgttggaagttctggcgagggcaatcaggcaggagaaagaaataaagggtattcaattaggaaaagaagaagtcaaattgtccctgtttgcagatgacatgattgtatatctagaaaaccccattgtctcagcccaaaatctccttaagctgataggcaacttcagcaaagtctcagaatacacaatcaatgtgcaaaaatcacaatcattcttatacaccaataacagacaaacagagagccaaatcatgagtgaactcccattcacaattgcttcaaagagaataaaatacctaggaatccaacttacaagggaggtgaaggacttcttcaaggagaactacaaaccactgctcgatgaaataaaagagaatacaaacaaatggaagaacattccatggtcatgggtaggaagaatcgatattgtgaaaatggctatactgcccaagcaaatgccagatgttaatgtaagctgggatggagagggcccaaagcaactgccatttattgacatttcagtggctgtggcaacagataaaggcttacttactccaatcataaaagatgctgctgctaaaggtatccaggaaattgctgactctgtaaggagcaatatagtcctacaatgtcaagctcgaccgatgcccttgagagccttcaacccagtcagctccttccggtgggcgcggggcatgactatcgtcgccgcacttatgactgtcttctttatcatgcaactcgtaggacaggtgccggcagcgctctgggtcattttcggcgaggaccgctttcgctggagcgcgacgatgatcggcctgtcgcttgcggtattcggaatcttgcacgccctcgctcaagccttcgtcactggtcccgccaccaaacgtttcggcgagaagcaggccattatcgccggcatggcggccgacgcgctgggctacgtcttgctggcgttcgcgacgcgaggctggatggccttccccattatgattcttctcgcttccggcggcatcgggatgcccgcgttgcaggccatgctgtccaggcaggtagatgacgaccatcagggacagcttcaaggatcgctcgcggctcttaccagcctaacttcgatcattggaccgctgatcgtcacggcgatttatgccgcctcggcgagcacatggaacgggttggcatggattgtaggcgccgccctataccttgtctgcctccccgcgtttgcgtcgcggtgcatggagccgggccacctcgacctgaatggaagccggcggcacctcgctaacggattcaccactccaagaattggagccaatcaattcttgcggagaactgtgaatgcgcaaaccaacccttggcagaacatatccatcgcgtccgccatctccagcagccgcacgcggcgcatctcgggcagcgttgggtcctggccacgggtgcgcatgatcgtgctcctgtcgttgaggacccggctaggctggcggggttgccttactgtaacccgtatcgtgagcatcctctctcgtttcatcggtatcattacccccatgaacagaaatcccccttacacggaggcatcagtgaccaaacaggaaaaaaccgcccttaacatggcccgctttatcagaagccagacattaacgcttctggagaaactcaacgagctggacgcggatgaacaggcagacatctgtgaatcgcttcacgaccacgctgatgagctttaccgcagctgcctcgcgcgtttcggtgatgacggtgaaaactctgacacatgcagctcccggagacggtcacagcttgtctgtaagcggatgccgggagcagacaagcccgtcaggctgttcacgggatgttggcggctaaaccagacatttatcgactatcgaaccggaagattacaacctgctattccgcagagtctccctgaagctctccgtttggctgccgacctggcagagcaaaagcaacggctggagcaaaaaatgcttatggatgcacctaaagtcgaattcgctgaacgcgttgctaccgccagcggggttctaatcggcaactatgccaaagtgctcggcctgggccaaaactatctcttcacctggttgcgtgataacggaattctgatcgcaaccggtgaacgcaggaacgtccccaaacaagaatacatatctcgtgggtatttcacccttaaagaaaccgtgatcgatacaagcaatggaagcaggatttctttcacgactcgtataaccggcaaaggtcagcagtggctgatgaagcgattgcttgatgctgacgtagtaagaaccaccagcattgtaatgctggctaaagtcactttcctgagctgtataacgatgagcgattttactttttctggctatgaattggcctgctttgtaacacactccggtctatcccgtagcgccgggcatatcctgtcgcaatgtgcaaatctcgcggcaacaaccagtgaatacttcattcacaagcctcaccgcctgatcgcggcagaaactggttatagccaatcaaccgtcgttcgtgcattccgtgaagctgtaaacaaaggaattctgtctgtagagattgttatcggcgatcaccgtgaacgtcgcgctaacctgtaccggtttacaccatcctttttggccttcgcacaacaagccaaaaatgcgctgatagaaagcaaattaaagatctcttcagcggcaaccaaggttaaagctgttctcgctaagacattggctttatttaattttttatccacacccccatgtcaaaatgataccccctccccctgtcaggatgacgtggcaataaagaataagaagtcacaagttaaaaaaacaaaaagatcagtttccggcggtgccggaacaaccagcctcaaaaaattgacttcatggatcgctaaggcaaaagcaaaggctgacaatctgcggttatccaaaaaacgcactcaaaaacatgagttcaagcagaaagtagaggcggctgcgcggaaatatgcttacctgaagaacaagcgttcgcctgatattggcgggatatcaaacttcgataacctaccgcattgcatgacggtaaacgaagctcttaatgcggttttagccaaaaataaagataacgaacaatggggtgcggttgctggcgcctatatcgccgacatcaccgatggggaagatcgggctcgccacttcgggctcatgagcgcttgtttcggcgtgggtatggtggcaggccccgtggccgggggactgttgggcgccatctccttgcatgcaccattccttgcggcggcggtgctcaacggcctcaacctactactgggctgcttcctaatgcaggagtcgcataagggagagcgtcgaggagaacttctaaagatcgtcgttttgccaggtgaccacgttggtcaagaaatcacagccgaagccattaaggttcttaaagctatttctgatgttcgttccaatgtcaagttcgatttcgaaaatcatttaattggtggtgctgctatcgacctgcaggggggggggggaaagccacgttgtgtctcaaaatctctgatgttacattgcacaagataa

SEQ ID NO: 154267 - DNA, 2824 bp, Homo sapiens
atggtaaagggatcaactaaacaagaagagctaactatcctaaatatatatgcactgaatacaggagcacccagattcaaaaagcaagtcctgagtgacctacaaagagacttagactcccacacattaataatgggagactttaacaccccactgtcaacattagacagatcaacgagacagaaagtcaacaaggatacccaggaattgaactcagctctgcaccaagcggacctaatagacatctacagaactctccactcaaaaacaacagaatatacatttttttcatcaccacaccacacctattccaaaattgaccacatacttggaagtaaagctctcctcagcaaatgtaaaagaacagagattataagaaactatctctcagaccacagtgcaatcaaactagaactcaggattaagaatctcactcaaaaccactcaactacatggaaactgaacaacctgctcctgaatgactactggatatgtaacgcaatgaaggcagaaataaagatgttctttgaaaccaacgagaacaaagacacaacataccagaatctctgggatgcattcaaagcagtgtgtagagggaaatttatagcactaaatgcccacaagagaaagcaggaaagatccaaaattgacaccctaacatcacaattaaaagaactagaaaagcaagagcaaacacattcaaaagctagcagaaggcaagaaataactaaaatcagagcagaactgaaggaaatagagacacaaaaaacccttcaaaaaattaatgaatccaggagctggttttttgaaaggatcaacaaaattgatagactgctagcaagactaataaagaaaaaaagagagaagaatcaaatagacacaataaaaaatgataaaggggatatcaccaccgatcccacagaaatacaaactaccatcagagaatactacaaacacctctacgcaaataaactagaaaatctagaagaaatggataaattcctcgacacatacactctcccaagactaaaccaggaagaagttgaacctctgaatagaccaataaaaggagctgaaattgtggcaataatcaatagtttaccaaccaaaaagagtccaggaccagacggattcacagccgaattctaccagagcacccacttggatctgaagaagagagataatgggcctttctacaattctggtggaaaacaaaagaacacaactacattgttaaagaagtcaggatggtttaaaacaagtcatagtgatattgattttcctttaaagatgccagtggatgaaaaaagaaaggaaggacagaaggaaagaaagatgaagtcaattcgggaggatcgaaacggcagatcgcaaaaaacagtacatacagaaggagacatgaacatgaacatcaaaaaaattgtaaaacaagccacagttctgacttttacgactgcacttctggcaggaggagcgactcaagccttcgcgaaagaaaataaccaaaaagcatacaaagaaacgtacggcgtctctcatattacacgccatgatatgctgcagatccctaaacagcagcaaaacgaaaaataccaagtgcctcaattcgatcaatcaacgattaaaaatattgagtctgcaaaaggacgttgatgtgtgggacagctggccgctgcaaaacgctgacggaacagtagctgaatacaacggctatcacgttgtgtttgctcttgcgggaagcccgaaagacgctgatgacacatcaatctacatgttttatcaaaaggtcggcgacaactcaatcgacagctggaaaaacgcgggccgtgtctttaaagacagcgataagttcgacgccaacgatccgatcctgaaagatcagacgcaagaatggtccggttctgcaacctttacatctgacggaaaaatccgtttattctacactgactattccggtaaacattacggcaaacaaagcctgacaacagcgcaggtaaatgtgtcaaaatctgatgacacactcaaaatcaacggagtggaagatcacaaaacgatttttgacggagacggaaaaacatatcagaacgttcagcagtttatcgatgaaggcaattatacatccggcgacaaccatacgctgagagaccctcactacgttgaagacaaaggccataaataccttgtattcgaagccaacacgggaacagaaaacggataccaaggcgaagaatctttatttaacaaagcgtactacggcggcggcacgaacttcttccgtaaagaaagccagaagcttcagcagagcgctaaaaaacgcgatgctgagttagcgaacggcgccctcggtatcatagagttaaataatgattacacattgaaaaaagtaatgaagccgctgatcacttcaaacacggtaactgatgaaatcgagcgcgcgaatgttttcaaaatgaacggcaaatggtacttgttcactgattcacgcggttcaaaaatgacgatcgatggtattaactcaaacgatatttacatgcttggttatgtatcaaactctttaaccggcccttacaagccgctgaacaaaacagggcttgtgctgcaaatgggtcttgatccaaacgatgtgacattcacttactctcacttcgcagtgccgcaagccaaaggcaacaatgtggttatcacaagctacatgacaaacagaggcttcttcgaggataaaaaggcaacatttgcgccaagcttcttaatgaacatcaaaggcaataaaacatccgttgtcaaaaacagcatcctggagcaaggacagctgacagtcaactaa

SEQ ID NO: 154268 - DNA, 7007 bp, Homo sapiens
atgcccttgagagccttcaacccagtcagctccttccggtgggcgcggggcatgactatcgtcgccgcacttatgactgtcttctttatcatgcaactcgtaggacaggtgccggcagcgctctgggtcattttcggcgaggaccgctttcgctggagcgcgacgatgatcggcctgtcgcttgcggtattcggaatcttgcacgccctcgctcaagccttcgtcactggtcccgccaccaaacgtttcggcgagaagcaggccattatcgccggcatggcggccgacgcgctgggctacgtcttgctggcgttcgcgacgcgaggctggatggccttccccattatgattcttctcgcttccggcggcatcgggatgcccgcgttgcaggccatgctgtccaggcagcctaacttcgatcattggaccgctgatcgtcacggcgatttatgccgcctcggcgagcacatggaacgggttggcatggattgtaggcgccgccctataccttgtctgcctccccgcgttgcgtcgcggtgcatggagccgggccacctcgacctgaatggaagccggcggcacctcgctaacggattcaccactccaagaattggagccaatcaattcttgcggagaactgtgaatgcgcaaaccaacccttggcagaacatatccatcgcgtccgccatctccagcagccgcacgcggcgcatctcgggcagcgttgggtcctggccacggtctggaaacgcggaagtcagcgccctgcaccattatgttccggatctgcatcgcaggatgctgctggctaccctgtggaacacctacatctgtattaacgaagcgctggcattgaccctgagtgatttttctctggtcccgccgcatccataccgccagttgtttaccctcacaacgttccataaccgggcatgttcatcatcagtaacccgtatcgtgagcatcctctctcgtttcatcggtatcattacccccatgaacagaaatcccccttacacggaggcatcagtgaccaaacaggaaaaaaccgcccttaacatggcccgctttatcagaagccagacattaacgcttctggagaaactcaacgagctggacgcggatgaacaggcagacatctgtgaatcgcttcacgaccacgctgatgagctttaccgcagctgcctcgcgcgtttcggtgatgacggactgggcggcggccaaagctgtcggacagtgctccgagaacgggtgcgcatagaaattgcatcaacgcatatagcgctacagcacgccatagtgactggcgatgctgtcggaatggacgatatcccgcaagaggcccggcagtaccggcataaccaagcctatgcctacagcatccagggtgacggtgccgaggatgacgatgagcgcattttccgcaccctgaaggaatacctgtctcatgaacaggatatgctgcgtcttcgcatcatgatctggcgcactcttgcgaccgacacctttgacatcgctctgccggttaaccagtcctttgatgtatgggcaaccatcattcgtggcaaattccagactgtatatcgcgacattattgagcgcgttaaatcttctgacagctgtgacgtctctggatctgaagtgttaaagtttcacgtaatacgaacgccgagcacttctcaggcaccgtgtatgaaatctaacaatgcgctcatcgtcatcctcggcaccgtcaccctggatgctgtaggcataggcttggttatgccggtactgccgggcctcttgcgggatatcgtccattccgacagcatcgccagtcactatggcgtgctgctagcgctatatgcgttgatgcaatttctatgcgcacccgttctcggagcactgtccgaccgctttggccgccgcccagtcctgctcgcttcgctacttggagccactatcgactacgcgatcatggcgaccacacccgtcctgtggatctgcctcgctggcctgccgcagttcttcaacctcccggcgcagcttttcgttctcaatttcagcatccctttcggcataccattttatgacggcggcagagtcataaagcacctcattacccttgccaccgcctcgcagaacgggcattccctgttcctgccagttctgaatgaaagtttggccattaaagactggcataggcttggttatgccggtactgccgggcctcttgcgggatatcgtccattccgacagcatcgccagtcactatggcgtgctgtagcgctatatgcgttgatgcaatttctatgcgcacccgttctcggagcactttttgaccgctttgccgcagccaagtcctgcaacttcgctacttggagccactatcgactacgcgatcatgcgaccacacccgtcctgtggatctgcctcgctggcctgccgcagttcttcaacctcccggcgcagcttttcgttctcaatttcagcatccgtttcggcataccattttatgacggcggcagagtcataaagcacctcattacccttgccaccgcctcgcagaacgggcattccctgttcctgccagttctgaatggttctaaggctctggaatattccaatgggatttttgattgccaatctcccacctctccattcatgggaagtttgcgagctctgcaccttgtggaagacctgcgtggattgttagagatgatggaaacagatgagaaagaaggcttgagatgccagatcccagattcaacagcagaaacgcttgttgaatggcttcagagtcaaatgaccaacagaagaattcttaacagttctagaaccaagaagattaacatcatgtttattccatattttaaaattcattgtctgcattctgctcttggagtagctgaaacagaaaaagagacagcagagcacctagatctggctggtgcttcttctcggccaaaagattcacagaggaacagtcccttccagataccgcctccatctccagattccaaaaagaaatccagaggtatcatgaaactctttggaaacctggggccttacggaggacatcgccgttctaaccagcgtgcctatacttcgcggccattcctgttcatctcaagcaatataggctcgagcatgtccatgcggcaaccaggttcgcctgggtgtcggatgtgctcagaggctgcgaaacggtcctactggcggtccaaaacgcgctacatgtttcttattgccttatggccgtgtttgtaccgccagtgctacttcagcgtcaatagggcactctggccgcgccgcacattcagcagcgtttttcagcgcgttttcgatcaacgtttcaatgttggtatcaacaccaggtttaactttgaacttatcggcactgacggttaccttgttctgcgctggctaatcacgctggataccaaggctgatgttgtagatgttggtgcggttgctggcgcctatatcgccgacatccccgatggggaagatcgggctcgccacttcgggctcatgagcgcttgtttcggcgtgggtatggtggcaggccccgtggccgggggactgttgggcgccatctccttgcatgcaccattccttgcggcggcggtgctcaacggcctcaacctactactgggctgcttcctaatgcaggagtcgcataagggagagcgtcgaccgatgcccttgagagccttcaacccagtcagctccttccggtgggcgcggggcatgactatcgtcgccgcacttatgactgtcttctttatcatgcaactcgtaggacaggtgccggcagcgctctgggtcattttcggcgaggaccgctttcgctggagcgcgacgatgatcggcctgtcgcttgcggtattcggaatcttgcacgccctcgctcaagccttcgtcactggtcccgccaccaaacgtttcggcgagaagcaggccattatcgccggcatggcggccgacgcgctgggctacgtcttgctggcgttcgcgacgcgaggctggatggccttccccattatgattcttctcgcttccggcggcatcgggatgcccgcgttgcaggccatgctgtccaggcagcctaacttcgatcattggaccgctgatcgtcacggcgatttatgccgcctcggcgagcacatggaacgggttggcatggattgtaggcgccgccctataccttgtctgcctccccgcgttgcgtcgcggtgcatggagccgggccacctcgacctgaatggaagccggcggcacctcgctaacggattcaccactccaagaattggagccaatcaattcttgcggagaactgtgaatgcgcaaaccaacccttggcagaacatatccatcgcgtccgccatctccagcagccgcacgcggcgcatctcgggcagcgttgggtcctgcagatccggctgtggaatgtgtgcttttgcaaaaagcttcacgctgccgcaagcactcagggcgcaagggctgctaaaggaagcggaacacgtagaaagccagtccgcagaaacggtgctgaccccggatgaatgtcagctactgggctatctggacaagggaaaacgcaagcgcaaagagaaagcaggttctccggccgcttgggtggagaggctattcggctatgactgggcacaacagacaatcggctgctctgatgccgccgtgttccggctgtcagcgcaggggcgcccggttctttttgtcaagaccgacctgtccggtgccctgaatgaactgcaggacgaggcagcgcggctatcgtggctggccacgacgggcgttccttgcgcagctgtgctcgacgttgtcactgaagcgggaagggactggctgctattgggcgaagtgccggggcaggatctcctgtcatctcaccttgctcctgccgagaaagtatccatcatggctgatgcaatgcggcggctgcatacgcttgatccggctacctgcccattcgaccaccaagcgaaacatcgcatcgagcgagcacgtactcggatggaagccggtcttgtcgatcaggatgatctggacgaagagcatcaggggctcgcgccagccgaactgttcgccaggctcaaggcgcgcatgcccgacggcgaggatctcgtcgtgacccatggcgatgcctgcttgccgaatatcatggtggaaaatggccgcttttctggattcatcgactgtggccggctgggtgtggcggaccgctatcaggacatagcgttggctacccgtgatattgctgaagagcttggcggcgaatgggctgaccgcttcctcgtgctttacggtatcgccgctcccgattcgcagcgcatcgccttctatcgccttcttgacgagttcttctgagcgggactctggggttcgaaatgaccgaccaagcgacgccaacctgccatcacgagatttcgattccaccgccgccttctatgaaaggttgggcttcggaatcgttttccgggacgccggctggatgatcctccagcgcggggatctcatgctggagttcttcgcccaccccgggctcgatcccctcgcgagttggttcagctgctgcctgaggctggacgacctcgcggagttctaccggcagtgcaaatccgtcggcatccaggaaaccagcagcggctatccgcgcatccatgcccccgaactgcaggagtggggaggcacgatggccgctttgattccaacctatggaactgatgaatgggagcagtggtggaatgcctttaatgaggaaaacctgttttgctcagaagaaatgccatctagtgatgatgaggctactgctgactctcaacattctactcctccaaaaaagaagagaaaggtcgttcgctccaagctgggctgtgtgcacgaaccccccgttcagcccgaccgctgcgccttatccggtaactatcgtcttgaagtccaacccggtaagacacgacttatcgccactggcagcagccactgcagaactttaaaagtgctcatcattggaaaacgtttcttcggggcgaaaactctcaaggatcttaccgctgttgagatccagttcgatgtaacccactcgtgcacccaactgatcttcagcatcttttactttcaccagcgtttctgggcacttgtccggctgcccccccacatctcacagtgtgacgaagtcttccggttcttcgaggctcgacccgaggatgtcaaccctccaaaagagaggcaaatggaaggttgtggacagagccctggaacctctccacagcagcctcccttcactctgcaggtagttactgagtgccagctgtatgccagcccaggcctgggtacagagcagccaccccaaaaaggctgggggaatggaattgggttggccgagctgaaggaaggcctacagagccctttggagcctctggcggaaggggccatccccagacatagccggagggagctgtccaaaaagcctgtgtttcctactgtgcttagggtgactgcctggggtttcctggtgcccttctcctggggaggcctgggctccaacctcccactgagggagccactggttggtgctgcaggaaccagaggaaagagcctggcagccgcagggaagctgagtttctgtaacgagtgtggagacaggactgtgattcactcaaggcctgaggtcggcgccaacaaaggttatcaggaaggcctgcagggaggaggccaggctcatgtgtcccttgttccagaagagccagatcaggatagtgcccatgtccccagtgactgctgggctctgaaggtcacccccaagtcagctgtctggcagcccagccggcctcttgagcagttcccagtggctgtaggccccgcagacaggcatcctgggcccagcagccaatgtcagctggcagacagaaggtggctcttcctggcttcacctctcactctgggaactctgaacggcaggatggcaatctccattccccagcgaggcctgctgcccgctgctg

SEQ ID NO: 154269 - DNA, 1694 bp, Homo sapiens
tcgggagccttcagggatgcgctgccagctgcgcccgggcgtttctccggacctgttgtgccagatcggaaagcgggttggctgtgcgcgggaccaagggggtggccttcggggagaacccccgagccgcaggcacctgctcccagtcccccttcttcccggtggctccacctcccggtgtaaggctttgggttctgtgccctgacaggttcacaggcgcctttcttctgagaacgaccctggccttgaacgtcagagccggggacgaaggcccccggaggctgctgcgagctccgcgcgttccttcgcgcccttccgcgccgctcgcgccggcgccggcctccacccccgcgcgccgccttccaccagtcccgatgcaggcgcccggccgggggccactcgggctgcggctgatgatgcccgggcgccggggggcgctgcgcgagcctggcggctgcggatcctgcctgggggtggcgctggccctgctgttgctgctactgcccgcctgctgccccgtgcgggcgcagaacgacacggagcccatcgtgctggagggcaagtgcctggtggtgtgcgactccagcccgtcggcggacggcgccgtcacctcctccctaggcatctccgtgcgctccggcagcgccaaggtggccttctccgccacgcggagcaccaaccacgagccgtccgagatgagcaaccgcaccatgaccatctatatcgaccaggtgtttagtaatattgggcaccactttgatcttgcttccagtatatttgtagcaccgagaaaagggatttatagcttcagcttccacgtggtcaaagtgtataacagacaaaccatccaggtcagtttattgtttgaatggctacccagtgatctcggcctgggcaggataccaggatgtcacgggagaagctgctagcaatggcgtgctgctgctcatggaaagggaagacaaagtgcatctcaaacttgagagaggcaacctcatggggggctggaaatactccacattctcgggcttcttggtgtttcctctataaacacagagccccctagatggtgggggaatggcaaactggacccagggactccgccctttaaaacaccctggaacttactgggaattggacaccttgtttccaacctccgttcagactgtttgcagtaggaaggaatgatttcctttggaaaccttccagtacttttgttttttgttttttgggattattgacatttcctcgggaacctggcctctaattagttttagatgacaaggtcttaaggagaaatgaaattatcgatttgagcaatttgcacctgtgattgtaaagtcaatatcggattttattgttgggaccatggacctcttttgcttgtatgttgtattgtcgtcccaacggaaggagagctcctgactccaggatgggctgctggttgcagtcagggcttgaagtaggatcccagtcaataaccacctgctggacagtcctttgacatgtgttctgtgtgtgtctgtatagccttaagaaaaagaatggcttcactttcattctgtattcttccccccaccatgtggctgggaggacttgggagggggatggggacattggggaacctgttcaagaagtgctttattccagaggaagcaaatttttgcacgattgggactgcaatttttgttttg

SEQ ID NO: 154270 - DNA, 401 bp, Homo sapiens
aaaggcgcaagcagtcctgtgcaggtgccgggccctgttgcagcttccacagaagccctgttgcaggaggcccagtgctctggcctgagttgggttgtggccttaccccaggtgaagcaagagaaggcggatacccaggacgagtggacaccaggcacagctgtcctgacttctcccgtattggtgcctggctgccctagcaaggcagtagacccaggcctgccttctgtgaagcaagagccacctgacccagaggaggacaaggaggagaacaaggatgattctgcctccaaattggccccagaggaagagatcacggagattttcagcctgggtggaccccgcttccgagatacagcagtctgattgccaaggtccaaagaccttaaaaaaccacgaaa

SEQ ID NO: 154271 - DNA, 678 bp, Homo sapiens
  misc_feature (1)...(678): n = a,t,c or g
agcagttcctttccttatttattcaattacattttcaattgctatctccctgaggaagtatgtagagacactgccaggtctcatccagaagccacttacaattactcatgaacatggcttgtttaggttgttttgtggtggctttaattatattacctttctccaacccagctcccccacccttaaaatccaacttcttatactcaggctcttgggaggagaagatgcaccaactttctactctttctcttcctttcccgcttacttcttctagaagctcaaagtactcttaggcctgctcttctggtttggtagtaggtttttcctcctagggttgattcacacacaagccctggcaaccaatctagggtccagcccctagtagatcagtgttgtctctcataaagccagtctgcaaatatcaccttgaatcctacagtctgtagaagcctccagtctactgctttctagctccaggttttttaaggtctttggaccttggcaaccagactgctgtgcgtgtagccaaggtgggcttcaaggtagggccaagatggtgccgtcgggcagagctgggcctcttttcgacgacggtaggtggggcgatccctgcccatnctcagactctgaccagacacttggcagcagccgcttcatggcaaactgcacctcgtgccg

SEQ ID NO: 154272 - DNA, 1602 bp, Homo sapiens
atgataagagaacagaagatataccataaatatttggcacagagacgtgaggaagaaaaagctcaggagaaagaatttgacagaatattagaggaagacaaggcaaagaagttggctgagaaggacaaggagctgagacttgaaaaggaggcaaggagacagcttgtggatgaggtcatgtgtacaagaaaacttcaagttcaagaaaagtcccagtatgtaaagctgctcctggctgcccaccccacaggagacaggatccgaagcaaagttgagctgactcgatacctgggccctgcgtgtgatctcaccctcttcgacttcaaacaaggcatcttgtgctatccagcccccaaggcccatcccgtggcggttgccagcaagaagcgaaagaagccttcaaggccagccaagactcggaaacgtcaggttggaccccagagtggtgaggtcaggaaggaggccccgagggatgagaccaaggctgacactgacacagccccagcttcattccctgctcctgggtgctgtgagaactgtggaatcagcttctcaggggatggcacccaaaggcagcggctcaaaacgttgtgcaaagactgtcgagcacagagaattgccttcaaccgggaacagagaatgtttaagcagccctacacgaaccgccggcagaaccgcaagtgcggggcctgtgcagcctgcctacggcggatggactgtggccgctgcgacttctgctgcgacaagcccaaattcgggggcagcaaccagaagcgccagaagtgtcgttggcgccaatgcctgcagtttgccatgaagcggctgctgcccagtgtctggtcagagtctgaggatggggcaggatcgcccccaccttaccgtcgtcgaaagaggcccagctctgcccgacggcaccatcttggccctaccttgaagcccaccttggctacacgcacagcccaaccagaccatacccaggctccaacgaagcaggaagcaggtggtggctttgtgctgcccccgcctggcactgaccttgtgtttttacgggaaggcgcaagcagtcctgtgcaggtgccgggccctgttgcagcttccacagaagccctgttgcaggaggcccagtgctctggcctgagttgggttgtggccttaccccaggtgaagcaagagaaggcggatacccaggacgagtggacaccaggcacagctgtcctgacttctcccgtattggtgcctggctgccctagcaaggcagtagacccaggcctgccttctgtgaagcaagagccacctgacccagaggaggacaaggaggagaacaaggatgattctgcctccaaattggccccagaggaagaggcaggaggggctggcacacccgtggaacctcagtggacagtatctacccagagagacaattgtaggtctctagctggagctacctacactcctgtgggactgaaaggtatccgtgtggaagcatctaactaccacctgttcagcttcgatgatgtgggtgtcctgcagaagaagctggtgcccttcctcacagagttaaatatgcatctggcccaggaattagagaagctgaaaggatga

SEQ ID NO: 154273 - DNA, 1761 bp, Homo sapiens
atggctgaggactggctggactgcccggccctgggccctggctggaagcgccgcgaagtctttcgcaagtcaggggccacctgtggacgctcagacacctattaccagagccccacaggagacaggatccgaagcaaagttgagctgactcgatacctgggccctgcgtgtgatctcaccctcttcgacttcaaacaaggcatcttgtgctatccagcccccaaggcccatcccgtggcggttgccagcaagaagcgaaagaagccttcaaggccagccaagactcggaaacgtcaggttggaccccagagtggtgaggtcaggaaggaggccccgagggatgagaccaaggctgacactgacacagccccagcttcattccctgctcctgggtgctgtgagaactgtggaatcagcttctcaggggatggcacccaaaggcagcggctcaaaacgttgtgcaaagactgtcgagcacagagaattgccttcaaccgggaacagagaatgtttaagcgtgtgggctgtggggagtgtgcagcctgccaggtaacagaagactgtggggcctgctccacctgcctcctgcagctgccccatgatgtggcatcggggctgttctgcaagtgtgaacggagacgctgcctccggattgtggaaaggagccgagggtgtggagtatgccggggctgtcagacccaagaggattgtggccattgccccatctgccttcgccctccccgccctggtctcaggcgccagtggaaatgtgtccagcgacgttgcctacggggtaaacatgcccgccgcaagggaggctgtgactccaagatggctgccaggcggcgccccggagcccagccactgcctccaccacccccatcacagtccccagagcccacagagccgcagccctacacgaaccgccggcagaaccgcaagtgcggggcctgtgcagcctgcctacggcggaatggatgtggccgctgcgacttctgctgcgacaagcccaaattcgggggcagcaaccagaagcgccagaagtgtcgttggcgccaatgcctgcagtttgccatgaagcggctgctgcccagtgtctggtcagagtctgaggatggggcaggatcgcccccaccttaccgtcgtcgaaagaggcccagctctgcccgacggcaccatcttggccctaccttgaagcccaccttggctacacgcacagcccaaccagaccatacccaggctccaacgaagcaggaagcaggtggtggctttgtgctgcccccgcctggcactgaccttgtgtttttacgggaaggcgcaagcagtcctgtgcaggtgccgggccctgttgcagcttccacagaagccctgttgcaggcagtagacccaggcctgccttctgtgaagcaagagccacctgacccagaggaggacaaggaggagaacaaggatgattctgcctccaaattggccccagaggaagaggcaggaggggctggcacacccgtgatcacggagattttcagcctgggtggaacccgcttccgagatacagcagtctggttgccaagtctgcagggcaggcactcgggaagggaagatggatgtaaagtgtgggagaccgaggacacagtggagcccacgagcacgagctggaacccacgaggatggcctggaacccatgtcagtctctcaccacctccagcttcgatgatgtgggtgtcctgcagaagaagctggtgcccttcctcacagagttaa

SEQ ID NO: 154274 - DNA, 1650 bp, Homo sapiens
atggctgaggactggctggactgcccggccctgggccctggctggaagcgccgcgaagtctttcgcaagtcaggggccacctgtggacgctcagacacctattaccagagccccacaggagacaggatccgaagcaaagttgagctgactcgatacctgggccctgcgtgtgatctcaccctcttcgacttcaaacaaggcatcttgtgctatccagcccccaaggcccatcccgtggcggttgccagcaagaagcgaaagaagccttcaaggccagccaagactcggaaacgtcaggttggaccccagagtggtgaggtcaggaaggaggccccgagggatgagaccaaggctgacactgacacagccccagcttcattccctgctcctgggtgctgtgagaactgtggaatcagcttctcaggggatggcacccaaaggcagcggctcaaaacgttgtgcaaagactgtcgagcacagagaattgccttcaaccgggaacagagaatgtttaagcgtgtgggctgtggggagtgtgcagcctgccaggtaacagaagactgtggggcctgctccacctgcctcctgcagctgccccatgatgtggcatcggggctgttctgcaagtgtgaacggagacgctgcctccggattgtggaaaggagccgagggtgtggagtatgccggggctgtcagacccaagaggattgtggccattgccccatctgccttcgccctccccgccctggtctcaggcgccagtggaaatgtgtccagcgacgttgcctacggggtaaacatgcccgccgcaagggaggctgtgactccaagatggctgccaggcggcgccccggagcccagccactgcctccaccacccccatcacagtccccagagcccacagagccgcaccccagagccctggccccctcgccacctgccgagttcatctattactgtgtagacgaggacgagctacagcggctgctgcccagtgtctggtcagagtctgaggatggggcaggatcgcccccaccttaccgtcgtcgaaagaggcccagctctgcccgacggcaccatcttggccctaccttgaagcccaccttggctacacgcacagcccaaccagaccatacccaggctccaacgaagcaggaagcaggtggtggctttgtgctgcccccgcctggcactgaccttgtgtttttacgggaaggcgcaagcagtcctgtgcaggtgccgggccctgttgcagcttccacagaagccctgttgcaggaggcccagtgctctggcctgagttgggttgtggccttaccccaggtgaagcaagagaaggcggatacccaggacgagtggacaccaggcacagctgtcctgacttctcccgtattggtgcctggctgccctagcaaggcagtagacccaggcctgccttctgtgaagcaagagccacctgacccagaggaggacaaggaggagaacaaggatgattctgcctccaaattggccccagaggaagaggcaggaggggctggcacacccgtgatcacggagattttcagcctgggtggaacccgcttccgagatacagcagtctggttgccaaggtccaaagaccttaaaaaacctggagctagaaagcagtag

SEQ ID NO: 154275 - DNA, 1824 bp, Homo sapiens
atggctgaggactggctggactgcccggccctgggccctggctggaagcgccgcgaagtctttcgcaagtcaggggccacctgtggacgctcagacacctattaccagagccccacaggagacaggatccgaagcaaagttgagctgactcgatacctgggccctgcgtgtgatctcaccctcttcgacttcaaacaaggcatcttgtgctatccagcccccaaggcccatcccgtggcggttgccagcaagaagcgaaagaagccttcaaggccagccaagactcggaaacgtcaggttggaccccagagtggtgaggtcaggaaggaggccccgagggattgagaccaaggctgacactgacacagccccagcttcattccctgctcctgggtgctgtgagaactgtggaatcagcttctcaggggatggcacccaaaggcagcggctcaaaacgttgtgcaaagactgtcgagcacagagaattgccttcaaccgggaacagagaatgtttaagcgtgtgggctgtggggagtgtgcagcctgccaggtaacagaagactgtggggcctgctccacctgcctcctgcagctgccccatgatgtggcatcggggctgttctgcaagtgtgaacggagacgctgcctccggattgtgggaaaggagccgagggtgtgggagtatgccggggttttcaagacccaagaggatttttgggccattgccccatctgccttcgccctccccgccctggtctcaggcgccagtggaaatgtgtccagcgacgttgcctacggggtaaacatgcccgccgcaagggaggctgtgactccaagatggctgccaggcggcgccccggagcccagccactgcctccaccacccccatcacagtccccagagcccacagagccgcaccccagagccctggccccctcgccacctgccgagttcatctattactgtgtagacgaggacgagctacagccctacacgaaccgccggcagaaccgcaagtgcggggcctgtgcagcctgcctacggcggaatggatgtggccgctgcgacttctgctgcgacaagcccaaattcgggggcagcaaccagaagcgccagaagtgtcgttggcgccaatgcctgcagtttgccatgaagcggctgctgcccagtgtctggtcagagtctgaggatggggcaggatcgcccccaccttaccgtcgtcgaaagaggcccagctctgcccgacggcaccatcttggccctaccttgaagcccaccttggctacacgcacagcccaaccagaccatacccaggctccaacgaagcaggaagcaggtggtggctttgtgctgcccccgcctggcactgaccttgtgtttttacgggaaggcgcaagcagtcctgtgcaggtgccgggccctgttgcagcttccacagaagccctgttgcaggaggcccagtgctctggcctgagttgggttgtggccttaccccaggtgaagcaagagaaggcggatacccaggacgagtggacaccaggcacagctgtcctgacttctcccgtattggtgcctggctgccctagcaaggcagtagacccaggcctgccttctgtgaagcaagagccacctgacccagaggaggacaaggaggagaacaaggatgattctgcctccaaattggccccagaggaagaggcaggaggggctggcacacccgtgatcacggagattttcagcctgggtggaacccgcttccgagatacagcagtctggttgccaaggtccaaagaccttaaaaaacctggagctagaaagcagtag

SEQ ID NO: 154276 - DNA, 2212 bp, Homo sapiens
  misc_feature (1)...(2212): n = a,t,c or g
atggctgaggactggctggactgcccggccctgggccctggctggaagcgccgcgaagtctttcgcaagtcaggggccacctgtggacgctcagacacctattaccagagccccacaggagacaggatccgaagcaaagttgagctgactcgatacctgggccctgcgtgtgatctcaccctctttgacttcaaacaaggcatcttgtgctatccagcccccaaggcccatcccgtggcggttgccagcaagaagcgaaagaagccttcaaggccagccaagactcggaaacgtcaggttggaccccagagtggtgaggtcaggaaggaggccccgagggatgagaccaaggctgacactgacacagccccagcttcattccctgctcctgggtgctgtgagaactgtggaatcagcttctcaggggatggcacccaaaggcagcggctcaaaacgttgtgcaaagactgtcgagcacagagaattgccttcaaccgggaacagagaatgtttaagcgtgtgggctgtggggagtgtgcagcctgccaggtaacagaagactgtggggcctgctccacctgcctcctgcagctgccccatgatgtggcatcggggctgttctgcaagtgtgaacggagacgctgcctccggattgtggaaaggagccgagggtgtggagtatgccggggctgtcagacccaagaggattgtggccattgccccatctgccttcgccctccccgccctggtctcaggcgccagtggaaatgtgtccagcgacgttgcctacggcaccttgctcaccgtctgcgtcgccgtcatcagagatgtcagcgacgcactcccctggctgtggctcccccaactggtaaacatgcccgccgcaagggaggctgtgactccaagatggctgccaggcggcgccccggagcccagccactgcctccaccacccccatcacagtccccagagcccacagagccgcaccccagagccctggccccctcgccacctgccgagttcatctattactgtgtagacgaggacgagctaaagcggctgctgcccagtgtctggtcagagtctgaggatggggcaggatcgcccccaccttaccgtcgtcgaaagaggcccagctctgcccgacggcaccatcttggccctaccttgaagcccaccttggctacacgcacagcccaaccagaccatacccaggctccaacgaagcaggaagcaggtggtggctttgtgctgcccccccctggcactgaccttgtgtttttacgggaaggcgcaagcagtcctgtgcaggtgccgggccctgttgcagcttccacagaagccctgttgcaggaggcccagtgctctggcctgagttgggttgtggccttaccccaggtgaagcaagagaaggcggatacccaggacgagtggacaccaggcacagctgtcctgacttctcccgtattggtgcctggctgccctagcaaggcagtagacccaggcctgccttctgtgaagcaagagccacctgacccagaggaggacaaggaggagaacaaggatgattctgcctccaaattggccccagaggaagaggcaggaggggctggcacacccgtgatcacggagattttcagcctgggtggaacccgcttccgagatacagcagtctggttgccaaggtccaaagaccttaaaaaacctggagctagaaagcagtagactggaggcttctacagactgtaggattcaagtctgcagggcaggcactcgggaagggaagatggatgtaaagtgtgggagaccgaggacacagtggagcccacgagcacgagctggaacccacgaggatggcctggaacccatgtcagtctctcaccacctccagcttcgatgatgtgggtgtcctgcagaagaagctggtgcccttcctcacagagttaaatatgcatcttggcccaggaattagagaagctgaaaggatggatcctggggaaggtggagcagctgcaggcctggctgcaggcctgactactgcccacaccaacgaggtgatctagcagatacatggcaacgtgtgaactgcaacaacgcctggtgccccagcacaanccttccaagtgtaaaacaatgtgctgctgcttcanttccgccctccggttatcaagcaaaatgtctcttgtggnccatctttactggaagagagttc

SEQ ID NO: 154277 - DNA, 1949 bp, Homo sapiens
atggctgaggactggctggactgcccggccctgggccctggctggaagcgccgcgaagtctttcgcaagtcaggggccacctgtggacgctcagacacctattaccagagccccacaggagacaggatccgaagcaaagttgagctgactcgatacctgggccctgcgtgtgatctcaccctctttgacttcaaacaaggcatcttgtgctatccagcccccaaggcccatcccgtggcggttgccagcaagaagcgaaagaagccttcaaggccagccaagactcggaaacgtcaggttggaccccagagtggtgaggtcaggaaggaggccccgagggatgagaccaaggctgacactgacacagccccagcttcattccctgctcctgggtgctgtgagaactgtggaatcagcttctcaggggatggcacccaaaggcagcggctcaaaacgttgtgcaaagactgtcgagcacagagaattgccttcaaccgggaacagagaatgtttaagcgtgtgggctgtggggagtgtgcagcctgccaggtaacagaagactgtggggcctgctccacctgcctcctgcagctgccccatgatgtggcatcggggctgttctgcaagtgtgaacggagacgctgcctccggattgtggaaaggagccgagggtgtggagtatgccggggctgtcagacccaagaggattgtggccattgccccatctgccttcgccctccccgccctggtctcaggcgccagtggaaatgtgtccagcgacgttgcctacggcaccttgctcaccgtctgcgtcgccgtcatcagagatgtcagcgacgcactcccctggctgtggctcccccaactggtaaacatgcccgccgcaagggaggctgtgactccaagatggctgccaggcggcgccccggagcccagccactgcctccaccacccccatcacagtccccagagcccacagagccgcaccccagagccctggccccctcgccacctgccgagttcatctattactgtgtagacgaggacgagctacagccctacacgaaccgccggcagaaccgcaagtgcggggcctgtgcagcctgcctacggcggatggactgtggccgctgcgacttctgctgcgacaagcccaaattcgggggcagcaaccagaagcgccagaagtgtcgttggcgccaatgcctgcagtttgccatgaagcggctgctgcccagtgtctggtcagagtctgaggatggggcaggatcgcccccaccttaccgtcgtcgaaagaggcccagctctgcccgacggcaccatcttggccctaccttgaagcccaccttggctacacgcacagcccaaccagaccatacccaggctccaacgaagcaggaagcaggtggtggctttgtgctgcccccgcctgggcactgaaccttgtgttttttacgggaagggcgcaagcagtcctgtgcaggtgccgggccctgttgcagcttccacagaagccctgttgcaggaggcccagtgctctggcctgagttgggttgtggccttaccccaggtgaagcaagagaaggcggatacccaggacgagtggacaccaggcacagctgtcctgacttctcccgtattggtgcctggctgccctagcaaggcagtagacccaggcctgccttctgtgaagcaagagccacctgacccagaggaggacaaggaggagaacaaggatgattctgcctccaaattggccccagaggaagaggcaggaggggctggcacacccgtgatcacggagattttcagcctgggtggaacccgcttccgagatacagcagtctggttgccaagtctgcagggcaggcactcgggaagggaagatggatgtaaagtgtgggagaccgaggacacagtggagcccacgagcacgagctggaacccac

SEQ ID NO: 154278 - DNA, 2453 bp, Homo sapiens
tttgtgtgatactccccccggccgcggaggaggaggaaggggaggagggcgaggcgggaggttgcaggagggaccctcgttcatgggtccacgaggcctagagtggcggaagataccggcctggttgcctaactggctactgctgcttcctgtggcctccatggctgaagacatggctgtactgcccggccctgggccctggctggaagcgccgcgaattctttcgcaagtcaagggccacctgtggacgcttaaacacctattaccagagccccacaggagacaggatccttagcaaagttgagctgactcgatacctggggccctgcgtgtgatctcaccctcttcgacttcaaacaaggcatcttgttgctatccaagcccccaaaggcccatcccgttgggcggtttgccaggcaagaagcgaaagaagcctttcaaggccagccaagacttcggaaacgtcaggttggaccccagagtggtgaggtcaggaaggaggccccgagggatgagaccaaggctgacactgacacagccccagcttcattccctgctcctgggtgctgtgagaactgtggaatcagcttctcaggggatggcacccaaaggcagcggctcaaaacgttgtgcaaagactgtcgagcacagagaattgccttcaaccgggaacagagaatgtttaagcgtgtgggctgtggggagtgtgcagcctgccaggtaacagaagactgtggggcctgctccacctgcctcctgcagctgccccatgatgtggcatcggggctgttctgcaagtgtgaacggagacgctgtctccggattgtggaaaggagccgagggtgtggagtatgccggggctgtcagacccaagaggattgtggccattgccccatctgccttcgccctccccgccctggtctcaggcgccagtggaaatgtgtccagcgacgttgcctacggggtaaacatgcccgccgcaagggaggctgtgactccaagatggctgccaggcggcgccccggagcccagccactgcctccaccacccccatcacagtccccagagcccacagagccgcaccccagagccctggccccctcgccacctgccgagttcatctattactgtgtagacgaggacgagctaaagcggctgctgcccagtgtctggtcagagtctgaggatggggcaggatcgcccccaccttaccgtcgtcgaaagaggcccagctctgcccgacggcaccatcttggccctaccttgaagcccaccttggctacacgcacagcccaaccagaccatacccaggctccaacgaagcaggaagcaggtggtggctttgtgctgcccccgcctggcactgaccttgtgtttttacgggaaggcgcaagcagtcctgtgcaggtgccgggccctgttgcagcttccacagaagccctgttgcaggcagtagacccaggcctgccttctgtgaagcaagagccacctgacccagaggaggacaaggaggagaacaaggatgattctgcctccaaattggccccagaggaagaggcaggaggggctggcacacccgtgatcacggagattttcagcctgggtggaacccgcttccgagatacagcagtctggttgccaaggtccaaagaccttaaaaaacctggagctagaaagcagtagactggaggcttctacagactgtaggattcaaggtgatatttgcagactggctttatgagagacaacactgatctactaggggctggaccctagattggttgccagggcttgtgtgtgaatcaaccctaggaggaaaaacctactaccaaaccgagaagagcaggcctaagagtacttttgagcttctagaagaagtaagcgggaaaggaagagaaagagtagaaagttggtgcatcttctcctccccaagagcctgagtataagaagttggaattttaagggtgggggagctgggttggagaaaggtaatataattaaagccaccacaaaacaacctaaacaagccatgttcatgagtaattgtaacgtggcttctggatgagacctggcagtgtctctacatacttcctcagggagatagcaatcgcaaaatgtaattgaataaataagagaaaggaactgatatttggtgtgttcctctgtggacccagtttatttaatccttaaaaataatatttttgggaagacattgattttgtccatttaaggtgaatgggaaaactaagactcattaatttgtccaatgtcgaacagctggtgttagtagagcctagactcaaacccagcttttaaagcccttgttctttactccactaaactgtaacctgtaatcctgtatgcactaacaggagtttggggtgaccttgaaaccaaaaaaaaacaaaattactataataaatcccttacattcctgtctctagcatggttta

SEQ ID NO: 154279 - DNA, 391 bp, Homo sapiens; identical to SEQ ID NO: 145335

SEQ ID NO: 154280 - DNA, 399 bp, Homo sapiens
  misc_feature (1)...(399): n = a,t,c or g
gctcgtaccccctcaccaagtttgtctgagagctctgaagatgaaaaaccaacaaaaaagcacaaaaaaggtaaagcattaagacttaagagaagattctgggtggtcttaatgtctgctcttccttgcattcactgatagttgataatcaactcaagtgtgaaaggggaaggtgtggggaagcatagtttaattgggaaagcagggagtatcagtggaaggctggtgcnnnnnnnnnnnnnnnnnnnnnnnnnnnnnnnnnnnnnnnnnnnnnnnnnnnnnnnnnnnnnnnnnnnnnnnnnnnnnnnnnnnnnnnnnnnnnnnnnnnnnnnctcaggatgggaattaccttgtacagccactcgacatatcaaaggtgacagacatccaagttggctt

SEQ ID NO: 154281 - DNA, 452 bp, Homo sapiens
atccttaattaaattaatccccccccccccctttcctgagtgctgagcgcgaacccgaggagatgaaccctttaactaaggtgaagctgatcaacgagctgaatgaacgagaggtccagcttggggtggccgataaggtgtcctggcactccgagtacaaggacagcgcctggatcttcctgggagggcttccttatgaactgactgaaggggacatcatctgtgtgttctcacagtaagtgtcctttcatttcctgcctcctgagtcgacagagtactttgtttctgtaatacattttgtggcatcacaaaaaccacttattttcactctaggctgaatggcatccctgcatggggagggctggagcttctgttctagatcagtcccaggacatggttctagaatgttctgtgggagatccaagaggtttgttaatttgggagggcatctt

SEQ ID NO: 154282 - DNA, 1426 bp, Homo sapiens
tgattcctgagtgctgattgcgaaccctaggtgatgaagtttggcgtcagctttcttttgaggaaggagcagcgggccactgggggtggtccaccgggactggtgtggtacagcgtctgcggggccgacgggcggtagcggcgcggcgactggaacagctcgtcccctagttttgctcttcctcagctccggccggatcgcacttacttggctgcttttctgcctaccctgcccaccccccccgccaccgtgaagtcctttaactagggtgaagctgatcaacgagctgaatgaacgagaggtccagcttggggtggccgataaggtgttctggcactccgagtacaaggacagcgcctggatcttcctgggagggcttccttatgaactgactgaaggggacatcatctgtgtgttctcacaatatggggagattgttaacattaatctcgtgcgggacaagaaaactgggaaatccaaaggattctgtttcctctgctatgaagaccagaggagcacaattctggccgtcgacaattttaatgggatcaagatcaatggaagaactattcgagtggatcatgtgtctaactatcgggctcctaaggactcagaagaaatagatgatgtgaccagacaactccaggagaagggctgtggggctcgtaccccctcaccaagtttgtctgagagctctgaagatgaaaaaccaacaaaaaagcacaaaaaagcacctcagaatgcgactgtatttggagataaggtctttgaagaggtaactcaggatgggaattaccttgtacagccactcgacatatcaaaggtgacagacatccaagttggcttctcggaggcactctcctggaggcctagacagtggctgcttcatgctgctgccaaggttgttctccttatgcacattccccacttcctagcatacaaaaaggaaaaaaagaaaaaaaagaaagaaaaagagaaagccgaccgggaggtacaggcagagcaaccatcctcttcgtcacccagacgcaagacagtaaaggaaaaggatgacactggccctaagaagcacagcagcaagaactcagagagagctcagaagtcagagcccagggaggggcagaagctccccaaatccaggacggcctactctggtggagcagaggacctagagagggagctgaagaaggagaaacccaagcacgagcacaagtcctcaagcaggagggaggcaagagaagaaaagaccaggattagggacagagggcggagctcagatgcacattctagctggtataatgggcgttctgaagggcgtagttatagaagtagaagtaggagccgagataaatcccataggcataaaagggcccgacgctcccgggagcgggagtcttcgaatcccagtgaccgttggcgtcactga

SEQ ID NO: 154283 - DNA, 1836 bp, Homo sapiens
gcgctgattcctgagtgctgagcgcgaacccgaggagatgaaccctttaactaaggtgaagctgatcaacgagctgaatgaacgagaggtccagcttggggtggccgataaggtgtcctggcactccgagtacaaggacagcgccctggatctccttggggagggcttccttatgaactgactgaagggggacatcatctgtgtgttctcacaatatggggagattgttaacattaatctcgtgcgggaccaagaaaactgggaaatcccaaaggattctgtttcctctgctatgaagaccagaggagcacaattctggccgtcgacaattttaatgggatcaagatcaaaggaagaactatccgagtggatcatgtgtctcaactatcgggctcctaaggactcagaagacatagatgatgtgacccgacaactccaggagaagggctctggggctcgtcccccctcaccaactttgtctgagagctctgaagatgaaaaacccacaaaaaagcacaaaaaagacaaaaaaggaaaaaaagaaaaaaaagaaagaaaaagagaaagccgaccgggaggtacaggcagagcaaccatcctcttcgtcacccagacgcaagacagtaaaggaaaaggatgacactggccctaagaagcacagcagcaagaactcagagagagctcagaagtcagagcccagggaggggcagaagctccccaaatccaggacggcctactctggtggagcagaggacctagagagggagctgaagaaggagaaacccaagcacgagcacaagtcctcaagcaggagggaggcaagagaagaaaagaccaggattagggacagagggcggagctcagatgcacattctagctggtattattggcgttcttgaagggcgtagttatagaagtagaagtaggagccgagataaatcccataggcataaaagggcccgacgctcccgggagcgggagttcttcgaatcccagtgaccgttggcgtcactgaagacttcagctgcacagtagatttggaaataattatgtttttttaaatgcagacaaattcaggtgggggggtactatttttgtatctaaaactttctgggggcctgggattcttttaaatcccctggactatttagagtcattgggagggctgcagtttcaacagctagatatcctggatattgtttgcaccatcccattgtccctgtaccagagtatgtatcctgaactttggttcataaatatggctcttgaacccatagaccccagttgaagatggaattttcaggaaagggaaaatactagataattctagaattctagtcttcgtgttagatgtttatagcccagcatcttgggacctttccagttactaggtttggacagcttgatgtgaacgaatgggataggatttttaaaatcaagccagctccatgcccaaaccttccctgtttgcagaactttttaatgtcttttctttttccattaaaacttttttgttcgatatgcctctttccacattttttccttgcaatgtatttattatttatttgtatttaggtgaaattcacataacataaagttaaccattttaaagggaacaattcagtggcatttggtactgaacatccacagtgttgtgtaaccattgcctctgtctagttccaaaacatttttttatcatcccaaaatgaaaccctgtagccattaaacaagagctccccgtttcctccctcctccctgtccctagcaaccaccagtggacttcctgtttatgggtttgcctattctggatctttcataaaaatggaattacacaaa

SEQ ID NO: 154284 - DNA, 418 bp, Homo sapiens
ctactactactaaattcgcggccgcgtcgacgttgccttctctcatgtcatgcctgtatgtatacacagacacatatgaaatgcatataggcatgcttggtatgtgtatatgcatatacagagaaagaaatgttttaactacttggaaagactaccttaagacaaatgaagtcttccctcttccctatagtaataagaaggtaggctccccattcaattttgcaatcttctgctactatatttacagaaaagctgccttttacaatgccgagatcatggtgtacctcagaatctctgaccaagagcaaataagcattttttcttattgtttttcagtatgttgcaagagaaagagagagagtttcaagaagtgtaattgtggcttgtatcaacactgttactttcgtacattggtaag

SEQ ID NO: 154285 - DNA, 996 bp, Homo sapiens
atgcgtgatttgtttggtacgcgattgcgacgtgctgaagacgtatttccaccggtgatcggggttgctgcccataaaggtggcgtttacaaaacctcagtttctgttcatcttgctcaggatctggctctgaaggggctacgtgttttgctcgtggaaggtaacgacccccagggaacagcctcaatgtatcacggatgggtaccagatcttcatattcatgcagaagacactctcctgcctttctatcttggggaaaaggacgatgtcacttatgcaataaagcccacttgctggccggggcttgacattattccttcctgtctggctctgcaccgtattgaaactgagttaatgggcaaatttgatgaaggtaaactgcccaccgatccacacctgatgctccgactggccattgaaactgttgctcatgactatgatgtcatagttattgacagcgcgcctaacctgggtatcggcacgattaatgtcgtatgtgctgctgatgtgctgattgttcccacgcctgctgagttgtttgactacacctccgcactgcagtttttcgatatgcttcgtgatctgctcaagaacgttgatcttaaagggttcgagcctgatgatctaaaaaaatcattcaagagcccagaacccaggctctttactcctgaagaattctttagaatttttaatagatccattgatgccttcaaggactttgtagtggcatctgaaactagtgattgtgtggtttcttcaacattaagtcctgagaaagttctcagggcctcatggaaaagagactcggataattctcttaaatcattatccccaacacaaatccggctgggcgaggtgctcacgcctgtaatgtcagcattttgggaggccgaggtctggaattctggtgattctgatgacatggctctagattttgattgcacatcctcagaggtagatgctgaaagcacaaacagaaaggtacttcgtccctag

SEQ ID NO: 154286 - DNA, 3985 bp, Homo sapiens
  misc_feature (1)...(3985): n = a,t,c or g
cgccctcccgattcttccctccgcgcccttgcctgcttctcgcctaccccgggctccgaaagggaaggaggcgtgtccggagcaggcgggcgggaactgtataaaagcgccggcggctcagcagccgggcttcgctcgccgcctcgcgccgagactagaagcgctgcgggaagcagggacagtggagagggcgctgcgctcgggctacccaatgcgtggactatctgccgccgctgttcgtgcaatatgctggagctccagaacagctaaacggagtcgccacaccactgtttgtgctggatcgcagcgctgcctttccttatgaagaagacacaagtgagtagggcgcgcccgggagctcccaggctctccaggaaaaatcgcgcccggtgccccggggaagccggcgctccctgggacttgcagctggggcgtgcagggctgtgcctgccgggtgnnnnnnnnnnnnnnnnnnnnnnnnnnnnnnnnnnnnnnnnnnnnnnnnnnnnnnnnnnnnagatactacaaagataaatcagttgcacaagttcttgaaactctacagtgtaataaggaaaaataagtcatgcataaaagcaactataatacataatagaaaatgttattttcaagccgatgtgtaggttatgtgtgttcgagagagagagagagaagacagattactttctgctagggttcaagaatggcttcctgttgggtaagaaaatattttccttaagtggctaaaaagctgtgtttcaaaatattcttttgatgtctcacaaattcagtggaattctcttaggtctaaaaatatacatctctctcactttaacttggtgtgctattgtagattattggattaaagcactgctcagggattatgctgcttcttgccaagcagtctacatttaaagtagaaataagatgtttcttttggtgccataaggtatacattttatgcattctctagtttttagaagataccctaagggctaagtctttaacatgctgctacaagtttattcctaattgccattgggaaattggctgaagaaagtttttaacaaaagttaacaatattgtcattgagagaataattcaaaatggattttaactaaaagcttttaaaaactttggtgagcatagcttgaatgcgtaatatttaattgcatttaagccaataacatatattagactggtctttttgtgcatcaaggcattagatgttaaaagtttgaatgattacagatcttaactgatgatcaccaagcaatttttctgttttcatttagacttggattctcacttgcatttatcttcagctgctcctatttaatcctctcgtcaaaactgaagggatctgcaggaatcgtgtgactaataatgtaaaagacgtcactaaattggtaagtaaggaatgctttaccgtgctgtgtaaaaaagagctgtggctctttttcctgtgcttgttgataaaagatttagatttttcttgccccaaagtaatgttttcctaaagtggggaaagtaatcactgggtcatggataagggtttatagaaagcaggtagtgagatatttagggtcatggataatttgttggtaaaactggctagttgcacaccactgctgtgactgcttctttgctggtcttctccccatccttcataggcagtgaaggaccttggagagttcgctgtgtgctgatgggcttgccccagcttgttccccataatctctccagtgggtttcccagcatgttctattccccttcagaaatggctattctcccaattcaatcagcaggaagaccctgtcacatgtcagtgggtgtttgctccttcagggaacatagagaggtgattcattgcccacatgttgaagggactcatctccctggtttgtcacattgaactcttccctcaagcgaaagcatttgcattgcttcccnnnnnnnnnnnnnnnnnnnnnnnnnnnnnnnnnnnnnnnnnnnnnnnnnnnnnnnnnnnngaattccaagatcacaggtggaagctgaaattcagatcatgtttccaaaactcagtaggttatacctagccaggcataactgaatttggagtctaaaagatctgtattatcacttttttattttgaaggatgccttttgattacagagggaaatcaaggattaaaaatcaatatacatgtaaatattgaaattcattggtaactttaaaaagcacaacagttttgtgtgcttttctccaaagcactacaaatatgattaattgatgtataagaattttcttatggaatttttttttttgtctctgtaggtggcaaatcttccaaaagactacatgataaccctcaaatatgtccccgggatggatgttttggtatgtaaactacatttctgagtttcattttagtagctcatagaagaaatgggatcattcatattgagatagtacactagctgctatttaggagcttgcttattgtcaggatttgaagaatttatctttggaatttgacttgcaggcttttttttccccctcttnnnnnnnnnnnnnnnnnnnnnnnnnnnnnnnnnnnnnnnnnnnnnnnnnnnnnnnnnnnncctgttacaagagtccctcctcctattacaatagtccctcctcctcctgtcacactagtcccttctcttcctgttacaataacccctgtcctcctattacaacattttaagtaatgtaatattaattttaaaaatctggccaggcacggtggttcatgcttgtaatcccagcacattgggaagctgagacgggtggatcatttgaggtcaggaagtttgagacagcctggccaacatggtgaaacttcctctctactaaaaataaaaaagtagccaggcatggtggcaggcacttgtaatctgagctactcgagaggctgaggcaggagaatcacttgagtaactaaaacgatagctttgaagagtactccgagttttatggcacttacttattaaaatagctgttttgtctcttttttcatatcttgcagccaagtcattgttggataagcgagatggtagtacaattgtcaagacagcttgactgatcttctggacaagttttcaaatatttctgaaggcttgagtaattattccatcatagacaaacttgtgaatatagtggatgaccttgtggagtgcgtgaaagaaaactcatctaaggatctaaaaaaatcattcaagagcccagaacccaggctctttactcctgaagaattctttagaatttttaatagatccattgatgccttcaaggactttgtagtggcatctgaaactagtgattgtgtggtttcttcaacattaagtcctgagaaagggaaggccaaaaatccccctggagactccagcctacactgggcagccatggcattgccagcattgttttctcttataattggctttgcttttggagccttatactggaagaagagacagccaagtcttacaagggcagttgaaaatatacaaattaatgaagaggataatgagataagtatgttgcaagagaaagagagagagtttcaagaagtgtaaattgtggcttgtatcaacactgttactttcgtacattggctggtaacagttcatgtttgcttcataaatgaagcagctttaaacaaattcatattctgtctggagtgacagaccacatctttatctgttcttgctacccatgactttatatggatgattcagaaattggaacagaatgttttactgtgaaactggcactgaattaatcatctataaagaagaacttgcatggagcaggactctattttaaggactgcgggacttgggtctcatttagaacttgcagctgatgttggaagagaaagcacgtgtctcagactgcatgtaccatttgcatggctccagaaatgtctaaatgctgaaaaaacacctagctttattcttcagatacaaactgcag

SEQ ID NO: 154287 - DNA, 1430 bp, Homo sapiens
gacgccagcgcctgcagaggctgagcagggaaaaagccagtgccccagcggaagcacagctcagagctggtctgccatggacatcctggtcccactcctgcagctgctggtgctgcttcttaccctgcccctgcacctcatggctctgctgggctgctggcagcccctgtgcaaaagctacttcccctacctgatggccgtgctgactcccaagagcaaccgcaagatggagagcaagaaacgggagctcttcagccagataaaggggcttacaggagcctccggggaaagtggccctactggagctgggctgcggaaccggaggcaactttcagttctacccaccgggctgcagggtcacctgcctagacccaaatccccactttgagaagttcctgacaaagagcatggctgagaacaggcacctccaatatgagcggtttgtggtggctcctggagaggacatgagacagctggctgatggctccatggatgtggtggtctgcactctggtgctgtgctctgtgcagagcccaaggaaggtcctgcaggaggtccggagagtactgagaccgggaggtgtgctctttttctgggagcatgtggcagaaccatatggaagctgggccttcatgtggcagcaagttttcgagcccacctggaaacacattggggaaggctgctgcctcacccaaaagacctggaaagatcttgagaaacgcccagttctccgaaaaccaaagggaacgacaggccccttccctgaaggggcctaccctgtgggcccccccatcattggaaaggggctgcaaaaaattctttcccagggatggagagcaagaaacgggagctcttcagccagataaaggggcttacaggagcctccgggaaagtggccctactggagctgggctgcggaaccggagccaactttcagttctacccaccgggctgcagggtcacctgcctagacccaaatccccactttgagaagttcctgacaaagagcatggctgagaacaggcacctccaatatgagcggtttgtggtggctcctggagaggacatgagacagctggctgatggctccatggatgtggtggtctgcactctggtgctgtgctctgtgcagagcccaaggaaggtcctgcaggaggtccggagagtactgagaccggtaggtgtgctctttttctgggagcatgtggcagaaccatatggaagctgggccttcatgtggcagcaagttttcgagcccacctggaaacacattggggaaggctgctgcctcacccaaaagacctggaaagatcttgagaaacgcccagttctccgaaaaccaaagggaacgacaggccccttccctgaaggggcctaccctgtgggcccccccatcattggaaaggggctgcaaaaaattctttcccagg

SEQ ID NO: 154288 - DNA, 1196 bp, Homo sapiens; identical to SEQ ID NO: 139504

SEQ ID NO: 154289 - DNA, 865 bp, Homo sapiens
  misc_feature (1)...(865): n = a,t,c or g
ctccaacatcgtcgtcatagaccaagagatgcccatgaacagccatgaaagtgccagtcaagggaagtattcagtgctttgttgtagagttgttggatagaggcacaggatcatttcatgttgttgaggagaaaggagcaacagcctcctcccaccttattaaaaatagagatttaaaaaaaacctctaatttcctcgaagtacagaatctcaagaggtagctctaaggagaatccctctgggttttgagcgcaattccttctttccaggggggccttaattcttggaactgcttttcctttaaatagagaaaatctctctggagccaaaaaatcggccttccccccaaattcccaatcttgtcggcccccactttttcttgttccgggagacttccaaagccaagtccccaacttccttcctttcaagccaagttcgggcccgnacccggcggccggcaagggccagcccttctccttccttcctgcgtggcgcagcacaggccctgagcgcgcgaccccaggccctgggcgccccgccgcatgctcggcgctggaagccccgagtttgcgtggcccttcgggttattccgctcaagagccgccgcgtcgccccatctcggcgcgaatctgaaagcgctttcgggggagaagatgttgggggcactggtgagtacactgcacaagtgacaaaatgttttcagctcctggaggcgaaaggtgcagagtcgctctgtgtccgtgagccgggcgcgacctcgctcagtcggcttctcggtccgagtccccgggtacgaggaaagaccacagggggttctcgcggaaaagcgggccgcggaccctgcgcgggctggctggcgacgagg

SEQ ID NO: 154290 - DNA, 204 bp, Homo sapiens
gcagctgccagacccggccatcgaggaccagggtggggagtacgtgcagcccatgctgagcaagtacgcggctgtgtgcgtgcgctgccctggctacggcaccagagggccggcaaagaagccaagtgcccatagccagagccaggcttcttcctcgcctgagtggattccagagcttctgccctgtccagacgcagctgcagg

SEQ ID NO: 154291 - DNA, 627 bp, Homo sapiens
gaccgtgtcgacgagattcgtgcagccaacagggatgaattctacagccgaccctccaagttagctgacttctgggggaacaacaacgagatcctcagtgggctggacatggaggaaggcaaggaaggaggcacatggctgggcatcagcacacgtggcaagctggcagcactcaccaactacctgcagccgcagctggactggcaggcccgagggcgagcacagcaaagggagacgtcatttgctactatgggaaccgaggggagcctgatcctatcgttttgacgccaggcacctacgggctgagcaacgcgctgctggagactccctggaggaagctgtgctttgggaagcagctcttcctggaggctgtggaacggagccaggcgctgcccaaagatgtgctcatcgccagcctccctgatgtgctcaacaatgaagaggcgtgagtggggcggtcctgctggggtgagccccagtgtcccgccaccagggcagagggaaaggcaggccctgctgccccgggaggcccatggaagtggccaggctgggtccccagctgcagggaagctgatggatatcctgtcctccctgcctgtccccttgagccagctgaggtttccaaca

SEQ ID NO: 154292 - DNA, 425 bp, Homo sapiens
gcccaggcacagcccagaggctacaggagcagcggtcccagctaatgcctctgtcctgttgggagggccccagtcagtgcccacctgctcaccctgcacaagtcaagctgggccagcccctcgtcgctggggcctggacctggatgcagggagccgcggagtccccgaaggccgctggatcaggaagcgctcagacgcccgcgcagcccgaagctttggcgcagccccgggggcggggcgccaggaggtggcagcctccgagcgacagcgcgcccagccaacgggacaccggcatgcggcgcgccgccccgcccctcgctgcgcggcccaatggtgaacgcgccggcttcgggctgggcggtactgggctggctgcggtggcgcgcgggcgcggcacccggaagtcggcggcggtggcggaggcg

SEQ ID NO: 154293 - DNA, 604 bp, Homo sapiens
aaacaacccttgcagttccccggccactccccagagccagttaggccaccaggtggtctggggctagacccggctgcgggcgggccacagagggactaatggccaccacttctctccatcctgcaggcagctgccagacccggccatcgaggaccagggtggggagtacgtgcagcccatgctgagcaagttacgcggctgtgtgcgtgcgcttgcctggctacggcaccagaaacaacactatcatcctggtagatgcggacggccacgtgaccttcactgagcgtagcatgatggacaaggacctctcccactgggagaccagaacctatgagttcacactgcagagctaaccccacctctgggcctggccagtgggctcctggggggccctgccttgaggggcactgtggacaggaaaccttcctttgccatactgcattgcactgcccgtggcttggccagcatcccccggatcagggccctgtggtttgcgtgtaacccatctgtgtccccatgcccagttcagggtctgcctttatgccagtgaggagcagcagagtctgatactaggtctaggaccggccgaggtataccatgaaca

SEQ ID NO: 154294 - DNA, 2367 bp, Homo sapiens
atgacatgtctccgcaccggcaccgagggggcgcagggcggcgtggggagggggacccaggccgggggtccgggtggcgcgccctctctcacccccgaggcggcaggagcagcgcggcgcgaggacacctccgggccgtcggtgcccctgagcttcccggcggcgcgctgccccaggaaagttcccggcctgccgcccctcgggctgttggaaagtttcggcggctgcagggccctggcagctaggcgccaagcgtcgcgcggggcgggcacggctgcggggtcgggccgcgctcggctggagtgctcagtgcaagacgcccggacgggcccagcgcgcaacccgagaccccgggccagccctcccgccctcacgcggcccgtgcgcaaagcggaccgggccggcgacgcgaatctccgccccgccccatctgacagcaaattttcccattggtcgagagacccggcgcggcacggcaaccggcgccgattgggcggatgcgcggagatgacggcttgccattgggcctccgggatgtcagtcccggcggatgaccggccccctcgcggaggggccgcggccccgcacctgcccgaacctctgcggcggcggtggcagggtacgcgggaccgctccctcccagccgacttacgagaacatcccccgaccatccagccccgagcagggactggcagagccggcgccccttccccggactctggccgcgtagcctccgccaccactcccagttcacaggtatccttcttcagcgcctgctactcgctgcgcgctgcgcgccgctccctcctgtcgacatcgaattgtattcttcacgcaagccgcgagagagagttctgctgctatccccattttacagttgggaaacagcctcagagaggttctcacttgcttgaacacagtcgtctgaccctggggcctgggggctctctcatcctcacgcccctgggtccccgcagcggggagacgatggagggagccgcggagtccccgaaggccgctggatcaggaagcgctcagacgcccgcgcagcccgaagctttggcgcagccccgggggcggggcgccaggaggtggcagcctccgagcgacagcgcgcccagccaacgggacgccggcatgcggcgcgccgccccgcccctcgctgcgcggcccaatggtgaacgcgccggcttcgggctgggcggtactgggctggctgcggtggcgcgcgggcgcggcacccggaagtcggcggcggtggcggaggcgacctcgcgacctgtgtcagcagagccgccctgcaccaccatgtgcatcatcttctttaagtttgatcctcgccctgtttccaaaaacgcgtacagggtcctgggtgcccagccagttctcatgccacccaagctgctgtgtgcaggaaggctcatcttggcagccaagcagggatgagattctacagcacgaccctccaagttagctgactgcgtgggggaacaacaacgagatcctcagtgggctgggacatgggagggaagggcaaggaaggagggcacatgggctggggcattcagcacacgtgggcaagctgggcagcacttcaccaactaccttgcagccgcagctggactggcaggcccgagggcgaggtgaacttgtcacccactttttgaccactgacgtggacagcttgtcctacctgaagaaggtctctatggagggccatctgtacaatggcttcaacctcatagcagccgacctgagcacaggaaaggggagacgtcatttgctactatgggaaccgaggggagcctgatcctatcgttttgacgccaggcacctacgggctgagcaacgcgctgctggagactcgcctggtggaagctgtgctttgggaagcagctcttcctggaggctgtggaacggagccaggcgctgcccaaggatgtgctcatcgccagcctcctggatgtgctcaacaatgaagaggcgcagctgccagacccggccatcgaggaccagggtggggagtacgtgcagcccatgctgagcaagtacgcggctgtgtgcgtgcgctgccctggctacggcaccaggtattgcagcaccgtgggtgcgccacctcctatcccatgtcccacctcccacgctagagggccggcaaagaagccaagtgcccatagccagagccaggcttcttcctcgcctgagtggattccagagcttctgccctgtccagacgcagctgcaggaaccaacactatcatcctggtagatgcggacggccacgtgaccttcactgagcgtagcatgatggacaaggacctctcccactgggagaccagaacctatgagttcacactgcagagctaa

SEQ ID NO: 154295 - DNA, 386 bp, Homo sapiens
  misc_feature (1)...(386): n = a,t,c or g
gcagaatcagactatcaggaaaggagctggccatggccatagccagtcaagatctctgagcaacttaaagacattggtgtcattatatgaagcttgcatttaatacatttatacataatacatttgtacatttaattcataacgtctcttggtcacagatgccttatatataaaataagttgccagatctctaagattgcctagaacacctttgtatctcatttgatgtgatacccagaagagatcattggnnnnnnnnnnnnnnnnnnnnnnnnncaagaagatccttcgtgatcaccatgctgttctcatggtaagaactggagttatgtttttaaatttggaaatatgacattttatgtagcactttataaaaagtgaaagcg

SEQ ID NO: 154296 - DNA, 3141 bp, Homo sapiens
tggaggttaaaaaaattacagaaatccttacctgtgttactgagtagcaatactatttattatgtatgtattttaaaggcattaacattttttatttttcaggattaattggaattcttcaaaatgtcaggtgtggtacccacagcccctgaacagcctgcaggtgaaatggaaaatcaaacaaaaccaccagatccaaggcctgatgctcctcctgaatacaattctcattttttaccaagaccccctggaacagctgtccctccacctactggctacccaggaagcttgcctatgggatactacagtccacagcaacccagtaccttccctttgtaccagccagttggtggtatccatcctgtccggtatcagcctggcaaatatcctatgccaaatcagtctgttccaataacatggatgccagggccaactcctatggcaaactgccctcctggtctggaatacttagttcagttggaccaacatacatgttcttcagcattttgagcctctggaaatgatgacatgttttgaaactaataatagatatgatattaaaaacaactcagaccagatggtttacgttgtaacagaagacacagatgactttaccaggaatgcctatcggacactaaggcccttcgtcctccgggtcactgattgtatgggccgagaaatcatgacaatgcaaagacccttcagatgcacctgctgttgcttctgttgcccctctgccagacaagagctggaggtgcagtgtcctcctggtgtcaccattggctttgttgcggaacattggaacctgtgcagggcggtgtacagcatccaaaatgagaagaaagaaaatgtgatgagagttcgtggaccatgctcaacctatggctgtggttcagattctgtttttgaggtcaaatcccttgatggcatatccaacatcggcagtattatccggaagtggaatggtatgttatcagcaatggcagatgctgaccattttgacattcacttcccactagacctggatgtgaagatgaaagccatgatttttggagcctgcttcctcattgacttcatgtattttgaaagatctccaccacaacgttcaagatagagagacacagcaagccatcacctatggttaattttgaaaaatggaaaagttggattgggcttacagtcagcactcagttatttgcaagtgtatttctttgctttgtagagtatttttattgggtgttaactttgacagctgagagtgggcttgcaagaacacaatctaaaagtgtgtttcaattgagtatctctctagtagaataggagttcatcctgaaaagctgtgactcattaacccagtaaacatatacaaagtaagcttaaaacactataaacatgagataagggaaaatgaatccattagttttcatattaataggtagggaaacaataaggctttttaaagcagactttgttggcataaaataacctggcttctatccctaaccctttcctacctttcctctccgtcaacatgtcctcatactgaagacaaacttgtttcaatgatagccttcatttttaaaaacaaaaaggcaggcagacagaaataatgatgttttcttgcactaagaaggcactacttgtacacatatatcaaaacctcattctgcaaagtttttgaaggttccaatgggaaatttgattttattacaaaataaaccattttttaaggttaaaggttatatattccatgctagttttctcattcactggcatggatgatcaggagctgcctatatatgaaggcagaatcagactatcaggaaaggagctggccagggccacagccagtcaagatctctgagcaacttagagacattggtgtcattatatgaagcttgcatttaatacatttatacataatacatttgtacatttaattcataacgtctcttggtcacagatgccttatatataaaataagttgccagatctctaagattgcctagtacacctttgtatctcatttgatgtgataccccagaagagatccattgttttttgtttttgtttttgtttttttcaagaagatcccttcgtgatcaccatgctgttctcatggtaagaactggagttatgtttttaaatttggaaatatgacattttatgtagcactttataaaaagtgaaagcgacaaattccaccgctgcttaatactgctttgcttctttttattgacatgatagataaatatgtatctacacagagtaataataataaaacacagtaaacattctatttctctatggtctacagcatgccagtaaataatatgtaggaccaataataaattatcaattacacatttttgtgttaactaattaaaagcatagtgtataagtgagtacactctaattaacttgcttctgttgcactttagttttctacctgcatatggactgcattttttttttttaacacagtcagtatgtagaatgggatgtattcttctgctgctgcttattaaataaagaaagcctgagtgttcttagatggggttattctgagatgagggtcttagcctacagttctttttgaaatgaaaggtgctttgttttttaattatattcatcttttcagggtaaatttgtttttctgaggttctcgtaatgctcatttttacatgctgctactagcttttttttttaaaaaaagtaaaagttgctgctttctaaaatattaattgccttatatttgaaagtgccattgcaatcgtaagtagactatgtatttcctataatgatgtctgatatttaaataggaaatcagacaagcaatattcagaaagtttaagcatataaactttttatttttaacctgccctaaatccctgtattccaaaacctgctgcatcataataaatatatctatatatatttagcataagacgtgatatttttaatttcttttttaaaaaattatatttgtctcttagagttaaaattttctttatataatattgtcatatgtcatagttttaatacaattcacatgatttctatgtttcttaatgatattttgttgtgtaaaattgatcggattgattaaaaaacaaattctctggaaaaaaaaaaaaaaaa

SEQ ID NO: 154297 - DNA, 1717 bp, Homo sapiens
cagtatgcataagacccatggtctccaatcagccacatggtcaagggcatgaataattaaaagttggtgggaactcacaaagaccctcagagctgaggcgcccactccagtgggagctcacaaagaccctcagagctgagacacccacaacagtgggagctcacaaagaccctcagagctgagacacccacaacagcacctcgttcagctgccacatgtgtgaataaggatgcaatgtccagaagtgttggctgccctcccaagtgacaggtaacacttgcagaacctatctgaggacctgcccagcctcccgtttcaacgcagcccactctgctgctctacaaagtttcacatcaggggtcagcggctttgtaaaggggactccgcaggaacacagctgtgctggggctgctgctgctgtactgcggccagcagagctgagtgggacagtatttaccatctctggtccttttacagaacaagactgctgactcctcctcaatggacaaagacaaaaactcctgcctcctcgagactccttccttagaaaaatagcagatttttctctctgtgactgataaataattctgctaccaagactttctgaaggaaatcttcattttggggcttagataaaagaagaagaggtgcaagttttagccagaagtgagaagccataaggataacaagtagtcccagatcccaagaaccccaagaacaactcagggctttcatcccttaaatcctccataggatatctgtgattgtacaaaggcaaaggctagagacaaatgttaggagactataagaaatatttttaaaagttttccccttaaaacaatgtataaatgttaaggaagtaagcacacaaggaacagaatcattcctctgttcagcagtgtctcctgaagagtaggaatgaaatgaccatgacctcctgtgtgtcaaaagatgatgctactgacatgtcacaaattaggtctcactgattaatttacaagttctcaggcaaagtctagagcaggtaactgaaaccttcacgtcttattttaaaccatcctgtcaactcccacttcccctatcagggctatgaaatggactgagttgaggttcctctcctgtctgcccgcagggaggcagcactatctgctccccgccaccccaccgtgctccgtccgaggcgtgcacggcaaaccctcaacagtgccaccggctgccccttctccaacctcagcccagtctcaccagcctgcttctcacccactatcatctccaacctttctctttgaacccatcaaggatgccggcacacatgcctctctcttctcaagagacagacatctccccttccctacctgccacattcgtagaccacctcagccctgcctctccccaccacactgttctcaggggagcagaacaggaagagctgttacagcagctctgcgcatggcagcagcagcagctatgacaggaaaccaatccccaacacgcatttaatctgtcggggccaattcagcattcaagtatgaacttccgtgtttgccacttcatgtcagggcatgagacaaagtttcctctgagcttgaaattcaagtgaattttaacaaagtccctaccaatattctaactgtcaagaatacaggtatccaacgacataaaggtcacagaatatgtccaactacctaattcctaattttagaaagtttaaaataag

SEQ ID NO: 154298 - DNA, 872 bp, Homo sapiens
  misc_feature (1)...(872): n = a,t,c or g
ccgggtagcgctcgtctccgtcgcctccaacccccccggtccgaccagggaaggtgggatgctctgatggccgggctgcgngctgagcggcnggcggcggctgctctggcggccgcatcgctcctgctgcgtcgtgaggacccggggccgggggctggccccagcatggccgaaacagaagccctgtcgaagcttcgggaagacttcaggatgcagaataaatccgtctttattttgggcgccagcggagaaaccggcagaagtgctcttaaaggaaatcctggaagcagggcctgttttccaaagtcacgctcattgggccggaggaagctcaccttcgacgaggaagcttataaaaatgtgaatcaagaagtgggtggacttttgaaaagtttggatgactacgcctctgcctttcaaggtcatgattttgggattctgtttgcctggggtaccaccaggaggggaaagctgggggcggttaagggaagggcatatgcttctttttcccnttttttgcttggcccagtaatatcaagggttcttttcttgctcactctttttctttgtgcctgttgcaatgcttaaatgtgaataagcctttattgtttaagattctatatgctgcactaacctttggtatccttttaatagtactgataagttcgtctttcaaagttaatccttgagttcaggccccagtgccggagacgtcgtaaatatttacatgattttgcctattgtgattatcgctatcactacatcccctgactaagggaaaccatgatgtctgagtaaaactaattggtttatgctgttaacaatcagctgtttttccccttaataaatgtttgaaatttgaaaaaaaaaaa

SEQ ID NO: 154299 - DNA, 1871 bp, Homo sapiens
gcggccgccctgctcctgctgcgtcgtgaggacccggggccgggggctggccccaggtaacccctccgcgtatgggaccgagctgggccaggtctcctggccgggccggggataccgtggggtatgcccagtgatgccagcagcttgtggcacctgggcgcaccctccagctcgggccccttccgatgggtctgctggctcaggtgcgggcgatggccggggagccgcgccccgcacgtgactcagcactttccccagagcccggactgcggagaacaatatcctcctccctaacagataaacagcccttgttcctcgggataaggactggcagtcccctgacaccctaaagaccggcatctgtcgatgttatttccccagcatggccgaaacagaagccctgtcgaagcttcgggaagacttcaggatgcagaataaatccggtctttattttgggcgccactgtagaaaccggcagagtgctcttaaaggaaatcctggagcagggcctgttttccaaagtcacgctcattggccggaggaagctcaccttcgacgaggaagcttataaaaatgtgaatcaagaagtggtggactttgaaaagttggatgactacgcctctgccttttcaaggtcatgatgttggattctgttgcctggggtaccaccagagggaaagctggggcggaagggatttgttccgtgttgaccgagattatgttgctgaagtctgcagagctggaaaaagctggagggtgcaaacatttcaacttgctatcctctaaaggagctgataaatcaagcaattttttatatctacaagttaagggagaagtagaagccaaggttgaagaattaaaatttgaatcgttactctgtatttaggcctggagttctgttatgtgataggcaagaatctcgcccaggtgaatggctggttagaaagttctttggctccttacccagactcttgggcccagggggcattctgtgcctgtggtgaccgtggttagagcaatgctgaaccaatgtggtgagaccaagagacaagcagatggaactgctggagaaccaaggccatccatggacctgggggaaagcggcatggctcttctcaaggccatgaccacactgggagaaatggtttttatttgttcaaccttaacacccatgaccaaatcgggtaattttcagggtcttaaaaaaagttcagcatgttttaactttgtttgttttactatcctcaggcatccattccaatcaagaaatgatggtgctctgcatcagtggttcagagccctggttatacatatagatcactcagggagctttggaaaaataaaagatttgtccagccctatcctcaaacttgaatcaaaatttctggggtgtgggcacaataatctgtaattttctttgtttatacttcccctgatgccactggttccgattccactggctgggggggcctgctttggaaatgctttgtcttgcagagttcacagccagccatggaaaaaccttatgaccgtggcaaaatgagctctgctcttaaaattgttgacattcatgtctctgagttacaaaagtgctaattcactacatgtaattgtgtaagtaaacattgtgcctttactacttctttatgtaatagaagttatatacctaaggcttatataatacatggggggagggtttaaattaaagggattaaaggtggatgggacaactcctgggtgcctcttagattgcttgaaaatgcccatgtagtgtgatatgcagcatttcagcctatggggtgatataatagcagctaataggctttattctgcaagcaatcaaataataaatctattctgctaagaggtcc

SEQ ID NO: 154300 - DNA, 488 bp, Homo sapiens; identical to SEQ ID NO: 123513
  misc_feature (1)...(488): n = a,t,c or g

SEQ ID NO: 154301 - DNA, 473 bp, Homo sapiens
  misc_feature (1)...(473): n = a,t,c or g
agtgggtgnnaatggagacctagncagnctgtgagacattgaggagtgcgagagcatgcactaggatgatatcagaaagcatacagagatggagaatgaatttgccctcatcaagaaggatatggatgaagcttacaagaacaaggtagagctggagtctcacctggaagggcttactgaagagatcagcttcctcacgcaactgtatgaagaggagatccgggagctgcacgtcccagatctcggacacatctgtggtgctgtccattgacaacagtcgctccctggacatgaacagcatcatcgctgaggtcaaggcaccgtacgaggagatcgccaaccacaaccaggctgaggctgagagcatgagatcaaatatgaggagctgcagacgctggcttggaagcatgggatgacccgtggtgcacaaagactgagatctccaagatgaacaggaacatcagtcggctccc

SEQ ID NO: 154302 - DNA, 3636 bp, Homo sapiens
tcatgatttggctctctgtttgtctgttattggtgtataggaatgcttgtgatttttgccgttgattttatatcctgagactttgctgaagttgcttatcaacgtaagaagatttaggactgagacaactgggttttctaaatatacaatcatgtcatctgcaaacagagacaatttgacttcttctttttctaattgaaaaccctttatttctgtctcttgcctgattgcctggccaaagcttccaatactatgcttctcttcctgctttatttcattaagatgatcctcaatctctgatatcctttcttctgcttgatcgatttggctattgatgcttgtgtatgcttcatgatgtcctcgtgctgtgtttttcagctctatcaggtcatttatattcttctctaaactggttattctagttagcaattcatctaaccttttttcaaatttcttagctttcttgcagtcaggcccctctgctgcaggtctgctggagtttgctggaggtccactccagaccctgtttgcctgggtatcaccagtggaggctgcagaacagcaaagattgctgcctgttccttcctctggaagctttgtcccagaggggcacctgccagatgccagccagagctctcccgttctcatcaaagtatccctttcttctatcaggcgagtcaaataatcatccaaaccttcttccaatacactgccatgggggccatccttttttccacttgcaatctctgtggaatcctggtattgtttttgctcttgttgccttaacctgttcaattcatttcttatatccaacaattcttgtcgctcggtttttactgtatctttttcctcagcggcaaggtaacgtagtctcatctgttccaattcttcctgctgttttttaagacgagccatttgactttcttgctccctctgtttaagtctggcaagttctttcaaagctcgtccccactgctgcttgtaatgcagtttagacttagttgcagattccaactttctttcaagttcaaccttttccaaggtgagaagatttatttcagactgtagacggatttctggtttgttgttttgctggtccttgaactgttggaactctttttccaaaatcttatacttattttcagcatcattaagctgttgctgaaggcggtgtttatcctcttcgagctgtttgatttttaacctttctagttctacttggtgaatacagtcctctttggccctacggatagagtcctgcagttcttgcaggttccgctgacgttctgattgcagttcctttttttctctttgaagctctgattccacactagcaagctgctgctctcgcttctccaagtcaattagagttttttgaagttttccttctagaatagtatattcaggcacctttttctttactagtgattctctttctcggtcccttttcttccattcctctgcaagagcctgcatatgagccagttctttctgcttcagctgattttcaaatatatcttcttgcatctccttccacatttctagctcaagtgctgctttgtattctaacgtttcacgaggctctgtctggatctctgaaggacaaggtgctggaggaagagaagacggcttttgctgtacggcagatacaccctgagatgaatcagagataaaaatctcacgcatttttactagtccataatcttctagagtcactgtgtaagaaagatctgctatcctgttatttgatctacaaataaaataagaaataccctgtgctgctataacaggcacactttcactgtaagtttgacgccaacactgttcaccattagaacctaaaaaacgagttttttctgaagacaagatgttagaaagctggattctcgcaattcccagaagtaaatctttactcattttatccttgtgccatagttcaaccagtaatggaatccttaagaaggtgtcttgcagctgatgaggcatagttgcaaaatcaaatgcacagtaagactggggaagaaaaacttccatgtttttccgaacttctacaggaggattagtcataataggagctgcacttccaaagaatggatatgagtaccttaatatacagttgattggaaaaccaatctccaaggcatgtatactccttaagtctattgaaaagcaaaaatgatgtgatgttgctggtacagcaatcttctgtcctgaagctacttctgaagcattggatgtagtcactagctgggccagtgaagcaggtacagaagaactggcttttggatttggtttggtgtccttatcatactgtaaactttccacttcactttctgttgcatcatcttttgttggaggtgactggttgtgagatggaacaggggacactgttggtgattttggcccagtaagtgtcttctcctttatgggggttaaaactttcttctttgaatgctctggctcatgttcattctgggtctttaattcaattaaagaagttggggctagctccacaggaataggtgcaagcttctgtttggctctgtttggagggtcaagggtaaaagcaccttcgactgtgactgggtgctggttgatttctgtactgccctttttaagtaatccagttaaaggtatttctgtacttccaagtgactggtctccacagcagaggtgaatctgttccaactgggtagcaaatgctatggtcactgacataataaaggagtcagtacagtattctgctggtccaatctgatggtagcctccctcttcattcagcacagccacaatgtccttgggcaggacgtcagaggactcggacaccagcttcccatcacgtgtctcgatcttcacaaccacggccctggagtagctggtgcggctgaaggagctggcgcccaggccgtagctgaggccggggcttgtgaggcccccacaggccgagctcagaccacttgcatagccgctggtggtcttcgtatgaatactcatgttctgcatcccagactccagccggctctcctcgccctccagcagcttcttgtaggtggcgatctcgatgtccagggccagcctgacgttcatcagctcgcagctgccacgccatgtcctgcttggcccgctgcagggcggcctccagctcgacaacttggcgttagcatccttaatggccagctctccacactgctcggcatctgcaatggcggcctccaggaaagccctctggcctttgaggccctcattctcagcctggagccggctgatgttccggttcatctcggagatcttagtctttgtgcaccgcaggttatccccatgcttcccagccagactctgcagctcctcatccttgatctggtacatgctctcagcctcggcctggctgcggttggcgatctcctcgtactgtgccttgacctcagcgatgacgctgttcatgtccagggagcggctgttgtccatggacagcaccacagatgtgtctgagatccaggactgcagctcccggatctcctcttcatacagctgcctgaggaagttgatctcatcagtcagcccttccaggcgagactccagctctaccttgttaatgtaagcttcatccacaatccttcttgatgaggacaaattcat

SEQ ID NO: 154303 - DNA, 3979 bp, Homo sapiens
cgcctgcgccaccggcgcacacctgtaggctgaagtcgcgcatgctagatgggaacgttgtttcttctcccctaccccttttctgtggggctgttttagggacagactgcttccgggtcgaagggcttgcttccggagagcgggaaggctaaaacgcggtagctacaactgcagccaactttggttgtgtgtggaaaaggctttagccatggacaggagtggctttggagagatatcatcccctgtaatccgggaggcagaggtgacacggactgcacggaaacagagtgctcagaaaagagttttacttcaggcatctcaagatgaaaattttggtaatactacaccaagaaaccaggttatccctccgaactcctagctcatttcgacagccttttacccccaacaagccgaagcttactaaggcagccagatatttcctgcattcttggaacaggagggaagtcgccccgacttacgcagtcttcagggttctttggaaatctctccatggttactaatctggatgacagtaactgggcagctgcattttcatcacagcgttcccgggctgttcacaaacacagagccccacagtataacagaagatgtaactatcagtgctgttatgttacgtgaggatgatcctggagaagctgcatccatgagtatgttttctgatttcctgcagtcttttctgaagcactcttcgagtacagtttttgatcttgtggaagagtatgaaaacatctgtggtagtcaggtgaatatactgagtaaaatagtgagtcgagcaacacctggacttcaaaaattttcaaaaacagccagtatgctctggcttcttcaacaggagatggtcacatggaggctgctggcttctttgtatagagtgacccagaagtccttcaaggtgtccaactctggcccaagggccttcagtagccattcctacatgtgtgggcccagtgcctgcatcagctcctcgagcttctcccgaatgggcagcagcagtttccggggtagcctgggtggagactttggcagggccagtggtaggggaggcatcaccccagtcacggtcaaccagagcctgctgagcccccttaacctggaggtggaccccaacatccaagctgtgtgcacccaggtgaaggagcagatcaagaccctcaacaacaagtttgcctccttcattgacaagctgtacactctgggccaagagaagctgaagctggaggtggaacttgataacatgcaggggctggtggaggacttcaagaacaagtacgaggatgatatcaaaaagcatacagagatggagaatgaatttgtcctcatcaagaaggatatggatgaagcttacaagaacaaggtagagctggagtctcacctggaagggcttactgaagagatcagcttcctcaggcaactgtatgaagaggagatccgggagctgcagtcccagatctcggacacatctgtggtgctgtccattgacaacagtcgctccctggacatgaacagcatcatcgctgagactgagatctccaagatgaacaggaacatcagtcggctccaggatgagattgagggcctcaaaggccagagggcttccctggaggctgccatcgcagatgctgagcagcatggggagctggcagttaaggatgccaacaccaagctgtccaagctggaggctgttaatgccagtgaaaaaacagttgtggaagcgttatttcagagggattcacttgttcgacaaagtcagctggtggtagattggttagagagtattgccaaagatgaaattggagaattttctgataatattgagttttatgcaaaatcagtatattgggaaaatactctgcataccttaaaacaacggcagctgacttcttacgttggaagtgttcgtccgcttgtcactgaattggaccctgatgctcccataagacagaaaatgccccttgatgatctggatagagaagatgaagttagattactcaaatatctctttactctaatccgtgctggaatgacagaagagaaatcttctgttctggttactattgttacacggcaaatcacttcacaactcagtggtgtaaaacgaccattgtattatgctcatggattcagaggaggtctttctccgagagaagtccacattagaaaacatttagctcatggaactccagtcttagcagcccagtgtagaggctccaaatctgcttatctgggcagagaggaagcacgtacttcattccttgttctgaaaaatgccggtaaaccagtgggccttgtgcctgacctgctgtccttgtcaataattgtagatttccttctcaacatctctttccccacctccattcagagggccacttggagagaaaaccagttcctaaaaagatgcccagaaaaatcttggtcccagaccgtatcagctgtaggtgttccagttcccacagtcaaaccgtctgactttgtggagggctcagtggcacaaattcgctctgcactgtccggctttcttcgctatgtattgaatgaaagaacagctgacagaagagactttgtgtctcctctgaggtctcttcactccccagtgagtttgaagagaacctacagagaaactgggtcagactcagccagcctgcacccaggtgaaataaacagccttgttgctcacacaaagcctgtttggtggtctcttcacacggatgtgcgtgaaagatatcatgtgggctctgaaagcaagaaacaggaggacctgtttccctggggtttgaaggaagagaattgcgctggaaacagaacttggagcctccagtgggaggagtatgagaaggggagctactcagttaaactggatgggcctgggcttcagagaattacactggaaatggcagaggaaccttcagcttcttctgaaggcctgccagcttttgcaggaagccatctgcgtgcttggaggcaggagcctggggcatatggggatacaggtgatggagcagagcaccagcagcatgaagcacccaagagggcaatattcgcgtgtgaagggagtgggcctatatcacaagtgattgcttcaagcgtggatgacacaatatgtgggccaataagactggagaagaaattttctgtaacctctgagaagtatcctttctcttttctgaaagcttctggaaatgggcatctctctggttctctccaaggacatattcttgcaatacgagtatatttatccccacttgtttacaaagaagaaaacagagggaccagaggtgcccatgccataggacccacagctaataagacctgcaattcaagccacaagcctaaacccttggggaaagagattctctattcacattctaaagaaacaggaatggagaagttcctccaaactccagttccctgggcttggggaagggtggaagaggcggaggtctgggaccagtttcaagagcagagaggaattgtgtcccgcattaagcagcccactaggaagcctgccagcctggagagggatggctacattgtgcacattgacagaaatataagcagccttcacaaagattcctgggctcacagcatgacatgggaacagcagaagatcattaaaactgaggacagagatgacaagctctcaggcctaccctgtgaaaccctcaaagagaccttccctgatcaccccataggaaggagactagcagccctgatagatgtccacatcctaatccccgaaacttgtgaatatgttaccttacatggcaaaagaggccttgcagggattgagagagcagaagacctcaatgtgctattcctagagaaaggagatggatgcccagatggaaaagataatccatgcccttttatgtatcgctatggttttcaatcagcttaccgagcagtcttagatgatctgaggaatccccctctgaagtttttacatcggcaaaaactttga

SEQ ID NO: 154304 - DNA, 1239 bp, Homo sapiens
tctgggccaggagaagctgaagctggaggcggagttggcaacatgcaggggctggtggaggacttcaagaacaagtatgaggatgagatcaataagcgtacagagatggagaacgaatttgtcctcatcaagaaggatgtggatgaagcttacatgaacaaggtagagctggagtctcgcctggaagggctgaccgacgagatcaacttcctcaggcagctgtactgaagaggagatccgggagctgcagtcccagatctcggacacatctgtggtgctgtccatggacaacagccgctccctggacatggacagcatcattgctgaggtcaaggcacagtacgaggatattgccaaccgcagccgggctgaggctgagagcatgtaccagatcaagtatgaaggagctgcagaaccttggctgggaagcacggggatgacctgcggcgcacaaaagacctgagatctcttgagatgaacccggaacatcagccggctccaggcttgaagatttgaagggcctcaaaggccagagggcttccctgggaggccgccattggcagatgccgagcagcgttggagagctggccatttaaggatgccaacgccaagttgttccgagctggaggccgcccttgcagcgggccaagcaggacatggcatggcaactgcttgagtaccaggaactgatgaacatcaagctggccctggacatcgagatagccacctacaggaagctgctggagggcgaggagagccagctggactctgggatgcagaacatgagtatccatacaaagaccaccggcggctatgcgggtggtttgagctcggcctatggggacctcacagaccccggcctcagctacagcctgggctccagctttggctctggcgcgggctccagctccttcagccgcaccagctcctccagggccgtggttgtgaagaagatcgagacacgtgatgggaagctggtgtctgagtcctctgacgtcctgcccaagtgaacagctgcggcagcccctcccagcctacccctcctgcgctgccccagagcctgggaaggaggccgctatgcagggtagcactgggaacaggagacccacctgaggctcagccctagccctcagcccacctggggagtttactacctggggaccccccttgcccatgcctccagctacaaaacaattcaattgctttttttttttggtccaaaataaaacctcagctagc

SEQ ID NO: 154305 - DNA, 1827 bp, Homo sapiens
ttagtccacaggtcgcttttccccatatttctttgtaaactcttcagcattcttacagaattttttacggtccttagagtattcttcagctaggtcagcccgaagcgggtgctcaggctgggggtcattcaccagtgctatgagggactggattacagggtggagcgccgtgtcctccaccgacgtcaatgacgtgctgaggttcacccattcattcacctgcgaatgctgcaccgactggggaccgggctcctcactgttcttggaaaagttcagcttgatcagggacctcccgtccagcttctctccattgctggggttggtcccgtacttcttaagccatggaacaatgttcagtaagtcaaagacgatgccatcgggagtgcagactggcttcttgccaccataaaagtgagtgtattcagcacaggtaatgtacattttgtccttttggtgctgtcgcttccccatggcggagcggcggcggcgaaattgagacctgttgctgttgggcccggagttggccatgctgaggatgccgcggcccgtgtgcgagaggttgggccggaactcgtctttgaagggcttcccccagtatgactccccacccgtgcctgtgcctgtggggtcgcccccttggatcacaaagttccggatggatctgtggaagatggtgccatcgtaataatgcttcttgcaaagcctgatgaagttttcgcaggtttttggtgtctgtgcgcaggccatgctgccaacgcggccccctaggaaggacacagggcactgctgcgggtcccgcctagtgacaggctgaatttccagtggcagccctatatttaagacatggctgtcagatgacccagagatgaccttggggcatggggagtggctggcctccacacccaccaggtcgcagtgcagctccaggttgaggtcgcccttgttggtgtgcagccgcacgtagcccttcttcttcacaaactggtagcgcagcacatcctcgtcgatggcagctgcttcatgtgtggtctccgggaccatcgcggtggaggtgaaggaagcgctgaccttccctgtggaatagtgggcagcattcagcttgtccactttcttcttctccggggccttcatggtggctgccagaatctcgtcccctttgaactccttgtagagctcctgcagggtctctcgggtctcggcatttgtatttttcagataataagacgggtcctgtttggccttctcttcatctgggtctattattttcatgttattcttcacatgatagaagttagagacattgaacttgtccaaattggtggggtcctggagggtgatgatgtcctgccgggagaagggctcgtcggtcagcaggtcccggaagttcttggccttgatatttagctgttccactgcctcataggcgtagacgttgccggtcgtcctcacagccacgatgtgggtgttgttggtgaacacggtaaacagcactgggcagtggtacttccctgcttcacacgcatgttctctctgtaacccaccactttgtctgattggttggcaggttacgtttttctctcgtcccagctgtgtggacagtgccacacgccctcctggacaacgacggctcttgcgtgcattttccagtgttgcttttgtcagagaggccagcagagccacggttcttccagaaccagccctgagctgagtgaggagtgcccaggagagatggtgaaaatgacaaagtccaaaactttccaagcgtatctgccgaactgtcaccgaacgtacagctgtatccactgcagagcacacctggccaatcat

SEQ ID NO: 154306 - DNA, 1348 bp, Homo sapiens
ggcccgcggggcggcggcgggaggatgcctcgcgccctgcctaggcgttaacggcctcagcgcgtcccgggccgcgccgggaacgcctgagagccgagcccgcgctgaccggggcccgggccggatgggcgctgcgggccggggcgcggaccgcggagcggccgttacgtttttctctcgtcccagctgtgtggacagtgccacacgccctcctggacaacgacggctcttgcgtgcattttccagtgttgcttttgtcagagaggccagcagagccacggttcttccagaaccagccctgagctgagtgaggagtgcccaggagagatggtgaaaatgacaaagtccaaaactttccaagcgtatctgccgaactgtcaccgaactgtacagctggtatccactgcagaagcacactggcccaatcatgacgagctcatctccaagtcctttcaggggagccagggacgcgcctacctcttcaattccgtggtgaacgtgggctgcggccctgcagaggatatgggtccttcttcaccgggctgcatgcggttgccgacatctactgcggagaactgcaaagaccacgctcgggtggaaatacgagcatgcctttgagagcagtcagaaatataaggaaggaaaattcatcgattgagcttgctcatatgatcaaagacaatggctgggagtaatgtgcgaactttcccttctcctttgaatgctgttttgtgaaagaaactgtgaatgtaatggaaacgtaggagcatctggtgacagcctttcttgccctcttgacctcaaaggcctagcttgcgcatagctcttgacaactctcgggccatctcttgtggggtaaggtgtccctcggatctgtcctcttcgtgtacacagttgtttctgaaaattttcaatgagctttttctaacttctcaagttctagagaaagaattaaccaactgatgacttacctgcctagttaatatcttcctttcacctttgtcttcaatatagttgggctctgcttttttaaggttcagttgaaaaccaaactggggccgggtgcggtggctcacgcctgtaatcccagcactttgggaggccaagatgggtggatcacctgaggtcaggagttctagatcagcctggccaacatggtgaaaccccatctctactaaaaatacgaaaattagccgggcatggtggcgagtgcctgtaatcttagctactcaggaggctaaggcaggagaatcacttgaacctgggacacggaggttgcagtgagctaagatcatgccatcgcactccagcctgggggacaaaagtgagacatcgtctcaaaaaaaaa

SEQ ID NO: 154307 - DNA, 2958 bp, Homo sapiens
atgcccggctacagtgctctttctaataaacccatgctggaaacaacccaaatgtctatcactagaggaatgggtaagctacttgtggtacggtgtggtaccgagaaggctggaccagcagttccaggcggcatggaggggccccggagctccacccatgtccccttggtgctgccgcttcttgtacttctgctgctggccccggctaggcaggccgccgcccagcgctgcccacaggcctgcatctgtgacaactccaggcgacacgttgcctgccggtaccagaacctcactgaggtgccagacgccatccctgagctgacccagcggctggacctgcagggcaatttgctgaaggtgatccccgcagccgccttccagggcgtgcctcacctcacacacctggacctgcgccactgcgaggtggagctggtggccgagggcgccttccgtggcctgggccgcctgctcctgctcaacctggcctccaaccacctgcgtgagctgccccaggaggcgctggacgggctgggctcgttgcggcggctggagctggaggggaacgcactggaggagctgcggccggggacgttcggggcactgggtgcgctggccacgctaaacctggcccacaacgccctggtttacctgcccgccatggccttccaggggctactgcgcgtccgctggctgcggctgtcgcacaacgcgctcagcgtgctggcccccgaggccctggctggcctgcccgccctgagacggctcagcctacaccacaacgagctccaggctctgcccgggcctgtcttgtcccaggcccgcggcctggcccgtctggagctgggccacaacccgctcacctacgcgggcgaggaggacgggctggcgctgcccggcctgcgggagctgctgctggacggcggggccctgcaggccctgggtcccagggccttcgcacactgtccgcgcctgcacaccctcgacctccgcgggaaccagctagacaccctgcccccgctgcagggcccgggccagctgcgccggctgcggctgcaggggaatccgctgtggtgcggctgccaggcgcggcccctactcgagtggctggcgcgggcgcgcgtgcgctcggacggcgcgtgccaggggccgcggcgcctgcggggcgaggctctggacgccctgcggccctgggacctgcgctgccctggggacgcggcgcaggaagaggaagagctggaagagcgggctgtggccgggccccgcgcccctccgcgcggccctccgcgcggccccggggaggagcgggcagtcgcgccttgccctcgcgcctgcgtgtgcgtccccgagtcccggcacagcagctgcgagggctgcggcctgcaggcggtgccccgcggcttccccagcgacacccagctcctggacctgaggcggaaccacttcccctcggtgccccgagcggccttccccggcctgggccacctggtgtcgctgcacctgcagcactgcggcatcgcggagctggaagcgggcgccctggccgggctgggccgcctgatctacctgtacctctccgacaaccagctcgcaggcctcagcgctgctgcccttgaaggggctccccgcctcggctacctgtacctagaacgcaaccgtttcctgcaggtgccaggggctgccctgcgcgccctgcccagcctcttctccctgcacctgcaggacaacgctgtggaccgcctggcacctggggacctggggagaacacgggccttgcgctggggtctaccttaagtggaaaccgcatcaccgaagtgtcccttggggcgctgggcccagctcgggagctggagaagctgcacctggacaggaatcagctgcgagaggtgcccactggggccttggaggggctgcctgccctcctggagctgcagctctcgggcaacccactcagggccttgcgtgacggagccttccagcctgtgggcaggtcgctgcagcacctcttcctgaacagcagtggcctggagcaggtgggcactgggcatctggcggggttggtgcaggaggcggcacaaggccacaggcagcgtgcattcactcaacaagcatttgccagccccttggtgccaggcctggggcccgggctccagagcctgcacctgcagaagaaccagcttcgggccctgcctgccctgcccagtctcagccagctggagctcatcgacctcagcagcaatcccttccactgtgactgccagctgcttccgctgcacaggtggcttactgggctgaacctgcgggtgggggccacctgcgccacccctcccaatgcccgtggccagagggtgaaggctgcagctgctgtctttgaagactgcccgggctgggctgccagaaaggccaagcggacaccagcctccaggcccagtgccaggagaacccccattcaaaggaagacagtttggaccagataaggtggggaaggagaagggtcgtctctgagcacggagcaggctggtcctgccttgaccccagcccggtgcttcttactctcgccaggaacaggctccgacgagatcttcctggcaccctgagggtcgtcctccagcaggggcttcttggacccctgtctgaggggtcgcgtcttagtgggcgggattctttttccttttcttcccaaactgtttctctttcttctttgtggcctcattggccttcagcggtgtggccggttctgcggccacaggaggctggagctggtagccggtgagctcacaccagccgctggggtagatgtgtggggactcgcagtccccccactggtcgtactcgctgtcccagccgtcaaagtggatgctgaggacccgatgcaccactcgtttcaccgtggccacacaaatgagccggggctccatcaggtcctcggcctccagcttcacctcgtgacaagaagggagt

SEQ ID NO: 154308 - DNA, 2354 bp, Homo sapiens
gagaccccatcttcagaaccaatggaggaagaggaagatgacgacttggagctgtttggtggctatgatagtttccggagttataacagcagtgtgggcagtgagagcagctcctatctggaggagtcaagtgaagcagaaaatgaggatcgggaagcaggggaactgccgacctccccgctgcatttgctcagccctgggactcctcgctccttggatggcagtggttctgagccagctgtctgtgagatgtgtggtatcgtgggtacaagggaagccttcttctccaagaccaagaggttctgcagcgtctcctgctccaggagctactcctccaactccaagaaagccagtatcttggctaggttacagggaaaaccaccgaccaaaaaagccaaagtcctgcacaaggctgcctggtctgccaaaattggagccttcctccactctcaagggacaggacagctggcagatgggacaccaacaggacaagacgctctggtcttgggcttcgactgggggaagttcctgaaggatcacagttacaaggctgctcccgtcagctgtttcaagcacgtcccactctatgaccagtgggaggatgtgatgaaagggatgaaggtggaggtgctcaacagtgatgctgtgctccccagccgggtgtactggatcgcctctgtcatccagacagcagggtatcgggtgctgcttcggtatgaaggctttgaaaatgacgccagccatgacttctggtgcaacctgggaacagtggatgtccaccccattggctggtgtgccatcaacagcaagatcctagtgcccccacggaaggcctgggggcagatccacgtgtggaatctgatgttctcagatgaagtcattgctggcctgaagaggcagctattttcagtccccactgctgaggggtccccactctgggtcggcgctagcgcccctgtcagtggagccatccatgccaagttcaccgactggaagggctacctcatgaaacggctggtgggctccaggacgcttcccgtggatttccacatcaagatggtggagagcatgaagtacccctttaggcagggcatgcggctggaagtggtggacaagtcccaggtgtcacgcactcgcatggctgtggtggacacagtaatcgggggtcgcctacggctcctctacgaggatggtgacagtgacgacgacttctggtgccacatgtggagccccctgatccacccagtgggttggtcacgacgtgtgggccacggcatcaagatgtcagagaggcgaagtgacatggcccatcaccccaccttccggaagatctactgtgatgccgttccttacctcttcaagaaggtacgagcagtctacacagaaggcggttggtttgaggaagggatgaagctggaggccattgaccccctgaatctgggcaacatctgcgtggcaactgtctgtaaggttctcctggatggatacctgatgatctgtgtggacggggggccctccacagatggcttggactggttctgctaccatgcctcttcccacgccatcttcccggccaccttctgtcagaagaatgacattgagctcacaccgccaaaaggttatgaggcacagactttcaactgggagaactacttggagaagaccaaatcgaaaagccgctcccatcgaaaactctttaaacatggattgcccaaaaccatggcttcaaaggtgggcaatgaaactggaggccgtggacctgaatggaaccccggctcatctgtgtggccacggtgaaaacgaagtggtgcatcggctcctcaagcatccactttgacggctgggacagcgaagtacgaccagtgggtggactgcgagtccccagacatctaccccgtcggctggtgtgagctcaccggctaccagctccagcctcctgtggccgcagaaccggccacaccgctgaaggccaaagaggccacaaagaagaaaaagaaacagtttgggaagaaaaggaaaagaatcccgcccactaagacgcgacccctcagacaggggtccaagaagccccttgtggaggacgacccttaaggtgccaggaagatctcgtcggagcctgttcctggcgagatcattgctgtgcgtgtgaaggaagagcatctacacgtggcctcgcccgacaaggcttcaagtccagagctgcctgtctccgtcgagaacatcaagcaggaaacagacggacttgagccttcctgcctccagcctggcttctagctggaagccagcccagcgtttctctaccaccaccaccatgcctccacctgactttggcttggagactgatcctctctgtg

SEQ ID NO: 154309 - DNA, 994 bp, Homo sapiens
  misc_feature (1)...(994): n = a,t,c or g
ttttttttttttttttgcccatccctgattactttttttcaagagggaaaagtttattgcaggttggggacacttgtaaaaggcaaaatctaacaatgagaacgaactatagggctcgccagtttagaagatgagcaggtaaaacaaatacacggattattgtcaattattaaaaaagagcaagggggtggacaaaaaaggaaaaactgccagcagccttccagaaggttcacagagtatatccagggagcaccttcccgcccagtcctggctgccttgggcatgcctcctcctgtggttacctgccctgctccagatgaaatgcaaatgaggaagcagctaccggggctcaggagcagagctcattctgctcggcaagttcgctggcttgcagggaagcagccgctgggtgccgcatgcgccaagcctctcatttaaaaagcccagagggcaagtttcacgggcatttccttaacacacgtgtgggaagagctgggggaaacccacaccgcccagggaagaagtggcttcttccatcgtctgtgtatgtatgtaatactgagcattgtctctggggagcctggtgccccaagccgaatggctgagcccgccgccctgggcctctgagcgcttctcaaagcctgcaatccgtgtccaatgaccaaattgtcctctcaggcgctcacttcttctattagaaagccagtcctcttagcccccataccacctctcacaggacacccacaaaaggacaaatgcaattctaagtctttcgtnnnnnnnnnngagagagagagagagaaaagaaaagaaagggagtgttctgagtctacttaaataaggaaaaggccttggttcatccaaagtgtttccaaagtgtttctataaaaatgcatcgaatgctggaataaagttgcacattctcctggtgaagctgtaaaatgtccaacaaactgaaaatgacgggatgatctggaacgagtctctccgaaca

SEQ ID NO: 154310 - DNA, 514 bp, Homo sapiens
  misc_feature (1)...(514): n = a,t,c or g
cagtgtggctcataagccacgaaccgggaactccactntgtggcaccgtgagattctccagacggtatccaactgttgaanaacgagccagagtcttcaatggagcaagttatgtgcctgttcctgaagatggtccctttcttaaagcactgctctttgaacttagattattggatgatgataaagacttcgttgagagtcgtgatagctgttcacgcatcaataaaacatccatttatggactcctgataggagtgtgatttggaaggaatcatgccaaatgttaccatcagcttgagtctccccaccaatggatctccacttcaggatattctagttcacccttgtgtaacttctcttgactctgcaattctgacttctagtagtattgatgcaatggatgactctgcatttagtgggccttacaaatttccattcactccacctttagagtcattcaacttatgcttctacacttcccaggtccctgtcccaccaattttgggtttttatc

SEQ ID NO: 154311 - DNA, 1613 bp, Homo sapiens
gcgaataaaacgagcggcgaaagaaccgaaaaaaggctcgacgctaccgtgtatgaggaactttgatccttgcgggccaccattccggaagtagaatttagaggaagaaaataccggagttgcagggtataggtaaatttctcaaggttataggttggggttcttagaactttttgtggtgtgtgttggcctagagcgactcagaagcgttagtgacttcacctaaaaaagctaacctctctgctgagcgcgaccggtatgcggcgcaggatgagcctcagggcttctgttaaagaggcatgtctgagaaagccggtctgcgctgttcctcggatgcgaccttaattatgagatgagctaatgctttactgacttaaccatggcgcagcgggcaagtgttggctcataagccacgaacccgggaactccaacttttgtggcaaccggtgagattctcccaggacgggtatccaactggtttgaaaaaaccgagccagaggtctttcaattgggagcaagttatgtgcctggttcctgaagatgggtccctttcttaaagcactggtcctttgaacttaggattatttggatgattgataaagacttcgttgagagtcgtgatagctgttcacgcatcaataaaacatccatttatggactcctgataggaggtgaagaactctggccagttgttgcttttctgaagaatgacatgatatatgcttgtgttccactagttgaacaaactctgtcccctcgtccgccactaattagtgtcagtggagtttcacaaggctttgaatttctttttgggatacaggattttctttattcaggtcaaaaaaatgactctgagctgaatacaaaattgagccagttgcctgacttgcttctgcaggcttgtccatttgggtactttattaggatgccaacttacagaattcattagataataccaattttggcatctgtgactcagccacagaaacagccagcttggaaaactgggacgtacaaaggaaaaccacaagtttctatttctatcactgaaaaggtaaaatccatgcaatatgataaacagggtatagcagatacatgggcaagttgttggaacagtgacttgcaagtgtgatttggaaggaatcatgccaaatgttaccatcagcttgagtctccccaccaatggatctccacttcaggatattctagttcacccttgtgtaacttctcttgactctgcaattctgacttctagtagtattgatgcaatggatgactctgcatttagtgggccttacaaatttccattcactccacctttagagtcattcaacttatgcttctacacttcccagtcagtcattgatgaccaaccaagtaagttactgctgaacgatgggattggagaactcatgggattcaattggagcaacaggagctgtgggcaggttggcagtaatcagtatgcctactgcatgccctatgcggcagatcagagaacatggagacggggagcctggacgagcaagtataggaacaagaatgcattgtacacctttgtaaagcgcttttctcatctccgaaaacaaagagagaagaatccctatccttaa

SEQ ID NO: 154312 - DNA, 665 bp, Homo sapiens
  misc_feature (1)...(665): n = a,t,c or g
gttgtaacactccaatacaacagctggacagaatgatggaattcacgtcaatagaaggcggtgcaaaacactcagcaactcaacacctattcagctgatcttctgcaatatggactcgagcataaggggaagtctagcaaggttatgtaagggcctgcaggcatgctgttacatgttcaattgggctcctcaggtctaggtgtactttgatactgtatactcacaccttgatatcagatgcattctgtctttgttaatttctggcataagatttagcactacccactgctcctgatgcctggtttaaattgacagatgtagaacgtttttgtaaaccagatattgctgctgcttctgtagactctgagcacgtaaatcctgtgctatttaaccaaagtgccaccgcatggagaattggggcccaggaattccgatagttaagtcttagctgtatcaatagtttcaggggtataaaatggctccaccatctggaggaagctgactagaaaattcggctggtaaagtcaagagtgcataatcttttaatgctgctaaccacaggcgactgagtgttggtagttcaggttgtaccagtgttattaaactatctggtgacagttcatcgatgcgnacgcgtggacgcacgcgtgggcgtacgcgtgggt

SEQ ID NO: 154313 - DNA, 6532 bp, Homo sapiens
ccaggctcatggcatattcacatacttccgctgcttctctttgtgcaagttgccgaagacatgccacagctgctcgtcgaagtaacaaatgggaactacataagtgaacacaaaggctaggaacaaggctagatagattgacatgtcgtggtgcaaacatgtgaagctgctgaaggcaagatatggcagctgcctgaacaagagaatctgaatggtcttgtgttattgcacaacccaccaaacaagaggaacgaattgtagaagttgttgctccattcccttgtagttcagggccaacagtagttattatagcacccaagcatcgacccaaacactgatgaacttctgtatgtgaaggcggaactgtcaacagcaaggtaagaactagagataatgttggttccacatagccacgatacatcggaccactagaatccactatcaaagcaagtgaatgaagagaccaagtctggacttcaggggatgtcccatcttgtgctagagccaataaaatgctgacactggtcttcagatgttgtcctgagcctattccaccaacataacgatgcaaacaaccaagagccaatgaatgaccagtcctagatacaacatctcgagccgatttcaacttgtcaaagctatattgggccattctagcaataaaagttgcttctccaaccacctgagccattcttccaagagcttcccccgctgcacaacgtaagatggggtttgggttgtccagaggacccataaccagtgtcagggcagatttacgaacttcctcaggtcctaaagtacttttgttttcagctaagccctttagtgcactaagaacagcagtaaatatgttaagctgcacagcctgctggcggacacctttagcttgtttaacacattcagcaaagtgatccaacatttgtaatcggtgtttataagaaacatgaggaaacactacaccaaaaagggccacagaagcatcaatgactgagactccgagagggaggggaccaggtactgcttctccagcaggtatgcgtaaataaatagaggaaggatcatgctccagagccccacttccagaggcactgtttggctggagctggtcttcaattgatttatgatcagtttcctgaagccaagaaccaagaagaacactatcatcataatggcagagggatctgaggagggaagtagttgtgttggctgagttgtcagtcaaagtgaattccgctaccagttctctaagaagtgcattaaaagatccttcataagtttttggaggtaacaaagccaagatatcataaagtcttaaacggaccattgcagcactagctttcagatgagctccatgggctttcattacagatggaatgtgtgacatcatagtcatggcacattcaataggggtcatcaattttcgaatcacatcttcagttagtagctcaggacaatgtgcaacgaagctcctcatggcacatagagctccagcacgaccttccaaagttacctgccaggtaaaagaatcgcctcgggccttctcagcttccaattcctttaaggaacgtgggaaaacatttcgccacaataacaacatcttgggcagatggtaacgaacgacagatggtcctaaagtcataagtgctccaagtaaaagccagccagcttgggtgcgctgtaaagatagcctgctattttgggcagcagttcgtaaaagatcttcagcaatactaactaccatctttcctttggcatgaggaatgcccaaaggacactgatgtactccacctaacaaagcagccattgcaaaactatatccactgacagcttctggtgaggtcttcaagttgttgagccgttctgcacacctgtctagaaatggtgtcagctggaaaggtaatgccacagccacacagcgcaaacaccatgcagcagcaagtcgggcagccatggcttggatgaagcagcactgaagtcacaatctccaaaaagccctatagatgcttcttgaataagaggggatgcggtggcattcaagctctgcaccaggctcccgagttcctggagggcacagaccatcacatgctggcttgctgcaatgtctgctgcgccagatttgttttctccacttgtgtcattcactactgcttctacggctttcatttgttttccaatagcttggcagatttctttggcagctgcaatctgggctttttcacctagcaaactgcccacagtagctcttaggataaaggaaacacatcgtctggagtacacagcctccacatgtgtttgtgttgcccgaggatgggaaaccagatcaagtacatgggacaggaacgtggcaaagctgcgctccaaccactgaccacccaatgttgtcacaaaaacaacatacgcctgcgtaactccaactctcacttcacgattaacggaccctccaacttttaacatttctccaccgctctttaagaaacctgaccctccacgcagaaatcctgtggccatgagttctaagacttcatcaaatgttgctcgcttcacattctgacgcattactgttgcctgttttggcattaatgctgtggccatgactgttcctaaaagtttagacactgccactcgtaccccataatttgagttttccaaagccttaaagcagagagtggctatattttctagttcagcagtccacataaatacagcttcattctgtagttcacctctcctgagataaccaaaaaactcgacaaaataaatgaaacaacagttttcaagacactggacatcaggcaatgaagcataccacgcagcgcccgtcgcggccgcggcagcactccgcagagcccagagcaccttgcaccgcggcgcccgggtggttgttgctgaagaagacgccgtgacacgcctgctcgtccatggcggccgcagagtaccggggagctgccccggcgcccagcagcggaggcaacagcggcggcaagcagcgcctcctcctccctccgccgtcccgcccacaccccagtcagcagggagcagcctccctagacgctcctccattctgccaatctgcgagtcgctgtcgctcttgcctttctcttttgactcgaggggctcaaacctgttacctgaccagttttcatttctaaggaacgccgatcacctttctaagacaacgccgcagctttctgctgctgcttccaaattgtggtttgttgacagcccatctgaaaaactgctccgttgaagtttctttccctttgcagtcctcctgcagtaaatcatagggcgcacaccaactaaatgacgttgtaactttacttcatcctcttcatttacatagggcgcacaccaagtaaccagtggaaaccttttcaactcaggagcagccccccattactgtccttgaaagcatgtggatacagaggtcccaatatgccattaaattcctggagtgcaaactcatgaagatctttggaagctgaacttgctgaggcaaaagaattttcatccatgcaggtaagatatcaaagtgggaaactaaaaagagccaagtagctggactctgttttgttccttcacccaagagcaaccagtgtttccaagaaacttttaatcccttccttgaaaccgcctaaaacccctatgttaactggctggtctgtttctttcaacagcttttagcttttcaaccactattggagctaatgaatgaatataaggagttgaaagggcacgattggaatgctggaagactgagaggagaagctggtaacatttggcttgaacccatgggtcgcatgaatataatgcatttttaaatctgttcatgcagccattctgtaatgactggactcctattatttcattactagcggcccacaggaagagtgcaaattgctgttagcatgcttacttcatcaggtgtaggtacagagtcttctggttgagaatattccaggatgcaagcaagcgtgctacgaatcagagctgtccactgtttttgaacgccagcctcagttttggccattgaaagtgtcacaatacttttaatcccttgaagagctgcactgactggtggaggaacctgattatctgcagactttattgctgtgtctttcaatattcttgcaattaagaacagaattgtgggcaggattgtcatacatccttcaccactctgacctgcagccattgtagcctctgcttgcaaaactccaaatatggagaattcattattttcacatatgtagggtaactcagcgggtgaacaaagggatggtaaatcacgagagtatggtaactgtggctgccaccaaacgagcactttcttcttgatagtccgagttttagtggctatgtgacttggagagtcttgacacctctggtactgagatgtggcatatgcccgtactaaaatgaacatcagcagctccatagttgcaaacacaagagattttccaggaatgagaccaccgctgtcacctccttctcccaatacggtacaggcctctttttccatatcatcttcatttagagtgtttcttttctcttgcaaataatcctgagcagctcttactatctgttgtacaactccagtaaccaacagctggacagatgatggattccaggtcaatagaaggcggtgcaaaacactcagcaactcaacacctatcagctgatcttctgcaatataggactcgagcataaaggggagtctagcaaggtatgtacaggcctgcaggcatagctgtaacatagttcaatagggctcctcaggtcctgttgtcacagaatttacctcttcattgttgccagtggctcctaaaaccctatcatcttctctttctatcacaaccagggaactctgtttcttccctctgtttctttcttcttctgctattcctctccacctcctgttgtttcctctactaacactgaggacttcctcatcactccttgcatctggaggaagctgactagaaaattcggctggtaaagtcaagagtgcataatcttttaatgctgctaaccacaggcgactgagtgttggtagttcaggttgtaccagtgttattaaactatctggtggcagttcatcgatggtaccacagtcgtcatcatcatcgtcagtatttttaattgctctttttggttttgactctgcttcctttttaatattcatagcgaccacatatacctctgcccaagctttgagaacagccagtttttccatggtcgtggcactctctcggtacagctggctggaagatccttttccagcctgaactttgtccagagaagaaacaagaagattgtgtactcgacggagatcattgagatcactgacaactccacttcctatccatgtactacatacctggcaagctttcgctattatatctgatggtgtatcttgtgaaaaggctggtcttagagcagctcccacattagcctgatactgctccagtatcacatgacctggaaattctggctcaggcacagacgcaaacttcttgataatgtcttcaagcgcctggagcccagccattcgcagctggttgctatgatcagttgcagccatgaatgccatgcgaatgaggtcagagagatgaagtaccaagaggtcatttgtagggtttcgaagtttagcagaacgtgccaaggcaagatcaaagtgagcctggtctgcattctcacacaaattgatgattcgacacaggcaatcggcagcaaatactcgagtggcccagcgaggggccacaaagggctttgatttatcttcttcacctaacgtggtaaacatggtatcatcatccatctcatctttcttttcagcttcttcatcttttccactacttaagagagttgcagtactcatatcactagaagctgccaggacatctttacaaagcattagccaatgagaaagtttttctactgccagcgaagaaagcatatgtcccaaagtgtcatgaatatcagaacataattttcgatctgtctcccggtctagcattccaaaaagaagtccctcaagaccagtttctgttatattaacaccttggtgccggcaatggatatcagttcgagaactaaccccaggggcaaaaggactgacattggcactactgctctctttgtcccctgtattttttgccaggctcatggcatattcacatacttccgctgcttctctttgtgcaagttgccgaagacatgccacagctgctcgtcgaagtaacaaatgggaactacataagtgaacatcatcaggcgttagattcttgggagtgccgcacaacctagatccttcgcatgggctgttcacagtaggatccgtgctcctatgagaatcagcgttgcctctgatctgacaggaagcggagctcagcgggtaatgctggcttgcctgctgctcacctcctgctatgccacccagttcctgtgggcccagctcctcgagaggctgaagcaggagaatcgcctgagcccaggaggtcaagactacagtgagctgtgatcgtgccat

SEQ ID NO: 154314 - DNA, 1169 bp, Homo sapiens
  misc_feature (1)...(1169): n = a,t,c or g
gcacgaggggatgcaagtgaatttagtaaaaatccccatattgggagttttgttggaaatcaagtaactattagaaaagctgatggctccctggttcacatcagcataacaccatatcctgctattctccatgaatatgtaagcagttcaaaatgggaagatgctgtgagactttgtcgctttgttaaggagcaaaccatgtgggcttgtctagctgctatggcagctgctaatcgagatatgactactgcagaaatagcctatgcagcaattggcgaaattgataaggttcagtacatcaattctataaaaaatcttccatctaaagaatcaaaaatggcccacatactactgcttagtgggaacatacaggaggctgaaatagtacttcttcaggctggcctttgttatcaagcaatccagatcaatattaatctcataccactgggaaagggcactggaattggctgtccaacacaaaacacatgttgatacagttcttgcttaccggcaaaagtttttggagacatttggtttgcaggaaactaataaacgatacttgcattatgccaaaggtctcccaatatattgggagaaaagcaaagccaccattgagatggagattacacaagaaagagagcatttcttgcgcagccaatccagcaagagtataggtttaaagccctaaatgccatgcgtatctttaaaaaattttatcttttgaaacacgttctgattaaccaagggtaagcatgttttggttgctaaagaaaaaagcataatctttaaccgagtataagtacttgctgtgtatttagtgtaaaagtacatgcagaaagatgaaacacaaagtaattgatgtatttccatcttcttatattttttagtccaataattaggcaaaatattactatggtacttaaggggatacctgtgtaggtgttcggnttatatgtcagttttttgcccattacttcatccctaaatcttcagcatgaacaaatattaatgtcgataataaaacattgggactctttggaaatgtatgttaccattaatttgctatttggacctctaaatttgtaaaaatgcctcccaaaagtttatttatagggaccaaaaatacatgaggatggatttgtcccaatggataaaaatggcactattta

SEQ ID NO: 154315 - DNA, 390 bp, Homo sapiens
ggtgcgcgtcgggccactaggggtaccccaactcggagagaaggaccatgagttgaatttgaagtttgtgggaatagaggtgaagcaccaggggcagaaaaaaaacaggagacctcgcctcagacaagcggggcctgggtcccccatggatgaaagtgccttcccattatgccgtacgctgggcagagtggacagtgacgaccctggtttgatcccagggtgcgcttcgggaccacttgcggtaccagaaagcgaacaaaaggtccatgagcggaagtccctgcactgggacctggggaccctggtgtccctggttcgagctcagggtgtgcctcagccgctaagtgcaccccaaggggagctttgggagcacaaagcccatgagggaag

SEQ ID NO: 154316 - DNA, 856 bp, Homo sapiens
agttgaggcacctggggcagagaaaaaaatgcattgccaagaggtttctgggtcatctactgacgaaaatgtcttcccatcagcccttgcgctggtccccagggaccctggcatccgtcgatggcgcccagggtgcgcgtcgggccactaggggtaccccaactcggacagaaggcccatgagttgaatttgaagtttgtgggaatatgaggtgaggcaccaggggcagaaaaaaaaacaggagacctcgcctcaaacaagcggggcctgggtcccccatggatgaaagtgccttcccattatgctgtaccctgggcagagtggacagtgacgaccctggttcgagccccaggggtgagcttcgggaccgcttgcggttaccagaaagcgaacaaatggtccatgagcggaaggtgaggcacctgaggcagagaaagtaaagaaacgcgccgccgagaagcagtgcctgggtccctcacggaggaaattgtcttctccttagcccgttcgcttggcactgaaggtccctggcgtcccctggtttgattcccagggtacgcctcggggccactagtgttaccccaaggtgggcagaaagcccataaagggggaaggcgaggcacctggggccagagaaaaaaaaaactttgctgcagaaaagcgcggcctgattccccacggacgaaagtgtcttcccatcagtccctgcactgggacccggggaccctggtgtccctggttcgagctcagggtgtgcctcagccgatacgtgcaccccaaggggagctttgggagcccaaaagccaataagggaaagtaatttttaaggcccccagtggtgaggcccctgtcacag

SEQ ID NO: 154317 - DNA, 325 bp, Homo sapiens; identical to SEQ ID NO: 137998
  misc_feature (1)...(325): n = a,t,c or g

SEQ ID NO: 154318 - DNA, 945 bp, Homo sapiens; identical to SEQ ID NO: 137999

SEQ ID NO: 154319 - DNA, 470 bp, Homo sapiens; identical to SEQ ID NO: 138000

SEQ ID NO: 154320 - DNA, 738 bp, Homo sapiens; identical to SEQ ID NO: 138001

SEQ ID NO: 154321 - DNA, 339 bp, Homo sapiens; identical to SEQ ID NO: 122381

SEQ ID NO: 154322 - DNA, 1683 bp, Homo sapiens
cagggagccaacatgcctcggtatgcgcagctgcgtcatgggccccgcgggcatcgttaagagcacctactgtgccaccatggtccagcactgtgaagccctcaaccggtctgtccaagttgtaaacctggatccagcagcacaacacttcaactactccgtgatggctgacatccgggaactgatcgaggtggatgatgtaatggaggatgattctctgcgattcggtcccaacggaggattggtattttgcatggagtactttgccaataattttgactggctggagaactgtcttggccatgtagaggacgactatatccttttttgattgtccaggtcagattggagttgttacactcacctggcctgtgattgaaacagctggttccagcagctcgagcagtgggagttccgagtctgtggagtttttcttgttgattctcagttcatggtggagtcattccaggtttatttctggccatctgggcagccctgagtgcccatgatctctctagaaattccgcaagtcaacatcatgaccaaaaatggatctgctgagtaaaaaagcaaaaaaggaaattgagaaatttttagatccagacatgtattctttattagaagattctacaagtgacttaaggaaggcaaaaaattcaaggaaactggacttaaaggctattatgtgggacttgattggatggacttacagcctggttcggatttttacccttacgatcagtcagatgaagaaagcatgaacattgtattgcagcatatttggttttgccattcaatatgggagaagacctagaatttaaaaggaacccaaaggaacgtgaagaatgagtcttcctctatgtttgacgaatattttcaagaatgccaggatgaatgaagagtttactaaaagtaaccatctaaagagcttgtggccaaaccagcagaacattcttctcttcaaaggatgcaatagtagaaagctacttattttaatggaaaaaaagtaaaaacttcgttctttatccagcctcatgcctgaatccaaatttttaattattctgaaactgctgctgtttaaagtggaatcttttagtattataacagcatcactttagatttttgtaagtccaaaattgaaatgaatgcccatagatttatatataaattagcacctgagctaagggtaaggcttggtctaaacttattttcactttttgtattatttttaagatgcaggaattactgtaacaaaatatgtatgtccgaagggaaaaagctgcaaggatatatataagaccactgcttatctgtatcttcccattttcctatattgaaaatgtatattatttatataacttaaaaagtaaaaataactatgttttgagatatgtatgtgtatatataaaagaaacaaaggtttttaatgattcttggacctagataacaagtacactgcagtgtctaatttgattcattttaattaagcaaaatgtggccaagcgtggtggctcacacctacaatgccagcacctcaggtgatccacccgcctcgacctcccaaagtgctgggattacaggcgtgagccactatgcccggccctgaaaaggtgacatttgaaaaaaatacaaaagaggtgattgatctcagattctggaacctcaagacccatctccattgct

SEQ ID NO: 154323 - DNA, 403 bp, Homo sapiens; identical to SEQ ID NO: 137589

SEQ ID NO: 154324 - DNA, 679 bp, Homo sapiens; identical to SEQ ID NO: 137590

SEQ ID NO: 154325 - DNA, 2477 bp, Homo sapiens
atggattacgggcttttatgtgggcagcaacttgtgcctcaggttgagccagtgatacagagaggccatgagagtctggtgcaccacatcctgctctatcagtgcagcaacaactttaacgacagcgttctggagtccggccacgagtgctatcaccccaacatgcccgatgcattcctcacctgtgaaactgtgatttttgcctgggctattggtggagagggcttttcttatccacctcatgttggattatcccttggcactccattagatccgcattatgtgctcctagaagtccattatgataatcccacttatgaggaagttctggatgctgagaagtacaagtacaaggtactggcatctgatgagggccttcttacgggtcataacatggcagtaggcttcacatggtggaagggcttaatagataattctggactgaggttattttacacaatggatataaggaaatatgatgctggggtgattgaggctggcctctgggtgagcctcttccataccatccctccagggatgcctgagttccagtctgagggtcactgcactttggagtgcctggaagaggctctggaagccgaaaagccaagtggaattcatgtgtttgctgttcttctccatgctcacctggctggcagaggcatcaggctgcgtcattttcgaaaagggaaggaaatgaaattacttgcctatgatgatgattttgacttcaatttccaggagtttcagtatctaaaggaagaacaaacaatcttaccaggagataacctaattactgagtgtcgctacaacacgaaagatagagctgagatgacttggggaggactaagcaccaggagtgaaatgtgtctctcataccttctttattacccaagaattaatcttactcgatgtgcaagtattccagacattatggaacaacttcagttcattggggttaaggagatctacagaccagtcacgacctggcctttcattatcaaaagtcccaagcaatataaaaacctttctttcatggatgctatgatataagtttaaatggactaaaaaggaaggtctctccttcaacaagctggtcctcaggcctgccagtgaatgtgagatgttccaagacagacaatgctgagtggtcgattcaaggaatgacagcattacctccagatatagaaagaccctataaagcagaacctttggtgtgtggcacgtcttcttcctcttccctgcacagagatttctccatcaacttgcttgtttgccttctgctactcagctgcacgctggagcaccaagagcttgtgatcaaaattctggttggacttgacaatggtttctatgatctgaacctggcatttgaagtacagggttaaagactgtgtccactttgggcatgaagaagtgtggagacttttcttccccattttccctccctcctttttcctttccatgttacatgagagacatcaatcagggttcccttctctttcttaggaaatatctgatgttatatatacatggtcaataaaataaaactggcctgacttaagataaccattttaaaaaattgggctgtcatgtgggaataaaagaattctttctttcctactacattctgttttatttaaatactcattgttgctatttcactttttgacttgacttttatatttctttaaaaaattccttccttttaaaaaatataaaagggactactgttcattccagttttcttcttctttgttggtcttctagtgggacttttcaagtgtaacagccattcttcctgactttaatattggccagttctggtcttttctgtgaattacccactgggcccccttacctcaatgctttttgttgatgccccactctggttccccttggtttatctggagtctgttggtacccccaaatgacccccacacccatctttaaagtacttttttttcaccttcccctgttttagtactggcccagatgagtttttttcttagagctctgtcactatctgaaaagaaagaggctatggggaaacatagaaaatggtatgtattaataactgaatccataggctgagggaggaaaaaatgtaggctgggctggcaaacccagtgctgtggagggtgacttatatggagggttccagatccaaagacagggccgtgtggaggccagtccaggagggtgtaagttctgaaatgggttccttggctgactttggggtgacacatgtaccacaaactggctcaagtttaagtcatggttctattgtagatttatatattatattagttaataaatgactttaaattgtcaccaattgaaaatcttgtcactcttttggttttctttatatagctcagccaaatcttgttttatgtcctgtcctcatctcttaagctaaatctgtttggatcatattaataaactaaatgaaattacaaaaaaaaaaaaaaaaa

SEQ ID NO: 154326 - DNA, 394 bp, Homo sapiens
ggggaggagccaagggggcgagcaagctcggtggctgggtgggttggggcgttccgcgcgcccttcattgaagcggcggtggccgggctgggcgccggtagtggaaagcgacggcgcggctggaaaatgccagtccattcccgaggggataagaaggagaccaaccatcacgatgagatggaggtggactacgccgaaaatgaggggagcagctccgaggacgaggacactgagagctcgtcggtctccgaggatggagatagctcagaaatggatgatgaagactgtgaaagaagaagaatggaatgtttggatgaaatgtccaatcttgaaaaacagtttaccgatctcaaagatcaagcgaaaagctgttgctatatgatacagtccagag

SEQ ID NO: 154327 - DNA, 150 bp, Homo sapiens
agcgaaaagctgttgctatatgatacagtccagagtgaactagaggagaagataagaaggcttgaagaggataggcacagcattgatattacctcagtttatatgctacaagatcttgatattcttgaagactggacaacaattaggaag

SEQ ID NO: 154328 - DNA, 1581 bp, Homo sapiens
atgagactgcggaagctcggtggctttagtagtggtagcagcaatagcagcactagcaacacccataccagcacaaatagtgctacagagctagtaaaacctggtgtgtacagacctctagatacacttggtactgcatcagtaagcagcaaaacagtgaaggaatccacagagattcccaccaccatattacaaaaagaaggaattgcaagtagtcaattaggtagtcgtagtactcttaggtcatcaagtcatgaggcaggactacagcagggctccctgggtggcgtttataaaactgttgtacatgctctttcgaagccgaaggcaaatgtttccccacagaggcagaacagaatgccaccagaggctccactgagggatctgtacagtcatgtaatgggctattttggaaggaaagctgcagcgcaacggcccagcgcgcaaaaccaaccgccccacagcacaaccaaaaaacaccgcccccgggcacaacaagcgccaacacaaaaccacggcgaacacaacacagggacgaaacaaaagaggaaaaacgcgccggagcgaacagagggaaaaccttccccagccccaaaaaccaccccagcgcgaaccgcccaagaagcgcagaaatatttccagcaaattcattctgcaatcggcttgcataacgctgaccacgttcataagcacttgttgggcgataatcgttacccaatctggataatgcagccatctgcttatatccagctccccccccagaacacgataatcacttcgaaatggatgatgaagactgtgaaagaagaagaatggaatgtttggatgaaatgtccaatcttgaaaaacagtttaccgatctcaaagatcacgccgggttattttcctcgcttccgggctgtcatcattaaactgtgcaatggcgatagccttcgtcatttcatgaccagcgtttatgcactggctatcagagatgccgagaaagcaggccgactaccgcaccggtatatggaaattcgaggacgggttgagcaacgtgttggttatacaattgaccaaattaatcatatgcgtgatgtgtttggtacgcgattgcgacgtgctgaagacgtatttccaccggtgatcggggttgctgcccataaaggtggcgtttacaaaacctcagtttctgttcatcttgctcaggatctggctctgaaggggctacgtgttttgctcgtggaaggtaacgacccccagggaacagcctcaatgtatcacggatgggtaccagatcttcatattcatgcagaagacactctcctgcctttctatcttggggaaaaggacgatgtcacttatgcaataaagcccacttgctggccggggcttgacattattccttcctgtctggctctgcaccgtattgaaactgagtccatgggcaaatttgatgaaggtaaactgcccaccgatccacacctgatgctccgactggccattgaaactgttgctcatgactatgatgtcatagttattgacagcgcgcctaacctgggtatcggcacgattaatgttgtatgtgctgctcacccctga

SEQ ID NO: 154329 - DNA, 2156 bp, Homo sapiens
atggcggccgggcagagacgctcctcactttccagactgggcagccagtttataaactgcgatccagagtgtcagctttcgtgccttgtgggacttgaagtccagaaggaagaagtgatcagggctgccgagggatggaagcgtgcagcccctgcaggtctgagacctacgaactacaactcccggcaagcatcggaaggccgcgtcgtaattgcgggcaaccaatcgtaccagagcagggcaagcccccgccctctggctcggtggaaggcctccgccaatggcagagctcccatcgcagagcctgcggcggcggtggccgggctgggcgccggtagtggaaagcgacggcgcggctggaaaatgccagtccattcccgaggggataagaaggagaccaaccatcacgatgagatggaggtggactacgccgaaaatgaggggagcagctccgaggacgaggacactgagagctcgtcggtctccgaggatggagatagctcagaaatggatgatgaagactgtgaaagaagaagaatggaatgtttggatgaaatgtccaatcttgaaaaacagtttaccgatctcaaagatcaactttataaagaacgattaagtcaggtggatgcaaaactacaagaagtcatagttggaacgagcaccagaacactttggaaccggctggcaactttacaggaaaatatgcaaattcgtacaaaggtagcaggaatctatagagagctctgcttagaatctgtaaagaacaaatatgaatgtgaaattcaagcttctcgccagcattgtgagagcgaaaagctgttgctatatgatacagtccagagtgaactagaggagaagataagaaggcttgaagaggataggcacagcattgatattacctcagagctgtggaatgatgagcttcagtcaagaaaaaagaggaaggatcctttctggcctgacaaaaagaagccaggtgttgtttcaggtccatatatagtttatatgctacaagatcttgatattcttgaagactggacaacaattaagaatgcaatggctacattggggccacacagagtgaaaacggatccacctgtgaaactggaaaaacatctgcacagtgctatatctgaagagggaagactatattatgatggtgaatggtatatacgtggacaaacaatatgtattgataaaaaagatgaatgtcctacaagtgctgtaattacaacaattaaccatgatgaagtttggtttaagaggcctgatggaagcaaatctaagctttacatttcacagctacagaaaggaaaatattcaattataacattcataatcatgatttaagtgttatctaaatttaccttattagtgttaccaaatgtaagtgccatgagagtaaaaaaatgtattcaataacttaatattctcactgaatcatgaaaagactgtgtatttgtaggtagtactctaaatagatctcattgatatgttattaaaagaaacagtaataaaaattttatcacgatccttacgttgatttgcctcttaagtccgatgaccaataagtattctgtatatggtaggggtttctttctaaacatttttctttggttctaaaaaaagttatgcaaatttggcttatctttagtaaactatgactacatttatctgcaatttttaaaattttccatatctttgtccattccattgtgtgtttgtaaataaggccgataggaatgtttcctataaatggtttgtactagtacattagtgttaaaccagaactgaaatttaaacatatatatatatgaggatgtatatatggcatcatcagcttatttagaactgatggccataccttacaatcttgttttacccaaaattaagctattggggttgaaagctaaaaggagcacttttgtagaatagcaacttttcttttcctctttcttgattgtatggtggggtggtgacctatttttacaaattatacctaatgagtaaaattagtgtaaagtgataacatgcttctacctgtatttctagtgaccctttagcggcaggtatttatacctggtatttatgatgcagtatataagtggtgaacaataactgacagtattgtgcttgctgtacatgtctggtctttt

SEQ ID NO: 154330 - DNA, 383 bp, Homo sapiens
ggcacgagggggagaacaggagtaaacaaggacttgacaaaggggaagagttatcagtcctttgacaaggacaggtggggcagggagcaagacaggtaggctggaagaacagttattggcaagtatgcagagccgtgaacgtcatggcatgtccaaggaattcctgcaggagcactttaacccccagagacggtacaacccaagctcccacgtcctctctggagcttgcgcaggagctgtagctgccgcagccacaaccccactggacgtttgcaaaacactgctcaacacccaggagtccttggctttgaactcacacattacaggacatatcacaggcatggctagtgccttcaggacggtatatcaagtaggtggggtga

SEQ ID NO: 154331 - DNA, 526 bp, Homo sapiens
atcagagataggtacttagttcaagaagactctctgaagctcccaaactgtagatatgtcctgtgtgcgaactggctggctttacagaagtcctgatggaagtgggtttattgttttttgactcgttacctaccctctgcttactccttcccctcaaaaaagggaagctgacttctcaggttagccagcagctcactcatacttttttctctctctattccattggctgatctgctgacttggggctctgaatctggatactctccatcaccggttggctgctgtcaccatttccttcctcgttgatggcactactagtggtcaagcagaggatgcagatgtacaactcaccataccaccgggtgacagactgcgtacgggcagtgtggcaaaatgaaggggccggggccttttaccgcagctacaccacccagctgaccatgaacgttcctttccaagccattcacttcatgacctatgaattcctgcaggagcactttaacccccagagacggtacaacccaag

SEQ ID NO: 154332 - DNA, 1834 bp, Homo sapiens
aagggatacaggatactcccttacctaccagcctgacttgggcctttaaactccctggcatccacttgtaacgcccgggtaatgtggagacacactgaactacccccagtttatgtttgacagttggggggggtcctgctccttaaggcaggattggaggcgacccagccagccacccaaggaagatactaatgaagcccctgctttttgactcaccttttcaggatgccaactcaccagaggcagtttgtgttgagaacatgacaaagcctcatgacaaaatgaatgggggtggggccaaggaactgcatgaagaaaccagaaggttgtgtggaagtaagagaaaggatagcagcctagggctttaggaccggctggaaaccaagttgagtgtggagaggatgaggggtagagtagttcaggacctgaacgaaagatctttgtagacaaatgttacgctctgcaaatgggttctgcggcaggactgaggtgggattctgtggtgaggttctgtgagatctgaccacctggcccccgtatctccctccactggtggcaggtgatgtgctggcatccctaggcagcagtgtatctgcttcctgtctggggtgtgagctgcatttattctcagaatgatctttattgataagacttgagctggccttcctatcatggatgtggaatacattagtgaccttacaaagttggtgggaacagatactttaccttcttaaacaggagtttaggagcagttgggtccccatcttttggactagctcttaacgttaacttttccccgctgtagtgtagcacagccactccccttcactggggggacctcagtgagttggtcagctctcttggccttacatgtggcagttgttttcttgtttgcaggtgcggccgggtgtgtggcaacattacttcatgatgcagccatgaaccctgcggaagtggtcaagcagaggatgcagatgtacaactcaccataccaccgggtgacagactgtgtacgggcagtgtggcaaaatgaaggggccggggccttttaccgcagctaccccacccagcttgaccatgacgttccttttccaagccattcacttcatggacctatggaattcctgcaggagcactttaacccccaagagaagttacaacccagactcccaacttcttttctggactttgcgcaggagctgtagctgccgcagccacaaccccacttggacgtttgcaaaacactgctcaacaccccaggagtccttggctttgaactcacacattacaggacatatcacaggcatggctagtgccttcaggacggtatatcaagtaggtggggtgaccgcctatttccgaggggtgcaggcccagagtaatttaccagatccccctccacagccatcgcatggtctgtgtatgagttcttcaaatacctaatccacttaaaaggccaggaagagtggagggctggcaaagtgaagttagcactgaacgaaagcccaggggttcaggatgacactgatgcatcctggtcacattctctgtctcctggaatgctcccacctcaagtggagttaaaaggaaaggagaaggggctctcccccacggattttggtgttttgactaacaccagttcctgccaacctctgttgccaccacctttccttccaggccctaagcacgtgcagcaaagcactcctcagcacctttgataacctctgtcacatcctgggcctgatgacgctgctctagactgttatagcagggataagcagctcattccccctggttcctaatataaaagcctttaaattaaaaaaaaaaaaaa

SEQ ID NO: 154333 - DNA, 2823 bp, Homo sapiens
  misc_feature (1)...(2823): n = a,t,c or g
atgctgcagcaaggtgccatcctggaagcagagaccaagccctcaccagacaccaaatataccagtgccttgatcttcaacttcccagcctccacagctgacctgggaaaaacaaaacgacccgccgtagaggaaaaggaaaccccaaacaaaactcgggcgcagagcctatttctactggccaaagagcgccgccaagaccccttccgtccggggctgtccgcgctgccactagtaaagatggcggccataggcggagccgctcactccgaaggccgcaggctaccctgccggccacgaccattcacgcggagccctccacgcccttcgcggcttgacgcattgcaggtgcagcgcgaccaatcagacggcgcggctcttttcggccaaccactgcagggtcgcgccggcctatcagagcgtccttgtcaaactgaacgaggaaagaagcctcagcagcgccaactaagcaaccggctacagaccgcgttccggaggggcccgctgggctcgggttttcagctgcgttggagctgcagaggctgcggagtgaacgcggccaggagcccgcctgggagcgcgcagcgctctaggagccgagagccgctgcttggccctcgctggccgggaagcagaggatggatccagttatgtgaaagtctgaagaaaattgccaaaggatgggtcagccaagacccctctcctcggcagctgaaggagtgtggccaatctgcctccacctccccgcggaccccctactctcaggacctcctgcagcaccccaaactggaagtggccgctgcagacccaaggacgaggggcacgcgggagccggcagccctagtggagcggttggagatgttgagtggtgctgggagtgtcgtggacgccgtgccgttactcgtagtcaggcggcggcgcaggcggcggcggcggcatagcgcacagcgcgccttagcagcagcagcagcagcagcggcatcggagcctctagattgccagatgcgactgtgcgcctcgctgggtgtgttttccacagccccttcctcctcggcgtgcagggctgacatcaccgactgcgtttctggtttggcgggtggggagatggttccccgcagggttctggctgatcagctgaccgaagaacagattgctgaattcaaggaagccttctccctatttgataaagatgggcgatggcaccatcacaacaaaggaactttggaactgtcatgaggtcactgggtcagacccaaacagaaggttgaattgccaggatatgatcaatgaagtgtatgctgatggtaatggcaccattgacttccctgtatttttgactatgatggctagaaaaatgaaagatacagatagtgaagaagaaattccgtgagtcattccgagttctttgcaaaggatggcaatggttatatcagtgcagcagaactacgtcacgtcatgacaaacttaggagaaaaaactaccagatttagaaagtagatgaaatgatcagagaagccagatattgatggagacggacaagtcaactatgaggaattcgtacagatgatgactggcaaaatggaggaccttactttccaactccctttttccccccctctagaggaatcaaattggaatcttttacttaccctcttgcaaaaaaaagaaaaaaagaaaaaagttcatttattccattcctgtttcctatatagcaaaactgaatgtcaaaagtaccttctggtccacacacaccaaaatctgcatgtattggttggtggtcctgtcccctaaagatcaagctacacatcagttttacaatataaatacttgtactaccttaatgataaggactccttaaaggtccattttgctaatgattaatacactgtttgggctggccagttttttccatgcatgcagctttgacgattggagcacaagtcagggcctttggtacttaaaattggaaaatggaaaaaacaaatttcaaaacctattcaaatgggttctagttcaatttgtttagtataaattgtcatagctggtttacctgaaaaccaaacaccattttaaaattgggtttacctcaggatgaccgtgccagaaaaatgggttgaagggataaacccnttgaagacgtggccccactggtaggatggtcctcttggtacttcggtgtgctccggacccgatggtgaccgatgacacaccctgggtggcatgcccggtgtatgttgggtttagcgttgtctgcattggttccaagagtggaaacaggtgtccaggctgtcactggttcacacaaatttttaattaaggaaacatttacccaaggggagcatcctttggactctctggttttttaaaaccttctgaaccgatgacttggagcccggcagagtaggctgtggctgtgggacttcagcacaaccttcaacattgctgtttcaaaggaattacagtttacgtccatttccaagttgtaaatgctagtctttaaatttttctttttttccaataaaaagaccgattaacttaaagtggtgttaaatgctttgtaaagctgagatctaaatggggacaaggcaggtgggaggggaggccagtgtacatgtaaatgcccacagcccagcattggggtttccctccccaaggccccagcaccaacctctgagcccaagaccttgcctgaaaacaagcagataccgattgcttcatcctatttatggacgtgtaggtctagttgcattttcactggggggaggggggaaggtgaattatggtaacttttaatgatctattcaggcagtagagctcttaagg

SEQ ID NO: 154334 - DNA, 483 bp, Homo sapiens
ggacctccacgacctccaacaccacctcttcttaagcccattcggggagctacggctcgtccacctcggagcaggttttgacctcggagtgacatcccgcccctaagtagggttctggtggcacgtcccccacgtagtcctcctctgggcaagcctctctggattatgggtaggcctcgtcctccgattgctcccctggccagggcccctatgggtcggcctaaccgtgcctggatgttactcttacccaggcgctgctttaagctcttcgaaggaaacagacgccagtgctcctcccggggctgccaccacggctccggcaggcgggccggggaccggccgaacctgagttgacggtggaggggctcgggttagctagatgggcggttggttagatgcgtaagcggtagtatgcgagctcagttcgttgttgctggttggctgtctagtcggccgatccgtctgctcacccggcctgccctt

SEQ ID NO: 154335 - DNA, 427 bp, Homo sapiens
tttcgtgccgctgcagacgaaaggcaggaaagggcaggccgggtgagcagacggatcggccgactagacagccaaccagcaacaacgaactgagctcgcatactaccgcttacgcatctaaccaaccgcccatctagctaacccgagcccctccaccgtcaactcaggttcggccggtccccggcccgcctgccggagccgtggtggcagtcccgggaggagcactggcgtctgtctccttcgactctcgggattcgaagacggctgcacagtcatcgtcggaagtcggtgctcttccgccccatcaagatgtgactatctgtgcggtgagggctgcaacttgattttctcttccctcctactacatcatcaccagcctatgactcggtgtatggttggcgatgagtgtagttcgcccaattcttgg

SEQ ID NO: 154336 - DNA, 387 bp, Homo sapiens
agcggccgctgcagacgaaaggcaggaaagggcaggccgggttcggccggtccccggcccgcctgccggagccgtggtggcagccccgggaggagcactggcgtctgtttccttcgattctcgggattcgaagatggctgcacagtcagcgccgaaagttgtgctaaaaagcaccaccaagatgtctctaaatgagcgctttactaatatgctgaagaacaaacagccgacgccagtgaatattcgggcttcgatgcagcaacaacagcagctagccagtgccagaaacagaagactggcccagcagatggagaatagaccctctgtccaggcagcattaaaacttaagcagaagagcttaaagcagcgcctgggtaagagtaacat

SEQ ID NO: 154337 - DNA, 1151 bp, Homo sapiens
ggcctcgttatcacttttggttgaatgtgctgcacttagctgcatttctaagtttctgattcttgcaagtttgtggaaacagaggagtctttaacccacatcagccttgatctaagtgtaccactttacttaaaagttcgcgggatctggagctactggtctagcaagccatgaaaatgccaataaatgtttgtaataaagcttttatttaaacatccattttgttcgaccttgaagctttactaatatgctgaagaacaaacagccgacgccagtgaatattcgggcttcgatgcagcaacaacagcagctagccagtgccagaaacagaagactggcccagcagatggagaatagaccctctgtccaggcagcatttaaaactttaagcagaagagcttaaagcagcgccttgggtaagagtaacatccaggcacggttaggccgacccataggggccctggccaggggagcaatcggaggacgaggcctaccccatattcaagagaggctttgcccagagaaggactacgtgggggacgtgccaccgagaaccctacttaggggcgggatgtcactccgaggtcaaaacctgctccgaggtggacgagccgtagctccccgaatgggcttaagaagaggtggtgttcgaggtcgtggaggtcctgggagagggggcctagggcgtggagctatgggtcgtggcggaatcggtggtagaggtcggggtatgataggtcggggaagagggggctttggaggccgaggccgaggccgtggacgagggagaggtgcccttgctcgcccctgtattgaccaaggagcagctggacaaccaattggatgcatatatgtcgaaaacaaaaggacacctggatgctgagttggatgcctacatggcgcagacagattccgaaaaccaatgattgaagcctgcccatcctcccatgaaagactgttgttagtcaacacatttgtaaataaccttgagataacagatgagaagaaatttgattgatgctggatggacctatcacaataggctgtggacttacttgccaccagcttgtgcatttagtgtgttccttttactttttgatactgtgttgtatgaaacccttttgtcctttgaaaaaaaaaaaaaaaaaaaa

SEQ ID NO: 154338 - DNA, 905 bp, Homo sapiens
ttcgtgaaaaggctaaggcgtatgtcacctgcctactttaggaatgcttgaggtccggtactgtgggggtctaagggtctggttaaaagtctaaaagcactaagctgggtacgcggacaatacagctaaaatcttccctgtcctctagtggtacgcggatctgacgcctgacgtaattgtgtagacgccattttagccggtcagacaagcactggacgtggcggccattttgttttggacaccgagcaggagctggcggccgctgcagacgaaaggcaggaaagggcaggccgggtgagcagacggatcggccgacctagacagccaacgcagcagcaacgaactgagctcgcatactaccgcttacgcatctaaccaaccgcccatctagctaacccgagcccctccaccagtcaactcaggttccggccggtccccgccgtcgccgtgcccggagccgtaggtggcagcccccgggaggagcatctggcgtctgtttccttcgattctcgggattcgaagatggctgcacaagtaagctccgaaaagttgtgctaaaaaagcaccaccaagatgtcttctaaatgaggcgcttttacttaatatgcttgaaggaacaaacaggccgacggcagtggaatatttcggggcttttggatggcagggcaacaacaggcagcttgggccagttgtccaggaaacaggaaggatttggcccaggcagatgggggatttgggaccctctgttccagggcagcatttaaaacttaaggcagaagagtttaaaggcaggcgcttgggttaaggagttaacattccgggcacggtttagggccgacccttaggggcccttgggcagggggagcaatcgcgaggacgaggcctacccataatccagagaggct

SEQ ID NO: 154339 - DNA, 420 bp, Homo sapiens
aaactctgcacgatggttgccccaaagctccgctcctggatgtatgctgtgtacggggccttggctgtgatgggcacaatgggcccttggtacctgctgctgctgcttggtcactgtgtgggcctctatgtggcctcgcttttgggccagccctggctctgtcttggccttggcttggccagcctggcctccttcaagatggaccccctaatctcttggcaggtgagccaggtggagccagtgagacgcgagggtgagctgtggcacatccgagcccaggcaggcctaagcgtggtggccatcatggccgtcgacatcttctttcacttcttctacatcctcactatccccagcgacctcaagttcgccaaccgcctcccagacagtgccctcgctggcctagcctattcaaacctggtg

SEQ ID NO: 154340 - DNA, 437 bp, Homo sapiens
tcatccctcctgcttggcacgagggatcctggaggacccaggcctgaccaagtacccggcctcagtttgttatcatgctggcaggcttggaacttctcgctctgtgaccagcctgggccacacactggtggaatgtgctctcacgaggccttccctgcccagtccccacaggacctcacctaaggtggaggagagcaacagcaagctcctggagtcagagaggaagctgcaggaggagcgacaccgcaccgtggtgctggagcaacatctggagaagatacgcctggagccagggaaggcatcatcctcccagagagcagctcccatgaccaaaacagctccgctcctggatgtatgctgtgtacggggccttggctgtgatgggcacaatgggcccttggtacctgctgctgctgcttggtcactgtgtgggcctc

SEQ ID NO: 154341 - DNA, 337 bp, Homo sapiens
cttagctgacctgctcaagtacaacttctacctgccatgaacttctgggccatcatcatgtacaaccttgtgagcctgaacagcctcaaattcacagagctggttgcccggcgcctgctactcacagggttcccccagaccacgctgtccatcctgtttgtcacctactgtggcgtccagctggtaaaggagcgtgagcgaaccttggcactggaggaggagcagaagcaggacaaagagaagccggagtaggagggagcgggtagagggatgggctctgctcagctattcttgggccagatggggcctgaccgatagaataaaagacttttctaca

SEQ ID NO: 154342 - DNA, 6777 bp, Homo sapiens
ctagttgttggcgttcatcctcccgccggggctggcagtggtggggaagagcggaggcgggggcggcaggtggggcgggggcggcagggtctggggcagccccgggagcaggggcagtgcgtgcgcctggggctgggttgggggcaggcctggggcagcggggacgccgtcgccggccagggtgtggctgacgcggaagcacttctccttgtgggccttgagcatgttggagaagcggaagcgctggccacacacgtcgcacgggtacggcttctcgcccgtgtgcgtgcgccggtgccgcttcatgttgggccggctggtgaagctcttgccacagatctcgcagatgtacggcttctctcctgtgtgggtcttcatgtgctcatcgaagtactgcttcatgttgaagtccttgccgcaccattggcacatgaactgcttgtggccaatgtggatgctcatgtgtgaccgcagctggtacttgtactggaagcgctcattgcagttctcacatctgaacggcttctcccctgagtgctgcagtgagtgcaccttgagggacatgctgcgcttgaaggactttccgcaggtctcgcaggtgaagggcatgtccttggtgtgggcaaccatgtgcttacgcacgtgggccatggtgtagaacttcttctcacagatctcgcatgagaacttcttctctgcgtagccgtgcacaatcttgttatgctcatggagggaccaaagcttcttgaaagctttgccacatgtcacacactggatgttgcgctcgcagtctgtctgcctgtgcagcagcagctcgctctccagcaggaagcgcttgccgcactggtcgcagatctgcatgcggctgtgggtcacattcatgtgtttctccaggtaccagcggttgttgaaaactcgtgggcacttctggcatggatggtgctgcttctcctccagcttcaccttggcccccagcccatcagtggctggcggccctcgggccgatgcagaggccactccagggggtggctttggcctcttcccaccccgccgcccagcttcttcaggttcaggggtaccccggcgccgggcgttctcccgggaccgtgtggccatgtgactgtggggaggggggtctgcccggctgcttcggcttccccgtggcccctgcttgcccccagcctccccctcctccccctcctcctcctcagagctctcttgatcctgctcactaggcccttcctcctcttcctcctcctcttcctcttcctgctcactgtgcccgtcctcctcctcttcttcctcttctccctgactgccaccctcttcctcctcctcctcctcccgtccactgccaccaccttcctcttcctcttcttcctcctcctcctcctcgtcgtcctcctcctcctcgtccgagtgtctctgcagcccgtcctcccggcccagaaccacggtggctgggcttggcccggcacctggcttcccctctggccccgtggacacgtgcagtgtctggttgttgaggttcacctccacgatgatctgggattgctccctgcggctgtaggtgccagaacccccaagctcttcctccaactcttctccaccctccagcttgcacaagctggctgggggcccaccggcctcctcgacaccaccctccttctcctccttaaagaagggctgggctggcccaatggtggcaggcactgtgccaccagcagtccctgccccgtcctcaacacgcaccgagtaagggtcagggccctcgcgggcatagatcttgggcaggcctggggtgtcggcctcctgcttgatgtcacagtagtagggcggcgcagctggagtgcagctggcagccggctgggccagggccacagtgcccggacctggtgggcctagagagcgggcgtccagcagctcttggcaggacgcagcgatgtcagccatctgcagcaatgaggcggcgctgagcacctcgtggacgttggccgcgttgaccagcagcttggacgtatagatgaagttgaggatctgctgcaggccaccaggtgccagtgcctccagggacagctccacacgctgcagctgcttgttctgggtgaagagtgagtggaagaactggctgtaggcggctagcacacccttgtgtgccggaaagacgctgcgctggggcaccagcaccaagtccacgtcgcagaggtcaggctggaagaggcgctgctcgttcaggcggcccatcaagcaggcaaagtgcagcgccacgtcctccaccagcgagaactcagccgccggggagtcagttgtcttctcaaccagcaacatggtgccgtggcgctgggggctcacagggccccgcgggatcgcgctgcccccggcggccaggccagggccgctccatgaagcgccgcgctgggggccgcccccgcgcagggccccgcgaccatggcccccgggggcgcggccaggcaggcggaggcgcagggccgcggcgagtccagcgccaagcagctgcggccccagagcctcgggcgcggcgggcggggggcgcggggcgccgattggagcccgcgcgtcagctggggccgccgtctggacgctgaccactgctgagtggcccccttgctcagcctctgctggggagatgcagccaggcttgcggaatgctgctctggcatggacacccgtgggggcagggggctggctctgttggcaggaggctggcaacactggacctggcaggaaggagtggtttgaagagctgtctggtgggcccacagggctgctcagagctgaggcttgaacttgaacattaactagagcaatgagggagtgaaagggctttccagacagaaagcctggaccgccgattataacttctgcctcggtggtaactgtcacttctctggcttctacttcgactccgactcctgctatagtagctatcgtaggtgtaggacctgctgtgacttttgtaactccggtaggaactgctccggcttctggttcggcctctgctgtaccatcctctgctccgacttctagagtagcttcttgatttcgagatctacttggactcctggactggctatcatcatcccgactaggcgtctgctcatcacttgaactctcctgatttcttggtctacggtttaagcgtgctgtctttcttacttcatcaaagagagacccaggccgaactttatttttgcttttaatttctattctcaagccttgtggtttcatttcaggcacagtggtcaacaccttaacttccacagcactggatgtggcagcattaggtgctgccaggttccccacaccttgcaggggcttccatttcttatcaatgaggttgatctggctcttctcagccacctccttcttcccggtactttctccagcactagccaagctagcagagctgctgtcctgtttccccacttcacccaacactttactttcggacatgctgctttcctgttttactacctctgcttgaggatgttccgttgccatatcctgcttcaaaacaatgtttatatctggggtatcaagccgtgcatttcctagaggggaagtctcctctacttttgctggggaactcctatcaggagtgcagatctccatgttgtcatctgtttgaagcacatcttccactccattgggaacactttcttcaacgtgctgaatgttttgtaaacaggccacattttcctcagtatttaaagctgtgggagaaatactgagtttactatcatctttagtaaactgatcaagatctgatgaaacagtcactgtatcatgtttacctgaaaggtcctcttcactggatttctcagtttttagaatattatcttttatggtttcattgttttcagaaacttttttctcttttgattcctgagtaacttgcttgtcatcaatctcctcctcctcctcttcaccaaattctagtggaggctgccagtgaaatgcttgctttcgttttggagccttatgctttttgtcttttttccctttcaatttctctttcacttttttggtgtgttctcttttaagattttcctttgacccatgtttgtgcttttgtggctttcccctattgttttccgaattggaacaggacccctcagagtcagaagttgatgtgcgctgtttgcttgatttccaagcaccattatcatcaggcagtgaagtatttgtggacgacttggttgtgggtttgactttgatgtgaatttcactaacctctgattcagaatcggatgtggcctcaccttcttccttgtcagaggatggatgggagtcatttttactgtttttagtgacatctcgttctgaatttgactcagagtcccatttactaccagcataattcttccttttgggcttactgccatttctaaggtgatcagaaagattctctttcaaagttcttttttttgaatgagggcattcccgttcagacttggatttttcttcacctctgtttttttcttgtttattatgtgttctttccatttggccctgcttctctttttcctgggctgactgtgtggcctgaacacttgactgctcactgtctgaagaataatctaaagatgatctgctctcgctatactttctcacacatgaagacctgtctctacctttgacatatttactgtgaagtgtcttttcagagctgctgctatgctttttatgtgaaacgctattttttttcccactggatctaagtctcctcttagctcgccttccatcatcactgctaatagaagtatatgaagatgatctactacactgtgaatgatcactgtatttatttcgtgaatgagatctagatgatggagacctagaccttgaatgtgaactagctagactacgtgatcttgtatatgatctggaataagatctactcctagaagatctgctccttgaccttggtgagctttctgaacttctatcactgtattttgaataagtgctctgatcactttccgaatttttttctcttttatggtaggatgatgagctaccagtctctttaatatttgctaaactgtaagtgctttggatgggtagcaaatgggttgttttagctttcatttcctgaattcgctcataagagggcttccaaggtttctgtccaggcttccatcttgaaggggggggactgtcactcagtggtattacaggaatattttctgctacaactggttgtactactacattttcattttgtgccatggttgctcttaaaggttctgttttaactggtttattttcacttaactgagaagctgtttttcttggtgattttgatgctctctttcggtgcccagacttggaactagatctggactttgatctacttcgagaatgtgatgaggactttgacgcagtccttgatcttgagcttcctctagaataagactgtgagtgagattttgatctgtatgagtctctgctggaatgggttaaagagctctggacatccttatcagatttagaccagtctctctttgatgagtgatgagatgacaatgaggaagaacgagaactcctttctctatcacaagaggatttcattcttcgagtggaagattttgaggattctatgtcagacggtataagaatccttctcttctttgtttgtttgtgtcttctgcagtgtttctgctttttccctttctttttatgcttaacctttttttcttttctgcgttttttatggtggccagagtgtcttgctgtactaaggtctgaataatatccattataggaccatgatctggatctctgagacaagcttctttcatcccatcggcttgaacaggggtcacttaacttatctcctttactccatttttctccactaggtggtctatatgctcttaatctctgcatttcctctttccagtgaggaggagtttcactgctgtcatcatcatctgactcagaacaggatcttgatcttggaggtgtgtgatagcgaatgggtgcaacatcaggaatcttcggttcaggttctgcagtaacaacaggcatatctcttctcagtaaaaatcggttctcaggcactggaggaatctcttctgggcggaccacaggtttttcccttttagcactggaatcaactgaccttttttcattggtatcactcctctcagagtgaccttttgggttcattgcatgtttattccttggctcttctgaactgcttgcttcctttcgcctctttttagaacgtttaacttttggcctcctcttatgtttcctccttctgcttctctcatgttcaagttcactttctgaagatgattcatcttttattgattttgtggcaagtactccacagtcaataactcgcacatctgcatatggtctgcttgcagcatcggtcttcagattttcaatttgttcgattacttcaaaaccagaaataaccagtccaaagactacatgcacccttttcattttgcaaaagaccacattctcttcactgaagtccccaccctgaatcataaagtttttaaccacacgatggaacgtagaacctttataacataacttcttcccagttgttttcccaaggcctttctctcccggctcccggttgatctcgatgtcgaagtggcactgcggccggtcctgcgcccccatcgcgaccgaggtggcggcaagaggccggcccgtcgcgacagcgcaggaggccaagacgaggccccctcccgccccgggcctcgcggctcccacgcagcgcgcacgcat

SEQ ID NO: 154343 - DNA, 157 bp, Homo sapiens
ctggtaaaggagcgtgagcgaaccttggcactggaggaggagcagaagcaggacaaagagaagccggagtaggagggagcgggtagagggatgggctctgctcagctattcttgggccagatggggcctgaccgatagaataaaagacttttctaca

SEQ ID NO: 154344 - DNA, 501 bp, Homo sapiens
ccttttgggttcattgcatgtttattccttggctcttctgaactgcttgcttcctttcgcctctttttagaacgtttaacttttggcctcctcttatgtttcctccttctgcttctctcatgttcaagttcactttctgaagatgattcatcttttattgattttgtggcaagtactccacagtcaataactcgcacatctgcatatggtctgcttgcagcatcggtcttcagattttcaatttgttcgattacttcaaaaccagaaataaccagtccaaagactacatgcaccccatccaggtgtggagcaggctttgtggtactttggagcgcacggtgtaacactctttatgaaaaactgggaaccattggtatgtttccctcgatttgccattgataaaaggaacgctctgtcatgtttgagaataaagttttcatctgtttgaagaaaacacaaatttgtcagtctccaattataagtcactttaaagtaatgttc

SEQ ID NO: 154345 - DNA, 7138 bp, Homo sapiens
acaacataattcaattttattaaaaaataacttcaaaatgtagaacaatcccctttaggaagaaaagctatttctgtagttcactctgtcagtaaacacacaagttgaacgctgcagcagagggctgtccttttccatggagaaaagaaatgaggcttctagggcctatcttttctgggtaaaaattccacctacagctgagatgggcagttattgcctgtggtaggcagaatttgaaaatgcccctcccactttcaatgagctaatctccagaacccgtgaatatgatgagatgagacagtactcctgcaattatgttctatcgcacaatcaaccttaaaatatatctgtgggcttgagctaatcatatgcccctaaaacaggaggacgggagagagatatgaagcatgagaaagagcaggaaggctggtttgaagctggaggggaccacataagaaggaatgcaggcagccttgaggtgagagaggggcctccagctgagagccagcaaagaactgaattccgccaacaacctgaatgaacttagaagcagattcttccccagagcctccatgaaggaatgttgtcctgccaacccttatttcagcctttaagaccctgagcagagaatccagccacactgtgccagactcatgagctacagaactgctatgggtattgttttttaaactgctaaatttggggtaatttgtcacacagcaatagaaaactaatacactgcccaagggtaacttttcttaacctaattacatttggcagtttctgcttgggttctgaatgcatttttttcctgctgactagtagtaatattctcctttgcaggcaacctttggaaacctttaatataaatcatactgttttgtattcagtatccagtattgtttgtttggcctaagtcctgttttctaatgtactttctgtctattgacctggcaaacaactgaccaccttaccctgttttcataccttctttgggtgatagttttaatacattcaagggcaccctccctccaccaagggttgtcagctccctccaactgagggctcttttccacttcccaaatacaccagacaaggcctgtggtagggtggtgctgagctctacatcaggcaaccaatatgaatttcttctgcataactggattaaactggcactaaggtgattaagtacacttggggaacaaattcaaagtaaagattaaaaaaaaaaaccacacacacacacacacacacacacacacacacactagtttttacaggtccaattatttttggaggaaccacccaaagccatgaaaatatgtaatttatgctataccctctatccctcttcccctgtctcttgcacctgggtcaggtcacgcaaggctttgagtcagctgcaggtcacagtggaaataggaaaaacatgctggttacaacagttcagctgctgttgtggtaatatcctgtacttgaaagacttgaaaggaaagccctgcaaaatgtctccaggatggtggcagttagatttttgatgttacttttgaagtccattcttcactcttccagaggcacacacacacagtagacttgagtggccaatatctcttactgccaatcctgcctgctccaggggaccccaacccacatctgtacttgagagaagccccccaaatagtcaaagtgaagacagctcagaataaaccatttttggtgccagtgattttgtctgaatttcatttttatggtattttaatatatgatatataagagtaatgcttaaagacgcaccaaaaattaccaagcaccaaagcatgaagtagaattgtttttataacctaaacttctgatcggtattgattaaaaagaacataaaatagtaagtcctcagagacagtgcaggtatttatagttaaggctgattgattcttcctaaccttgcccacaagcctgaagtaatacagactgtgtgggatgtatgatgaccactttcctaatcctgtgaagtatcaaagaagttaggaatgaattaagaaccccagagccactgccttatactcctggttaccaacagtatcaattctgggtggtttgtttttagagcacatatgtacaagactctatgtaatcagtatataaatatttggccgcctttaacagttctccttcacagttctatgcttggcagcatatatgctaaaactggaaaaacaggcaaaaagaatctgtattctaagggatacgtaagatagagtgaaatagacttaaaataatattgcaaattatacatagataaatttcacgatttcttgattcaagaaaatgaaattcatttccatagttggctactgtaaaatgtggcataaaaatatttttaggagacatatctgtattttaaattcttctccccacatgtaaatgaaccagtaacaattaagaagtgtctatttttgaaattcacctctgatattgaaatagaacaacagactgtcattacatttcttaagctaagttgccagatatttacaaataagatataatttgtatccggacgttttcaactgtatctgctgctctcactggggctccggtgatgagagtaacttcggtcactttcactgtcagagccataagatctacaactcctggaccgccgattataacttctgcctcggtggtaactgtcacttctctggcttctacttcgactccgactcctgctatagtagctatcgtaggtgtaggacctggatcgactgtggggatcatatgagctgctcctggatctgctcctgctggacgtcctgtgacttttgtaactccggtaggaactgctccggcttctggttcggcctctgctgtaccatcctctgctccgacttctagagtagcttcttgatcgataagatgatgtggaacttctcgatcgacttcttgagtgactataggagacagaccttgttctgtgtcttgatttggtttcagatttacttcgagatctacttggactcctggactggctatcatcatcccgactaggcgtctgctcatcacttgaactctcctgatttcttggtctacggtttaagcgtgctgtctttcttacttcatcaaagagagacccaggccgaactttatttttgcttttaatttctattctcaagccttgtggtttcatttcaggcacagtggtcaacaccttaacttccacagcactggatgtggcagcattaggtgctgccaggttccccacaccttgcaggggcttccatttcttatcaatgaggttgatctggctcttctcagccacctccttcttcccggtactttctccagcactagccaagctagcagagctgctgtcctgtttccccacttcacccaacactttactttcggacatgctgctttcctgttttactacctctgcttgaggatgttccgttgccatatcctgcttcaaaacaatgtttatatctggggtatcaagccgtgcatttcctagaggggaagtctcctctacttttgctggggaactcctatcaggagtgcagatctccatgttgtcatctgtttgaagcacatcttccactccattgggaacactttcttcaacgtgctgaatgttttgtaaacaggccacattttcctcagtatttaaagctgtgggagaaatactgagtttactatcatctttagtaaactgatcaagatctgatgaaacagtcactgtatcatgtttacctgaaaggtcctcttcactggatttctcagtttttagaatattatcttttatggtttcattgttttcagaaacttttttctcttttgattcctgagtaacttgcttgtcatcaatctcctcctcctcctcttcaccaaattctagtggaggctgccagtgaaatgcttgctttcgttttggagccttatgctttttgtcttttttccctttcaatttctctttcacttttttggtgtgttctcttttaagattttcctttgacccatgtttgtgcttttgtggctttcccctattgttttccgaattggaacaggacccctcagagtcagaagttgatgtgcgctgtttgcttgatttccaagcaccattatcatcaggcagtgaagtatttgtggacgacttggttgtgggtttgactttgatgtgaatttcactaacctctgattcagaatcggatgtggcctcaccttcttccttgtcagaggatggatgggagtcatttttactgtttttagtgacatctcgttctgaatttgactcagagtcccatttactaccagcataattcttccttttgggcttactgccatttctaaggtgatcagaaagattctctttcaaagttcttttttttgaatgagggcattcccgttcagacttggatttttcttcacctctgtttttttcttgtttattatgtgttctttccatttggccctgcttctctttttcctgggctgactgtgtggcctgaacacttgactgctcactgtctgaagaataatctaaagatgatctgctctcgctatactttctcacacatgaagacctgtctctacctttgacatatttactgtgaagtgtcttttcagagctgctgctatgctttttatgtgaaacgctattttttttcccactggatctaagtctcctcttagctcgccttccatcatcactgctaatagaagtatatgaagatgatctactacactgtgaatgatcactgtatttatttcgtgaatgagatctagatgatggagacctagaccttgaatgtgaactagctagactacgtgatcttgtatatgatctggaataagatctactcctagaagatctgctccttgaccttggtgagctttctgaacttctatcactgtattttgaataagtgctctgatcactttccgaatttttttctcttttatggtaggatgatgagctaccagtctctttaatatttgctaaactgtaagtgctttggatgggtagcaaatgggttgttttagctttcatttcctgaattcgctcataagagggcttccaaggtttctgtccaggcttccatcttgaaggggggggactgtcactcagtggtattacaggaatattttctgctacaactggttgtactactacattttcattttgtgccatggttgctcttaaaggttctgttttaactggtttattttcacttaactgagaagctgtttttcttggtgattttgatgctctctttcggtgcccagacttggaactagatctggactttgatctacttcgagaatgtgatgaggactttgacgcagtccttgatcttgagcttcctctagaataagactgtgagtgagattttgatctgtatgagtctctgctggaatgggttaaagagctctggacatccttatcagatttagaccagtctctctttgatgagtgatgagatgacaatgaggaagaacgagaactcctttctctatcacaagaggatttcattcttcgagtggaagattttgaggattctatgtcagacggtataagaatccttctcttctttgtttgtttgtgtcttctgcagtgtttctgctttttccctttctttttatgcttaacctttttttcttttctgcgttttttatggtggccagagtgtcttgctgtactaaggtctgaataatatccattataggaccatgatctggatctctgagacaagcttctttcatcccatcggcttgaacaggggtcacttaacttatctcctttactccatttttctccactaggtggtctatatgctcttaatctctgcatttcctctttccagtgaggaggagtttcactgctgtcatcatcatctgactcagaacaggatcttgatcttggaggtgtgtgatagcgaattgtgccccttcctttaatcttccgtccagactttgatacagatggtttctgatcacttacaatgggtgcaacatcaggaatcttcggttcaggttctgcagtaacaacaggcatatctcttctcagtaaaaatcggttctcaggcactggaggaatctcttctgggcggaccacaggtttttcccttttagcactggaatcaactgaccttttttcattggtatcactcctctcagagtgaccttttgggttcattgcatgtttattccttggctcttctgaactgcttgcttcctttcgcctctttttagaacgtttaacttttggcctcctcttatgtttcctccttctgcttctctcatgttcaagttcactttctgaagatgattctgaagaagaggaggaattggaagaggaatccgagccttctgaatgagttggtttcttcctttttttctcaaaaacatcttttattgattttgtggcaagtactccacagtcaataactcgcacatctgcatatggtctgcttgcagcaggcggtcttcagattttcaatttgttcgattacttcaaaaccagaaataaccagtccaaagactacatgcaccccatccaggtgtggagcaggctttgtggtaatgaaaaactgggaaccattggtatgtttccctcgatttgccattgataaaaggaacgctctgtcatgtttgagaataaagttttcatctttaaaatatccaccataaattgattctccaccttttccattaccttcactgaagtccccaccctgaatcataaagtttttaaccacacgatggaacgtagaacctttataacataacttcttcccagttgttttcccaaggcctttctctcctgagcacaagcaaaggaagtttttgcatgtttttggacatatgtctgagaagagctgaaacataatgcgaccaaccggctcccggttgatctcgatgtcgaagtggcactgcggccggtcctgcgcccccatcgcgaccgaggtggcggcaagagctggctggcctccagcctgagcgggtccccgtgagcagaagagaaagcactgccactgcagccaaaccccaacgccgctaacggaacgccgtctcctcccccaggccgggcctcccaatgccacgctaaaccccgcgagagtcgggacaaataccgcgagagtac

SEQ ID NO: 154346 - DNA, 1161 bp, Homo sapiens
gtcaatctgtgctcatggatgggcttctcagcaatataattctttttattttttatttttctcttcagttttccaaaatgggtcggatagtaagcagtacaatatcatgtgtccctgtaaggaaggttcccaagtaccaagcgaaatctgaatgttaccagactctttaccctaaaatggttaagaaccattgttttaaaggcagaaaactgaggcccagtttgcataatcgtttccttttatgaagcagatttcaagttctcattccattctagttgcttcatacaacaaacagtttggttttattttcaggtctgtggacatgtcattgattacagttaattgtcttgattactgtttatagcttaattatcaaaccagttgtttcttgaatttgtattatgacaggcgggtgcatgtagtctttggactggttatttctggttttgaagtaatcgaacaaattgaaaatctgaagaccgatgctgcaagcagaccatatgcagatgtgccgagttattgactgggggagtacttgccacaaaatcaataaaagatgcctcaatgtatcacggatgggtaccagatcttcatattcatgcagaagacactctcctgcctttctatcttggggaaaaggacgatgtcacttatgcaataaagcccacttgctggccggggcttgacattattccttcctgtctggctctgcaccgtattgaaactgagttaatgggcaaatttgatgaaggtaaactgcccaccgatccacacctgatgctccgactggccattgaaactgttgctcatgactatgatgtcatagttattgacagcgcgcctaacctgggtatcggcacgattaatgtcgtatgtgctgctgatgtgctgattgttcccacgcctgctgagttgtttgactacacctccgcactgcagtttttcgatatgcttcgtgatctgctcaagaacgttgatcttaaagggttcgagcctgatgtacgtattttgcttaccaaatacagcaatagtaatggctctcagtccccgtggatggaggagcaaattcgggatgcctggggaagcatggttctaaaaaatgttgtacgtgaaacggatgaagttggtaaagacttgcatgccctgctagtgcgactctag

SEQ ID NO: 154347 - DNA, 746 bp, Homo sapiens
ttttaagtgttttgttttgttgttttggagttgagagtaactttaatttttatgtgtattcatgctgtgtatttatggctacaagtcaaactgatttcatatgtatgcatacatatagtctaatagagatgattgtaattcattataatcttgagtttttttaaattagtaagatggctactattgctgttttggggtttttaaggttagatatatatcatgtttaactttttcccctatctttttatctttacttctttgttctctacatgctgtgtttaaacctttctgctctcttcacctgaacacatcgtgtttgacatcatctttgtgttgatgtttattacatagtaccacaaagcctgctccacacctggatggggtgcatgtagtctttggactggttatttctggttttgaagtaatcgaacaaattgaaaatctgaagaccgactgctgcaagcagaccatatgcagatgtgcgagttattgactgtggagtacttgccacaaaatcaataaaagatgtttttgagaaaaaaaggaagaaaccaactcattcagaaggctcggattcctcttccaattcctcctcttcttcagaatcatcttcagaaagtgaacttgaacatgagagaagcagaaggaggaaacataagaggaggccaaaagttaaacgttctaaaaagaggcgaaaggaagcaagcagttcagaagagccaaggaataaacatgcaatgaaccca

SEQ ID NO: 154348 - DNA, 2980 bp, Homo sapiens
  misc_feature (1)...(2980): n = a,t,c or g
attggcacgaggggcagaagtcttaggatacggctcgcacagtcgtggtagggttccaggtgcattagtggggcagggggcgggccggctgttcacagagcacccaggttcctcaccagttactctggccatatatccaacacagaaagcaacaagtgtggctgtgtccatctctgctcccccaaaggcccgctctaggccttatcctccctctaggtcctgccacaacctgtccctggctggctccagcgtcctcggtccctcctgggcctgtgcaccggtggatggggcgcccatagcactgccggtaaaggagcctgcatgttcaggcccctcgggggatttggggggactgcgggaggcgcagcctaagacccaaattgcttgcccccaatgaggctagcacttaataggaaacccttttttgttgtcatttaatgtctttattcctgcctttaantaatgggggaggaaggttccataagctacatgtttcctaagttaaagctctttcctatttgtgtttatacagtttttgttttgtttatactcttttgcacctttaaacccccaccactccccgacactattgcctttcccagcatggctggagtgggaagaggcttgggccccgggggaatggttagggggactgaacccctctgaccttatgaggcccatggcactggggcagggagctggggacattttaatcatcaataaacgaagcactttattctgtacagatttgggcaggcccaaggtgcccgagtgatctgaggatttataatccaagccacaccaccctggttgttctctgggcttggagggtacagtgccagcagcttccttgcccaattgatgttggagctgtagacgtacgctcaggcgctcctgctgtccatcttttattgattttgtggcaagtactccacagtcaataactcgcacatctgcatatggtctgcttgcagcatcggtcttcagattttcaatttgttcgattacttcaaaaccagaaataaccagtccaaagactacatgcacccccagattccagaggggggtcactgagaaacccaatcctgaagggaggcaggcagaagtctgtcccaggtctgccatgtgaccttgacaggtccctgcccctatctggcccatgacccctccatctgtacgaggagaccgtcggctgctggggggcccaggggagatggctacagggctggggatgaagatttaggggaggatcaaggccctgtccaggctatgggcatcaagacagcattgccggcggctgagctgggcctctactctctggtgctgagtggggccctggcctatgctggccggggcctccttgaggcttcacaagatggggcccacaggaaggccttccgggagtctgtgcgacctggctgggagtacattggccggaagatggatgtggctgacttcgagtgggtgatgtggttcacctcctttcgcaacgtcatcattctttgccctctccggacatgtgctgtttgctaaactctgcacgatggttgccccaaagctccgctcctggatgtatgctgtgtacggggccttggctgtgatgggcacaatgggcccttggtacctgctgctgctgcttggtcactgtgtgggcctctatgtggcctcgcttttgggccagccctggctctgtcttggccttggcttggccagcctggcctccttcaagatggaccccctaatctcttggcagagcgggtttgtaacaggcacttttgatcttcaagaggtgctgtttcatgggggcagcagcttcacagtgctgcgttgcaccagctttgcactggagagctgtgcccaccctgaccgccactactccttagctgacctgctcaagtacaacttctacctgcccttcttcttcttcgggcccatcatgacctttgatcgcttccatgctcaggtgagccaggtggagccagtgagacgcgagggtgagctgtggcacatccgagcccaggcaggcctaagcgtggtggccatcatggccgtcgacatcttctttcacttcttctacatcctcactatccccagcgacctcaagttcgccaaccgcctcccagacagtgccctcgctggcctagcctattcaaacctggtgtatgactgggtgaaggcggccgtcctctttggtgttgtcaacactgtggcatgcctcgaccacctggacccaccccagcctcccaagtgcatcaccgcactctacgtctttgcggaaacgcactttgaccgtggcatcaacgactggcttttgcaaatatgtgtataaccacattggtggggagcattccgctgtgatcccagagctggcagccacagtggccacatttgccattcaccacactgtggcttgggccttgtgacattgtctacctgtggtcattccttaactgctttggccctcaaactttgaaactcctgggtgccaaaaactggccagaagtgggggccccctaaacacgaaattgaaggcctcctctgtcaagtgcagatgtcccgtagggtcccgggccctgtttggagcccatgaactttcttggcccatcatcatgtacaaccattgtgagcctgaacagccttcaaattcacagaagctggttgcccggcgcctgctactcacagggttcccccagaccacgctgtccatcctgtttgtcacctactgtggcgtccagctggtaaaggagcgtgagcgaaccttggcactggaggaggagcagaaagcaggacaaaaagaagccggagtaggagggaacgggtaaaaggatgggctttgctcagctatttttgggccagatggggcctggcccgatagaataaaagactttttctacaacagcctgggctgttccttgactcttgtctccaccgtcccttgcctccaccgccattatcggctgacggacttggaagcttttag

SEQ ID NO: 154349 - DNA, 391 bp, Homo sapiens
cgcttggcgcagtggacttttatcgactgcgcaagaagttcccgctgcccaagaccatctgggacggcgaggagacagtctactgcttcaaggagcgctcccgcgcagcgctcaaggcctgctaccgcggcaaccgctaccccacgccggacgagaagcgccgcctggccacactcaccggcctgtcgctcacgcaggtcagcaactggttcaagaaccggcgacagcgcgaccggaccggggccggaggcggcgcgccctgcaagaggaaacttcctcctggccaaccctgtgtctggcagccccatcgtgacgggtgtggccgtgcagcagggcaagatcatcctcaccgccaccttccccaccagcatgctcgtctcccaggtcctgc

SEQ ID NO: 154350 - DNA, 2947 bp, Homo sapiens
atggctaccttgcctgcggagccgagcgcggggccggcggctgggggggaggcggtggcggcggcggcggcgaccgaagaggaggaggaggaagcgcgccagctcttgcagactttgcaggcggccgagggtgaggcggcggcggcggccggggccggggcgggcgcagcggctgcgggagctgagggcccgggatccccgggcgtccccgggtcgccccccgaggccgcttccgaaccgcccacgggcctccgcttctcgcccgagcaggtggcgtgcgtctgcgaggcggctgctccaggcgggccacgccggccgcttgagccgcttcctgggcgcactgcccccggccgagcgcctacgtggcagcgacccggtgttgcgcgcgcgggccctggtggccttccagcggggcgagtacgccgagctctaccggctactcgagagccgccccttccccgccgcccaccacgccttcctgcaggacctctacctgcgcgcgcgctaccatgaggccgagcgggcccgcggccgcgcgcttggcgcagtggacaagtatcgactgcgcaagaagttcccgctgcccaagaccatctgggacggcgaggagacagtctactgcttcaaggagcgctcccgcgcagcgctcaaggcctgctaccgcggcaaccgctaccccacgccggacgagaagcgccgcctggccacactcaccggcctgtcgctcacgcaggtcagcaactggttcaagaaccggcgacagcgcgaccggaccggggccggaggcggcgcgccctgcaagagcgagtctgatgggaatcccacgactgaggacgagtccagccgaagtcctgaggacctggagagaggggcggccccagtgtccgccgaggccgctgcccagggctccatattcctggcagggaccggccctcccgcgccttgcccggcttcctcctccatcctggtgaacgggagcttcctggcagccagcggctccccagcagtgctcctcaacgggggccccgtcatcatcaacggcctggccctgggcgaggcctccagcctgggcccgctgctgctcactgggggcgggggtgcccctccaccgcagcccagccctcagggggccagcgagaccaagacctctctggtcctggaccctcagacaggggaggtgcggctggaggaggctcagtcggaggcccctgagaccaaaggggcccaggtggctgctccgggaccagcccttggagaggaggtcctggggcccctggcccaagtggtgcctggccccccgacggctgccacctttcctctgcccccggggccagtgcctgctgtggctgccccacaagtggtaccgctctccccacccccggggtatcccacgggcctgagccccacctccccactattgaacctgccccaggtagtacccacctcacaggtggtgaccctgccccaggctgtggggcccctgcagctgttggcagccgggccaggcagccctgtgaaggtggcagctgcagcaggccctgccaatgtgcacctcatcaactccggggtgggcgtgactgccctgcagctgccttcggccactgccccaggaaacttcctcctggccaaccctgtgtctggcagccccatcgtgacgggtgtggccctgcagcagggcaagatcatcctcaccgccaccttccccaccagcatgctcgtctcccaggtcctgccgccagcccccggcctggccctgccactgaagccagagacggccatctccgtgcctgagggaggcctcccggtggcccccagccctgctctcccagaggctcacgccctaggcaccctttctgcacagcagccaccccccgccgctgccaccacctccagcaccagcctgcccttctcccctgactcccctggcctcctgcccaacttcccggcgcccccaccagaggggctgatgttgtcacccgcggccgtgcctgtctggtcagcagggctggaactaagcgcaggaacagaggggctgctggaagcggaaaaggggctggggacacaggccccccacaccgtgctgaggctgccagaccccgaccctgaggggctgctcctgggggccaccgcagggggtgaggttgacgaggggttggaagctgaggccaaggttctgacccagctccagtcggtgcctgtggaggagcccttggaactgtgacccagtgtggccccgtggcctctcccgacattggtgctgaagacgcagggacaggaatgggaggggggagccccagaaatgcggttgctgaagaccccagtcaccacatccttctgcctgggtggcctctccaagccctggtggtgctgggggttgtatccccggccacctcctgtccaggtctccatccccctttggatgggaggcctctctgttacagcccttcccatgctgttcccctgcccatatacgtgggggaactcagggttccttgacttccaggcccttgcccccttccacttggtacttagctgtaagcggaacaccctgccccagggccggaacttccagcccccagagccctctccctgtcactccctgaaacactattaatagctcttgccgatagctggtgttgtcacaaactgccttgaatccgaaggtggaggacaggcagccccgcgcccctgagactggagaccctccccagtgtggcatttcctgccaggggcggggggtggggcagctgtggggagacgggggtcttccttcaccagctcccctcgactcaagcccttgtcctcattatccggcccagaccaaagattccctcatccctgggggcagccctgccgctgtgtctcctttgtatcctaaatctttatttttctaggacatgttatgcctccattttcaattaaaataaagttatcggattacaccacc

SEQ ID NO: 154351 - DNA, 478 bp, Homo sapiens
tttttttttttttttctatttttaatggctttggctttatagcacgaagcaggcaccctctcgttaaaggcacacagtcctctcttctgccccacctcctgggtccttaaaatcgagtcctgagttccagaggggtcactgcaaggcagcagggaagggagagggtcacagtttcactctgtgagtatcagacaccctctgggcattggctgggctggctgcagggaggtgggctggaggctgccagactcttgggttgcagggagttgtccagggccttggccttcttattaatggaccgagggctggagctgctcctctttctcttggcaatcttcatcctccaagtgctgcacgctggcatcccagttaagctgcctctcatacggggacaggacagagcttggttggaatcgtcgaaccacataacccaacctcttcaggtggctgaagacctggtactgcaggaaggtcacag

SEQ ID NO: 154352 - DNA, 718 bp, Homo sapiens
gaggagcttaccatatgcttgctgaccgaccacactgtgaccttcctgcagtaccaggtcttcagccacctgaagaggttgggttatgtgggtcgacgaattccaaccagctcttgtcctgtccccgtatgagaggcagcttaacctggatgccagcgtgcagcacttggaggatggagatggcaagagaaagaggagcagctccagccctcggtccattaataagaaggccaaggccctggacaactccctgcaacccaagagtctggcagcctccagcccacctccctgcagccagcccagccaatgcccagaggagaaaccccagggagtcaagccccatgaagggcccagggggcccctttcagcttctggggtccctgggccccagccctggcccggccagggagggggtggggtgcagctgggagagtggcagagccgagaacggagtcacgggagccggtaagcggcgctggaacttcgagcagatctccttccccaacatggcttcagacagccgccacacccttctgcgcgccccagccccagagctgctcccggccaacgtggctgggcgggagacagacgctgagtcctggtgccagaagctgaaccagcacaagaagaagctctccaggcgggaacgggagcaccacgcggaggccgcgcagttccaggaagatgtcaacgccgatcccgaggtgcagcggtgctt

SEQ ID NO: 154353 - DNA, 572 bp, Homo sapiens
gcggcagccgaggccaaaaagagcgtttgtcgccgtctagattacatcacgcagagcctccagcagcagggcgtgcaggcagaaaatataactgtgacaaaggattttaggagagtggaaaatgcttatcacatggaagcagagaagttactcaggcgtggtggcgtgtgactgtaatctcagctaccggggaggctgaagcagaagaaacgctcgaacctgggaggcagagcttacagtgagccgagatcgcaccactgcacttcagcctgggtgacaaagtgagactccatctacatacatacatacatacatacatacatacatacataaaatgcccagtatcttacaagactgtagttcacagtgggtaattcaaatcagacactgctcttcaagagaggtaatattaatagaaatctttcaagaaggattgttttctactattaaaacaataaaactcttataaacctgtttatcagaaggatatttctgtttcagcaactcctggaatccttcttcaacatcccaaccaacattactcccagatagccatgtcacctgtgaattat

SEQ ID NO: 154354 - DNA, 812 bp, Homo sapiens; identical to SEQ ID NO: 113438

SEQ ID NO: 154355 - DNA, 2343 bp, Homo sapiens
gagcatgacctgcattacgccaagcttggcacgagggcaacgggcggaggcggccgaggaccgtctgggcacaatgtttttttggacgagggcggcacgcccctgctggccgagagcctggtctaccagatcttcctgagcctgggcctggccgatttgctggccgccgggctggtgtgccgccaatggcaggccgtgtcgcgggacgagttcctgtggagggagcagttctaccgctactaccaggtggcccgcgacgtgccccgacacccagcggccatgtcctggtacgaggagttccagcggctgtatgacacggtgccctgcgtggaggtgcagacgctgagggaacacacagaccaggtcctgcacctcagcttctcccattccgggtaccagttcgcgtcctgctccaaggactgcactgtgaacatctggagcaacgacctgaccatctcgctgctgcacagcgcggacatgcggccctacaactggagctacacccagttctcccagttcaacaaggacgactcgctactgctggcctcgggggtgttcctggggccgcacaactcctcatccggcgagattgctgtcatcagcctagactccttcgcgctgctgtcccgcgtgcggaacaagccctatgacgtgtttggctgttggctcaccgagaccagcctcatctcggggaacctgcaccgcatcggagatatcacctcctgctcggtgctgtggctcaacaatgccttccaggatgtggagtcagagaacgtcaacgtggtgaagcggctgttcaagatccagaacctcaatgccagcaccgtccgcacggtgatggtggccgactgcagccgcttcgacagccctgacctgctgctggaagccggtgacccggccacgtccccctgccgcatctttgacctgggcagcgacaacgaggaggtggtggctgtgctcgccccccgcccacgccaaggagggcttgcggcactttctggaccgcgtgctggaggggcgggcgcagccacagctgtcggagcgcatgctagagaccaaggtggccgagctgctggcccagggccacaccaagccacccgagcgcagtgccacaggcgccaagagcaagtacctcatcttcaccactggctgcctcacctactccccacaccagatcggcatcaagcagatcctgccacaccagatgaccacggcagggcccgtgcttgggtgagggccggggctccgattgccttcttcgaccgccgcttggaccaccgtcatagacatacacgggacacatcatcgggcatgggcctgttcgcccgacaacaggtacctgtacgtgaacagccgcgcctggcccaacgggtgcggtggtggcccgaccccatgcagcctgccaccaatcgcggaggagattgaccttgctggtgttcgacctcaatgaccatgcgggaggtgaggcgggctctgcgtgcgcaccgcgcctacacgcccaacgacgagtgcttcttcatcttccttggacgtcagcaagggacttccgtggccagcggggcggaaggaccggcacggctaacatcttgggaccgccactacaacatctggtctggccaggctgcggcacgaggatgtggtcaactcagtggtcttcagtccccaaggagcaaggaggtgctgcttcacggccaagggacacgccacccatcaaaagctgggcgctccccacgcaccatgggcgtccttcagggcacctcgcccacggcctcgcaccttcttctcctggcttgccagccagaggcgctgaggtgtgctgggtgcaactggagccaccgggaccccttgaggacatcgccaggctctgtggctttttcccgagcggggagaggtggagatgcttatagcagttacgcctttaggaaaggggacaaaccaggccccggccacaacgctcacaacacaaaaaccttgtcacggcagctgtgatgcttggcacggggtggccagtgcagatggagcccaaaggccccctcggcctcctgggcaactttggggtacacaaggatactgggggtgccgctcctcactcaaaccccaggctaggggtacaccctgacccagctggcctcggcccgggggcaccttcggctggtcctgtggggccctggacggttggcccagtggtggcaggggctgctcctggctgtggttgctcgcgcccgcggcttgggtgctggccggtcacgctgctgtgggcccgagtagtgttgcatgtccacgcaccacccgttcagggccctgaataaacagttggcaacagcaaaaaaaaaaaaaaaaaaa

SEQ ID NO: 154356 - DNA, 3646 bp, Homo sapiens
atggcgttaatgtttacaggacatttactattcttagcattattgatgtttgctttctctacttttgaggaatctgtgagcaattattccgaatgggcagttttcacagatgatatagatcagtttaaaacacagaaagtgcaagatttcagacccaaccaaaagctgaagaaaagtatgcttcatccaagtttatattttgatgctggagaaatccaagcaatgagacaaaagtctcgtgcaagccatttgcatctttttagagctatcagaagtgcagtgacagttatgctgtccaacccaacatactacctacctccaccaaagcatgctgattttgctgccaagtggaatgaaatttatggtaacaatctgcctcctttagcattgtactgtttgttatgcccagaagacaaagttgcctttgaatttgtcttggaatatatggacaggatggttggctacaaagactggctagtagagaatgcaccaggagatgaggttccaattggccattccttaacaggttttgccactgcctttgactttttatataacttattagataatcatcgaagacaaaaatacctggaaaaaatatgggttattactgaggaaatgtacgagtattccaaggtccgctcatggggcaaacagcttctccataaccaccaagccactaatatgatagcattactcacaggggccttggtgactggagtagataaaggatctaaagcaaatatatggaaacaggctgtagtggatgtcatggaaaagacaatgtttctattgaatcatattgttgatggttctttggatgaaggtgtggcctatggaagctacacagctaaatccgtcacacagtatgtttttctggcccagcgccattttaatatcaacaacttggataataactggttaaagatgcacttttggttctattatgccacccttttacctggcttccaaagaactgtgggtatagcagattccaattataattggttttatggtccagaaagccagctagttttcttggataagttcatcttaaagaatggagctggaaattggttagctcagcaaattagaaagcaccgacctaaagatggaccgatggttccttcaactgcccaaaggtggagtactcttcacactgaatacatctggtatgatccccagctcacaccacagccacctgctgattatggtactgcaaaaatacacacattccctaactggggtgtggttacttatggggctgggttgccaaacacacagaccaacacctttgtgtcttttaaatctgggaagctggggggacgagctgtgtatgacatagttcattttcagccatattcctggattgatgggtggagaagttttaacccaggacatgagcatccagatcagaactcatttacttttgcccccaatggacaagtatttgtttctgaagctctctatggacccaagttgagcgcaccttaacaatgtattggtgtttgctccatcaccctcaagccagtgtaataagccctgggaaggtcaactgggagaatgtgcgcagtggcttaagtggactggcgaggaggttggtgatgcagctggggaaataatcactgcctctcaacatggggaaatggtatttgtgagtggggaagccgtgtctgcttattcttcagcaatgagactgaaaagtgtatatcgtgctttgcttctcttaaattcccaaactctgctagttgttgatcatattgagaggcaagaagattccccaataaattctgtcagtgccttctttcataatttggatattgattttaaatatatcccatataagtttatgaataggtataatggtgccatgatggatgtgtgggatgcacattacaaaatgttttggtttgatcatcatggcaatagtcccatggccagtatacaggaagcagagcaagctgctgaatttaaaaaacgatggactcaatttgttaatgttacttttcagatggaatccacaatcacaagaattgcatatgtcttttatgggccatatatcaatgtctccagctgcagatttattgatagttccaatcctggacttcagatttctctcaatgtcaataatactgaacatgttgtttctattgtaactgattaccataacctgaagacaagattcaattatctgggattcggtggctttgccagtgtggctgatcaaggccaaataacccgatttggtttgggcactcaagcaatagtaaagcctgtaagacatgataggattattttcccctttggatttaaatttaatatagcagttggattaattttgtgcattagcttggtgattttaactttccaatggcgtttttacctttcttttagaaaactaatgcgatggatattaatacttgttattgccttgtggtttattgagcttttggatgtgtggagcacttgtagtcagcccatttgtgcaaaatggacaaggacagaggctgagggaagcaagaagtctttgtcttctgaagggcaccacatggatcttcctgatgttgtcattacctcacttcctggttcaggagctgaaattctcaaacaactttttttcaacagtagtgattttctctacatcagggttcctacagcctacattgatattcctgaaactgagttggaaatcgactcatttgtagatgcttgtgaatggaaggtgtcagatatccgcagtgggcattttcgtttactccgaggctggttgcagtctttagtccaggacacaaaattacatttgcaaaacatccatctgcatgaacccaataggggtaaactggcccaatattttgcaatgaataaggacaaaaaaagaaaatttaaaaggagagagtctttgccagaacaaagaagtcaaatgaaaaggcgcctttgatagagatgctgaatatattagggctttgaggagacacctggtttactatccaagtgcacgtccctgtgctcagtttaagcagtggaagctggacgttaaagcttcatttttttcaggaagttttaggagcttcgatgagggcattgtacatagtaagagaccctcgggcatggatttattcaatgttgtacaatagtaaaccaagtctttattctttgaagaatgtaccagagcatttagcaaaattgttttaaaatggagggaggtaaaaggcaaatgtaacttaaattcgggttatgctttcggagtatgaaccattgaggaaagaattatcaaaatcccaaatcaaatgcagtgtccctcttgtctcacttgtggctagcaaatacagcagcagccttgagaataaatacagatttgctgcctactagctaccagctggtcaagtttgaagatattgtgcattttcctcagaaaactactgaaaggatttttgcctttcttggaattcctttgtctcctgctagtttaaaccaaatattgtttgccacctctacaaaccttttttaccttccctatgaaggggaaatatcaccaactaatactaatgtttggaaacagaacttgcctagagatgaaattaaactaattgaaaacatctgctggactctgatggatcgcctaggatatccaaagtttatggactaa

SEQ ID NO: 154357 - DNA, 512 bp, Homo sapiens
atccagcgtggtggaattctctcgacccagaggtggaacaagtcaatcagatatttcaactctttctacgttcccatcaagtcctgatttggaagtgagtgagactgcaatggaagtagatactccagctgaacaatttcttcagccttctacatcctctacaatgtcagctcaggctcattcgacatcatctcccacagaaagccctcattctactcctttgctatcttctccagatagtgaacaaaggcagtctgttgaggcatctggacaccacacacatcatcagtctgataacaataatgaaaagctgagccccaaaccagggacaggtgaaccagttttaagtttgcactacagcacagaaggaacaactacaagcacaataaaactgaactttacagatgaatggagcagtatagcatcaagttctagaggaattgggagccattgcaaatctgagggtcaggaggaatcttttcgtcccacagagttcagtgcacccaccagaa

SEQ ID NO: 154358 - DNA, 960 bp, Homo sapiens
gagggtgaaactgcaatggaagtagatactccagctgaacaatttcttcagccttctacatcctctacaatgtcagctcaggctcattcgacatcatctcccacagaaagccctcattctactcctttgctatcttctccagatagtgaacaaaggcagtctgttgaggcatctggacaccacacacatcatcagtctgattctccttcttctgtggttaacaaacagctcggatccatgtcacttgacgagcaacaggataacaataatgaaaagctgagccccaaaccagggacaggtgaaccagttttaagtttgcactacagcacagaaggaacaactacaagcacaataaaactgaactttacagatgaatggagcagtatagcatcaagtttctagaggaattgggagccattgcaaatcctcgagggtccaggaggaaatctttccgtccccacagatgctccagtgcaaccaccagaaggagacagtgaaacaaaagctcctgaagaatcatcagaggatgtgacaaaatatcaggaaggagtatctgcagaaaacccagttgagaaccatatcaatataacacaatcagataagttcacagccaagccattggattccaactcaggagaaagaaatgacctcaatcttgatcgctcttgtggggtttcaggaagaatctgcttcatctgaaaaagccaaggaaccagaaacttcagatcagactagcactgagagtgctaccaatgaaaataacaccaatcctgagcctcagttccaaacagaagccactgggccttcagctcatgaagaaacatccaccagggactctgctcttcaggacacagatgacagtgatgatgacccagtcctgatcccaggtgcaaggtatcgagcaggacctggtgatagacgctctgctgttgcccgtattcaggagttcttcagacggag

SEQ ID NO: 154359 - DNA, 1945 bp, Homo sapiens
  misc_feature (1)...(1945): n = a,t,c or g
aaccggaggacccgtcccggctgcggagtcgttacctgttatagaagagaatttatccaaagattaaaacttgaagcagcccttaatgtgcatgatggttgtgttaatacaatctgttggaatgacactggagaatatattttatctggctcagatgacaccaaattagtaattagtaatccttacagcagaaaggttttgacaacaattcgttcagggcaccgagcaaacatatttagtgcaaagttcttaccttgtacaaatgataaacagattgtatcctgctctggagatggagtaatattttataccaacgttgaggcaagatgcaggaaaccaacagacaatgcccaatttacgtgtcattatggaactacttatgagattatgactgtacccaatgacccttacacttttctctcttgtggtgaagatggaactgttaggtggtttgatacacgcatcaaaactagctgcacaaaagaagattgtaaagatgatattttaattaactgtcgacgggctgccacgtctgttgctatttgcccaccaataccatattaccttgctgttgggttgttctgacagctcagtacggaatatatgatcgggcgaatgctggggcacaaggagctacaggggaattatggcaggtcgaggggactactgggattgggttgccccgttttatttcccttccccatcttaataataagtcctgcagagtgacatctctgtgttacagtgaagatggtcaagagattctcgttagttactcttcagattacatatatctttttgacccgaaagatgatacagcacgagaacttaaaactccttctgcggaaggagagaagagaagagttgcgacaaccaccagttaagcgtttgagacttcgtggtgattggtcagatactggacccagagcaaggccggagagatgaacgagaacgagatggagagccagagtccccaatgtgtccattgatgccagagaatgtcctgatatgttatcaagatggtttgaagaagcaagtgaggttgcacaaagcaatagaggacgaggaagatctcgacccagaggtggaacaagtcaatcagatatttcaactcttcctacggtcccatcaagtcctgatttggaagtgagtgaaactgcaatggaagtagatactccagctgaacaatttcttcagccttctacatcctctacaatgtcagctcaggctcattcgacaatcatctcccaaagaaagccctcattcctactccttttgctattttcttccagatagtggaccaaaggcagtctgttgaggcatctggacaccacacacatcatcagtctgaatttttaaggggccctgagatagctttgcttcgtaagcgcctgcaacaactgaggcttaagaaggctgagcagcagaggcagcaagagctagctgcacatacccagcaacagccttccacttctgatcagtcttctcatgagggctcttcacaggaccctcatgcttcagattctccttcttctgtggttaacaaacagctcggatccatgtcacttgacgagcaacaggataacaataatgaaaagctgagccccaaaccagggacaggtgaaccagttttaagtttgcactacagcacagaaggaacaactacaagcacaataaaactgaactttacagatgaatggagcagtatagcatcaagttctagaggaattgggagccattgcaaatctgagggtcaggaggaatctttcgtcccacagagctcagtgcaaccaccagaaggagacagtganacaaaagctcctgaagaatctcagaggatgtgacaaatatcaggaagagttctgcagaaanccagttgagaccantcatatncccatccgntagtnacagccagccatggatccactcggngaagaatgnctca

SEQ ID NO: 154360 - DNA, 1881 bp, Homo sapiens; identical to SEQ ID NO: 152366

SEQ ID NO: 154361 - DNA, 741 bp, Homo sapiens
gcgcaactatggaggaggaaattatggaagtggaaattacaatgattttggaaattataaccagcaaccttctaactacggtccaatgaagagtggaaactttggtggtagcaggaacatggggggaccatatggtggaggaaactatggtccaggaggcagtggaggaagtgggggttatggtgggaggagccgatactgagcttcttcctatttgccatggatcttttagatgctgcttcttcaatgcaaggaaaggaaataaccccagcgaggtactcttcagggacacaggtctagtacaagagaactcttgacggctactaagttcagccagtcttaaaaaactgtgctgtttctacaaaactttaactacagtagtttataaggatgccaacgaaagctgagggtagagcaaaatagttctaagcttcagttaaacttctttagcattgatatgaaccatggacaagtatattctgctgccacaaagactgtaaagtgcttcatttcaacagctgaggcaagccaagtgatcattaataaagcttttcttggttccttcagtggtgttggtagtaaaatggaaggtgtcttgctgcaggtaactaatgaagaagtggtcaaccacagagtcttcaagaaataagaaattctgtaccatctgaaagtagttcttgttggtgccttcatttaaaaagcactctttaaaataaaagggaaatgttttctgataaacca

SEQ ID NO: 154362 - DNA, 423 bp, Homo sapiens
gatcatgatcacgccaagcttggcacgaggcttctaactacggtccaatgaagagtggaaactttggtggtattcaggaacatggggggaccatatggtggaggtaatttataaaaattgaggttattcacatttttgtgattaaaggattaaccttttgtgacttaaagggaagataacatactaagtactttgtactgtgggcagtgctccatgtacggacttattgaaaataaagaaattttgcataaatttccacagaagtactcagcacgcagttatgacatcaaattgggattacggatgctggaggtgagggtgtacacacctcctgccctcttcatatgggtccgggggattgttttcctccctatcccgacttttccaataaacagcagctttctgcttctccagcaagacacc

SEQ ID NO: 154363 - DNA, 611 bp, Homo sapiens
tcgggtcgacccacgcgtccgccgtgcggaggtgctcctcgcagagttgtttctcgagcagcggcagttctcactacagcgccagtacgagtccggttcgtgttcgtccgcgcagatctctctcatctcgctcgtctgcgggaaatcgggctgaagcgactgagtccgcgatggaggtaacgggtttgaaatcaatgagttattgaaaagggcatggcgaggccgttggcgcctcagtggaagtcgcccagccgcctccgtgggagagaggcagagaaatcggaccaattcagtagcagtggggcttaaggtttatgaacggggtcttgagcggaggcctgagcgtacaaacagcttccccaccctcagcctcccggcgccatttcccttcactgggggtgggggatggggagctttcacatggcggacgctgccccgctggggtgaaagtggggcgcggaggcgggaattcttattccctttctaaagcacgctgcttcgggggccacggcgtctcctcggcgagcgtttcggcgggcagcaggtcctcgtgagcgaggctgcggagcttcccctccccctctctcacgggaaccggatttggcggccgc

SEQ ID NO: 154364 - DNA, 1790 bp, Homo sapiens
gggaaggttctagaaaagcggcggcacggctctagcggcagtagcagcagcgccgggtcccgtgcggaggtgctcctcgcagagttgtttctcgagcagcggcagttctcactacagcgccaggacgagtccggttcgtgttcgtccgcggagatctctctcatctcgctcggctgcgggaaatcgggctgaagcgactgagtccgcgatggagaaaactttagaaactgttcctttggagaggaaaaagagagaaaaggaacagttccgtaagctctttattggtggcttaagctttgaaaccacagaagaaagtttgaggaactactacgaacaatggggaaagcttacagactgtgttggtaatgagggatcttgcaagccaaaagatcaagaggattttgttttgtaactttttccatccatgggcttgaggttgatgctgccattgcttccaagacctcatttcaattaatggggaagtagttgagcaaaaacgtgctgtagcaagagaggaatctggaaaaccaggggctcatgtaactgtgaagaagctgtttgttggcggaattaaagaagatactgaggaacatcaccttagagattactttgaggaatatggaaaaattgataccattgagataattactgataggcagtctggaaagaaaagaggctttggctttgttacttttgatgaccatgatcctgtggataaaatcgtattgcagaaataccataccatcaatggtcataatgcagaagtaagaaaggctttgtctagacaagaaatgcaggaagttcagagttctaggagtggaagaggaggcaactttggctttggggattcacgtggtggcggtggaaatttcggaccaggaccaggaagtaactttagaggaggatctgatggatatggcagtggacgtggatttggggatggctataatgggtatggaggaggacctggaggtggcaattttggaggtagccccggttatggaggaggaagaggaggatatggtggtggaggacctggatatggcaaccagggtgggggctacggaggtggttatgacaactatggaggaggaaattatggaagtggaaattacaatgattttggaaattataaccagcaaccttctaactacggtccaatgaagagtggaaactttggtggtagcaggaacatggggggaccatatggtggaggaaactatggtccaggaggcagtggaggaagtgggggttatggtgggaggagccgatactgagcttcttcctatttgccatgggcttcactgtataaataggagaggatgagagcccagaggtaacagaacagcttcaggttatcgaaataacaatgttaaggaaactcttatctcagtcatgcataaatatgcagtgatatggcagaagacaccagagcagatgcagagagccattttgtgaatggattggattatttaataacattaccttactgtggaggaaggattgtaaaaaaaaatgcctttgagacagtttcttagctttttaattgttgtttctttctagtggtctttgtaagagtgtagaagcattccttctttgataatgttaaatttgtaagtttcaggtgacatgtgaaaccttttttaagatttttctcaaagttttgaaaagctattagccaggatcatggtgtaataagacataacgtttttcctttaaaaaaatttaagtgcgtgtgtagagttaagaagctgttgtacatttatgatttaataaaataattctaaagg

SEQ ID NO: 154365 - DNA, 4522 bp, Homo sapiens
ttggatacaaaaagtatttattttataaactttatatttaaaatagaattgtaatctgtctactcacaaaacctaatttaaaacatgatacatttatctctctagccaatttgatgttaactgttttaacaaacaacactcattttgtaaattgttttaatatcaagaacctcaactaaatgtttgttttatcagaaaacatttccccttttattttaaagagtgctttttaaatgaaggcaccaacaagaactactttcagatggtacagaatttcttatttcttgaagactctgtggttgaccacttcttcattagttacctgcagcaagacaccttccattttactaccaacaccactggaaggaaccaagaaaagctttaattaatggatcacttggcctggcctcagccggttgaaattgaagcacttttacaggtctttggtggcagcaggactatacttgtccatgggttcataatcaatgccatggcaaatagaaagaagctcagtatcggctcctcccaccataaccatcacttcctcccgtgcctcgtggaccatagtttcctcctccatatggtccccccatgttcctgctaccaccaaagtttccactcttcattggaccgtagttagaaggttgctggttataatttccaaaatcattgtaatttccacttccataatttcctcctccatagttgtcataaccacctccgtagcccccaccctggttgccatatccaggtcctccaccaccatatcctcctcttcctcctccataaccggggctacctccaaaattgccacctccaggagtagcagcagcgccgggtcccgtgcggaggtgctcctcgcagagttgtttctcgagcagcggcagttctcactacagcgccaggacgagtccggttcgtgttcgtccgcggagatctctctcatctcgctcggctgcgggaaatcgggctgaagcgactgagtccgcgatggagagagaaaaagaaacagttccgtaagctctttattggtggcttaagctttgaaaccacagaagaaagtttgaggaactactacgaacaatggggaaagcttacagactgtgtggtaatgagggatcctgcaagcaaaagatcaagaggatttggttttgtaactttatcatccatggctgaggttgatgctgccatggctgcaagacctcattcaattgatgggagagtagttgagccaaaacgtgctgtagcaagagaggaatctggaaaaccaggggctcatgtaactgtgaagaagctgttagttggcggaattaaagaagatactgaggaacatcaccttagagattactttgaggaatatggaaaaattgatacccattgagataattactgataggcagtctggaaagaaaagaggctttggctttgttacttttgatgaccatgatcccgtggattaaattggatttgaggaaataccataccatcaatggtcataatgcagaagtaagaaaggctttgtctagacaagaaatgcaggaagttcagagttctaggagtggaagaggaggcaactttggctttggggattcacgtggtggcggtggaaatttcggaccaggaccaggaagtaactttagaggaggatctgatggatatggcagtggacgtggatttggggatggctataatgggtatggaggaggacctggaggtggcaattttggaggtagccccggttatggaggaggaagaggaggatatggtggtggaggacctggatatggcaaccagggtgggggctacggaggtggttatgacaactatggaggaggaaattatggaagtggaaattacaatgattttggaaattataaccagcaaggttctagcgtacggtccaatgaagagtggaaactttggttgttggcgggaacatggggggacccatatggtggaggaaactatggtcccaggaggcagtggaggaagtgggggtttatggtgggagaagcccgatactaaagcttcttcctatttgccatggggcttcactggtataaataggagagggctgggagccccggaggtaaccagaacagctttcaggtttatcgaaataaccaatgttaagggaaactcttatctccagtccatgcataaatatgcagtgatatggggccaggaagacaccagacgcacgatgcacgagacgccacttttgtggaatggattggattattttaataacattaccttactgtggatggaaggatttgtaaaaaaaaaaatgccctttgagacagttttcttagctttttaattgttgtttctttctagtggtcctttgtaagagttgtagaagcattccctcccttgataatgttcacatttgtaagtttcaggtcgacatgtgaaacctttttttaagatttttctcaaagttttgaaaagctattagccaggatcatggtgtaataagacataacgtttttcactttaaaaaaatttaagtgcgtgtgtagagttaagaagctgttgtacatttatgatttaataaaataaatcctaaaggaaattgtgtaattatagactttttattttaaataagttaaggagtgggtagtataattaaggtccgttgccaaagctgttgttatatttgtataaggtaaaatgctggtccagatgtaagtgtgttgactgcaattcatcatcgattaaattatgtagataacttaagggatatctctgcaaggagaaacacctttttagatcttttagatgctgcttcttcaatgcaaggaaaggaaataaccccagcgaggtactcttcaggggacacaggtctagtacaagagaactctttgacggctactaagtttcagccagtctttaaaaaaactgtggctgttttctaccaaaactttaactacagtagtttataaggatgccaacgaaagctgagggtgtagagcaaaatagttctaagcttcagttaaacttctttaggtaagatcttatttacttttcctttcttaattttcctccctaaaagataaactaatactcttaaatggtctttccagtatagtggttcttacgtagtttaacatagctataaattggagtttaacaatttataaactccaaggggaataatttttataaaccctggttttccaacctggtcatttacttaaattattttggttgtttttcccttttttttccttcttttcccaccccctccccctccatgtgaagatttgggtgcttaacatatcatttttttccctgccggaattttagcattgatatgaaccatggacaagtatattctgctgccacaaagactgtatagggcttcatttcaacagctgaggcaagccaagtgatcattaataaagcttttcttggttccttcagtggtgctggcagtaaaatggtaggtaaaagttaggctgcaagttcaataaatcatgagatttcccatcgttacacccttgtgtattcacatttcttggatcaaacattttgagtgaactaggggtttttattaaagacatttgttgtatttatggttgtaactgtacatgcttatcatgatgagactgaaagaaggtagggcaaaaatggttgaatctattttcagatagtagttcatacttgagtgaagtgtcttgtctgcattatgaagcctggtatgtatccagtactaaataggtgggttaaatgtggtaattctagttcagtgtcttaccctgaagagaaagttgtaggttggctgttgaaattcattccttagatatgatcagtttgattgcccggctttattgcctttacaggaatgtgatactcagggcttactctatacaccaatgagtcttctttgatcctaagaccaccactgaagttgtttaggttcttttggacaaacatgataaacttcttcagatactttttttttcctttggcaggaaggtgtcttgctgcaggtaactaatgaagaagtggtcaaccacagagtcttcaagaaataagaaattctgtaccatctgaaagtagttcttgttggtgccttcatttaaaaagcccctcttttaaaataaaagggaaatgttttctgataaaacaaacatttagttgaggttcttgatataaaacaattacaaaatgagtgttgtttgtaaaacagtaacatcaaattggctagagagataaatgtatcatgttttaaattaggttttgtgagtagacatgattacaattctattttaaatataaagtttataaaataaatactttttgtatccaaatacttggtgtaatgtttacacataaaatgtgtgaatcttgttctataaatatttggttgtctaaaagatcaccatcccctaaatttttaaaagcagtttcacaaagctatgcatattttaatattaacaggtaaatgagaagagcattgtggacattattggctgtccccaataaaatgctgttcattatgcactgtaaaaaa

SEQ ID NO: 154366 - DNA, 355 bp, Homo sapiens
gggcaatcatgagtgcagggagagttcacatgtgaggacctggtaggtgggtagtagtggatgaggtcacaatgtggttggaacttgaacagtatccagtttcattcctaaaacaaccttttgaaataggtaggcacctggacctgccaaaaggaacctatggtatttgtgtcaacatgtgcccaggaaacaaatcctgtctaggggaaagagatgccaaagcaatggctgtggtcatgtgtgcaaagttgttcctgaaacaagtaaaagccagcccctgagatgctcccaggggaaaatgacacattggtcttccttatgataaccacagggaagcaggaattgttttgactat

SEQ ID NO: 154367 - DNA, 713 bp, Homo sapiens
acttgtgcggaggagtgatagatgtgaacgaccatgccccagaagttaccatgtctgcatttaccagcccaatacctgagaatgcgcctgaaactgtggttgcacttttcagtgtttcagaccttgattcaggagaaaatgggaaaataagttgctccattcaggaggatctacccttcctcctgaaatcttctgtggggaacttttacaccctactaacagagacaccactagacagagaaagcagagccgagtacaacgtcactatcaccgtcactgacttagggacacccaggctgacaacacatctcaatatgaccgtgctggtgtcggacaacaacagccccgccctgcacatcggcagcgtcagcgctacagacagagactcaggcaccaacgcccaggtcacctactcgctgctgccgccccaggaccctcacctgcccctcacatccctggtctccatcaacgcggacaacggccacctgttcgccctcaggtctctggactacgaggccctgcaggggttccagttccgcgtgggcgcttcagaccacggctccccggcgctgagcagcgaggcgctggtgcgcgtggtggtgctggacgccaacgacgactcgccctttgtgctgtacccgctgcagaacggctccgcgccctgcaccgagctggtgccccgggcggccgagccgggctacctggtgaccaag

SEQ ID NO: 154368 - DNA, 522 bp, Homo sapiens
ctgctcaaggccacggagctcggtctgttcggcgtgtgggcgcacaatggggaggacaatggcgagcctccgcgctcggccaccgccacgctgcacgtgctcctggtggacggcttctcccagccctacctgcctctcccggaggcggccccggcccaggcccaggccgaggccgacttgctcaccgtctacctggtggtggcgttggcctcggtgtcttcgctcttcctcctctcggtgctcctgttcgtggcggtgcggctgtgcaggaggagcagggcggcctcggtgggtcgctgctcggtgcccgagggtccttttccagggcatctggtggacgtgaggggcgctgagaccctgtcccagagctaccagtatgaggtgtgtctgacgggaggccccgggaccagtgagttcaagttcttgaaaccagttatttcggatattcaggcacagggccctgggaggaagggtgaagaaaattccaccttccgaaatagctttggatttaatattcagtaa

SEQ ID NO: 154369 - DNA, 966 bp, Homo sapiens; identical to SEQ ID NO: 138061

SEQ ID NO: 154370 - DNA, 2783 bp, Homo sapiens
cggattctctcggtcgacgatttcgtggaattgaatgtctcaagtctcgttgcggttgctgaggggattggatatagggacctggactccaacatgaagaagctagggagaattcatccaaacaggcaagtgttggcctttattttgatggtgttcttgtctcaggttcgcctcgagcctattcgttattctgtgttggaggaaacagagagcggctcctttgtagcccatctggccaaggatctgggcctgggaattggggaactggcctcccggtcagcccgggtgctgtctgacgatgacaagcagcgtttgcagctggatcgtcagactggagatttgcttctgagggagaaactagaccgcgaagagctctgtggtcctattgaaccgtgtgtactgcatttgcaagtggtcctggaaatgccggtgcaattttttcaaggagaattattgatccaggacataaatgatcactctccaatattccctgaaagggaagtgctcttgaaaatactagaaaatagccagccgggtactctatttccgttgctaatagctgaggatttggatgtgggcagcaatggtcttcaaaaatacacaatcagccccaattctcattttcacattctcactcgaaatcatagtgagggcaagaaatacccagatttggtgcaggacaaaccactggatcgagaggagcagcctgagttcagcttaaccctcgtggcgctggatggtgggtcaccacctaggtctggcacggtcatggttcgaatcctgatcatggacatcaatgacaatgctcctgagtttgtgcacactccatatggggtgcaggtcctggaaaacagccccctagactctccaattgttagggtcttagctagagatatagatgctggaaacttcgggagtgtttcttatggcttattccaagcatcagatgaaattaaacaaactttctcaataaatgaagtcacgggagaaatactgttgaaaaaaaaattggatttcgaaaaaattaaatcttaccatgtagaaattgaggccacagatggaggaggcctttctggaaaaggcactgtagtcatagaggtggtggatgtgaatgacaatcccccagaacttatcatatcttcactcaccagctccatcccagaaaatgctcctgagacggtagtctctatcttccgaattcgagatagagattccggagaaaatggaaagatgatttgctctattccagataatctaccgtttattctaaaaccaactttgaagaatttttacaccctggtaacagagagaccactggaccgagagagccagcgctgagtacaacatcaccatcgccgtcactgacttggggacacccaggctgaaaacccagcagaacataaccgtgcaggtctccgacgtcaatgacaacgcccccgccttcacccaaacctcctacaccctgttcgtccgcgagaacaacagccccgccctgcacatcggcagtgtcagcgccacagacagagactcgggcaccaacgcccaggtcacctactcgctgctgccgccccaggacccgcacctgcccctcgcctccctgggtctccattaacacggacaacggccacctgtttcgctctccagttcgctggattacggaggccctgcaggcttttcgagtttccgcgttgggcgccacagaccgcggttctccggctttgagcagcgaggcgctggtgcgcgtgctggtgctggacaccaacgacaacttggcccttcgtgctgtacccgctgcagaacggctccgcgccctgcaccgagctgatgccccgggcgggccgccgagccgggctacctggtgaccaaggtggtggcggtggacggtgactcgggccagaacgcctggctgtcgtaccagctgctcaaggccacggagcccgggctattcggcgtgtgggcgcacaatggcgaggtgcgcaccgccaggctgctgagcgagcgcgacgcggccaagcacaggctggtggtgctggtcaaggacaatggcgagcctccgcgctcggccaccgccacgctgcacgtgctcctggtggacggcttctcccagccctacctgcctctcccggaggcggccccggcccaggcccaggccgaggccgacttgctcaccgtctacctggtggtggcgttggcctcggtgtcttcgctcttcctcctctcggtgctcctgttcgtggcggtgcggctgtgcaggaggagcagggcggcctcggtgggtcgctgctcggtgcccgagggtccttttccagggcatctggtggacagtaagcggcaccgggaccctgtcccagagctaccagtacgaggtgtgtctgacaggagactctgggactggtgagttcaagttcttgaaaccaattatccccaacttcctaccccagagcacagacttgtgcggaggagtgatagatgtgaacgaccatgccccagaagttaccatgtctgcatttaccagcccaatacctgagaatgcgcctgaaactgtggttgcacttttcagtgtttcagaccttgattcaggagaaaatgggaaaataagttgctccattcaggaggatctacccttcctcctgaaatcttctgtggggaacttttacaccctactaacagagacaccactagacagagaaagcagagccgagtacaacgtcactatcaccgtcactgacttagggacacccaggctgacaacacatctcaatatgaccgtgctggtgtcggac

SEQ ID NO: 154371 - DNA, 1059 bp, Homo sapiens
tcaatgcggtgtacgcccggtgttaaaacgtttttccagatactggctatagcgcgacatgctgaaacagaagatccagtagatcagcgcggcgaaaacatacccttccgtcgacatacccaaccaggcgggatcaacggttgcctgctgaacgctactgaaaagatcgaacaacccgataatgatcaccaggctggtatctttgaagagtgcgatgatggtatttaccagcccaggaattaccagcttcaacgcctgtggcagaataaccagcccctgagttttccagtaacccaacgccagcgactctgccgcttcatattgccctttaggcagcgcctgtaatccacctcgcacgacttccgcaacatatgctgactgaaacaggatcacgccaaccagcgcgcggatcaatttgtcgatactggtgccttctgccataaacaacggcagcatgaccgaagacataaacagaacggtaatcagcggcacgccgcgccagaattcgataaaaatgaccgataagatacgcacaatcggcatatgggagcggcgacctggcgtggtggtgttaactacctgtttgataatggtgtaacaccttacttcagctatagcgaatcgtttgaaccttcttcgcaagttgggaaggatggtaatattttcgcaccgtctaaaggtaagcagtatgaagtcggcgtgaaatatgtaccggaagatcgtccgattgtagttactggtgccgtgtataatctcactaaaaccaacaacctgatggcggaccctgagggttccttcttctcggttgaaggtggatttgcccccattacaagcccgctgccgcagatattcccgtggcgagcgataacccagcgcactatgcggatgccattcgttataatgctcgaacgcctctgcaaggttctttgctgccgttaacccgtctggtttgggcatgatactgatgtagtcacgctttatcgttttcacgaagctctctggtattccgttactctccggactccgcaccggcgtgttcttcggcttcagtcccaacat

SEQ ID NO: 154372 - DNA, 3075 bp, Homo sapiens
atgcagctgcctgatacgctatgccgatcaggcctacgcagtccttgcaatatattgaatttggacgattttgtaggcctggtaagtcgtttacgccgcatcaggcatagacaaagagcactttatcaacaaactacatttgtacccgtaacgctatgcttccggcggcagacagacgccaattccgccaattccacagtaaccatacgggtttttatgcagatattgctggtggtcatcttcggcataataaaacggtgtggcgttagcgatttccgtggtgatgtgacgatcgtcatcggcggcaagcatcgccgcctgaaaacgttccagactggcgcgagctgcggcatcctgttctgggctgtctttatgtattccgctccaacaaattccacatatagctcggtacctgcgtacaccaacatcacgcaaatgtggcggaataccgacatcacggttgagagcaaacaccgcttcaacagcggcattacgcgcctcttccaggcggcactggatgatgtttgtaccggtggcaacccgcgtgaagcaacgcttgaggatattgtagagctttaccataccgcctggcatttttccagtacagggagagcgccactacggtatagccttctcaaccagcgcgaactggactcattatcggtgccgccgctgctggcgaaaataggaattcatcagcaaaccacgctgttacgccacggtttttaccctgccggaggcggtgtggtggcaacggaagtctcgcccgtggcatcgtttaacaccttgcaacttggcgagcgcgggaacattgtgcagatgcgtggagaagttctattagctggtgtgccgcgccatgttgctgagcgtgaaatcgctacactggcggggagtttttccctgcatgaacagaatattcataacctgccgcgcgaccaggggccggcgcgtcagtgccgaggtggttgcggcacagttggtcgtccgaataaccaaattggcttttaccagtccattaccgccgacggcaactggggtgatgaaaagctaagccccggttacaccgtgaccaccggctggaaaaactttacccgcgtctttaccgacgaaggcattcagaaaccgttcctcgccattttcgtctggaccgtggtgttctcgctgatcactgtctttttaacggtggcggtcggcatggttctggcgtgtctggtgcagtgggaagcgttgcgcggcaaagcggtctatcgcgtcctgctgattctgccctacgcggtgccatcgttcatttcaatcttgattttcaaagggttgtttaaccagagcttcggtgaaatcaacatgtacggtacatgtgacacagtgcgcgtacctgggattcagctcacaggagagcagcagcagctggtcagcgtgtttgagcgttacggcctgccggaccggatgaccatggataacggctcaccgtggggcgacaccaccggcacctggacggcgctggagctgtggctgatgcgcctgggtatccggcgcacgctgaaccacatcgcgcgttgggttgccgcgacgcgagtaatcatgcgcgcgcggttcattaaatccggtaaagttataggtgctggaaagctgttcggtgcccagccccacggggaccaggtgcgtggaaccgcaggaagggcactggcgcggcaccggacgctgactgtcacagtggtggcagcgcagatcataaaaaaagccatcggtggtatgacgagcaaccggatcggggatatccgggatcgagttaccgacgcccttggcataggctttagccgggtcgagcagaatgaaatccccgaagaactgccgctgctgccgaaagagtctcgttactggttacgtgaaattttgttatgtgccgatggtgaaccgtggcttgccggtcgtaccgtcgttcctgtgtcaacgttaagcgggccggagctggcgttacaaaaattgggtaaaacgccgttaggacgctatctgttcacatcatcgacattaacccgggactttattgagataggccgtgatgccgggctgtgggggcgacgttcccgcctgcgattaagcggtaaaccgctgttgctaacagaactgttttaccggcgtcaccgttgtactaagaggaaaaaaatatgcgactgcatcagtgcaaacgtctgggcggtgttgaagactgttgaagcagccggtagtgaccgcccagtgcagtgcctcacgatcacagcagtccagcgcgaacgtgacacgcagtctctctccgttatcacagcagaactcgaacccgtcagcagcccgcacttcatccgtgaggcgggtcagtacggtactgggcgatcatcgaaagaacgagaagttcagcctgtggtgcagcgatctttctccaactggattcgaaataactgtggcgacatctgtgagctgtccccgactagtggcgaccaccccccaccctcagggccaggtctttactccgcgcgtaaagccatcatgcagcactaccaggctcgtggcatgcgtgatgttaccgtggaagatatttacatcggcaatggtgtatcggagcttatcgttcaggcaatgcaggcattgctgaacagcggggacgaaatgttggttcctgcaccagattacccactctggaccgcggcggtttcgctttccagcggtaaagcggtgcattatctttgcgatgaatcctctgactggttcccggacctcgatgatattcgcgctaaaattacgcctcgtacgcgtgggatcgttattatcaacccaaataacccaaccggcgcggtatattccaaagagcttttaatggagattgtggagattgcacgtcagcataatctcattatcttcgccgatgaaatttatgacaaaattctctacgacgacgctgagcatcactcaattgcgccgctggcacctgacctgctgaccattacctttaacggactgtcgaaaacgtaccgcgttgcaggcttccgtcaggggtggatggtgcaccgctttttcacgccacgactcaccgtgcaggcgatataa

SEQ ID NO: 154373 - DNA, 2588 bp, Homo sapiens
atgcctttataccaggatgcggataatatttcggcaccgtatgcaggtaagtgtcgccagattcagcgtctgacgcggatagtggtattcgctgccaggcttcagcgccaacgttttttcgcctccgccatcagctcttcacgcgtaccgaaaatcaccccgcgccgggcacacttctacgcagccaggtctggtgtccttggggttacgttcagggaaattgatatcctgacacttggtgacgcaagcctgcagcctacgcacaaggtcgagtcgtacaacatccccagcgatcccggattggcgggcggttttcagcagccgcatgacctgcaggcagtcagtcagtggtttaagaaccgtccgattcagtttgatcatgcagttagcctgatcgatatccgggatacccgatttctcatgataatggcgacgccgcgaccgatgtgccagtcaccattttgcggttcggtgacgaccattggatcatctcgcgaccctgacgcaggatctcttcagtgcacagctggcggcggatggaacggaggtggtgacctggaaatcgacgtatcgcacggatataacggcagcgacagcgccgttccgttacacggcatgatgatctccgaggaaggggggggggaaggggaagaaggcgaatcgagttctacttacaggggcacctctggatccgatcgacctgagccagtcggcagtgagtcacagtgtgaaggaactggaaatcatactggtgttcgcctgctggacagaaccacgcgtgaagtggtgcttcagatgcagggcagcagctggctttgcgtcttgagcgactgctggatgactgaacagcacgttgcgcgataccgggcgtatggggcaacaactgagcggaaaaagttcgggtcgctgccagccagaccatttccgcgcatcttattccgcaatgcattgctgaaagccatcgccgctatccagatattcagtttgtcctgcacgatcgtccgcagcagtgggtaatggaaagtattcgccagggagatgtcgattttggcatcgtcatcgatccaggcccagtgggcgatctgcaatgtgaagcgattctttccgagcctttctttctgctttgccatcgcgatagcgctttggccgtggaagattatgtaccctggcaggcattacagggagcgaaattggtgttgcaggattacgcgtcaggcagccgaccgctgattgacgcagcgctggcgcgcaatggtattcaggcgaatattgtgcaggagattggacatccggcgacgctgttcccgatggtagccgcaggcatcggcatcagtattcttcccgcactggcgctaccattgcctgaaggtagcccactggtggtaaagcgcattacgccggttgttgaacgccagttgatgctggtgcgcaggaagaaccgttcactttccaccgccgctgaagctttatgggacgtgtgcaactgcgccattcagcccttctttaccgccattacccgctgcataggtagcgtcacggtcaaactcgtactcgttccagttggtaagagtgaatttctcgctgcccagcataaagttgtaacctgcaacccagccggcgacatagccgttgtcgccagtgtaataggtttgatctgtataacgcttagcaaagaacggtttgaaccaccaaccgctgccggtgaaattgtagccgataccgtacaggaacatatcgtcgtggaaattcacgcgattcgcagaaccgtaggtgccatacgcatgcaagtagagattaaatccggtgtcacccaggcttatttgcagctgggtatcaatgaaaagttaggactctctggaaggccagacaggcccattggctgcctcgggacatcaaagatttatcgcattctaggaaagactgtggtttgttacccgattattttcgacctaagtgatttctacatgtctcaggatgttttcctgctgatagatgacataaagaatgcgctgcagttcattaaacaatattggaaaatgcatggacgtccacttttccttgttctcatccgggaagacaatataagaggtagccggttcaaccccatattagatatgctggcagcccttaaaaaaggaataattggaggagtcaaagttcatgtggatcgtctacagggcccactggaaaatgacttggtagttcatgtggcacttatagcagaaagccaaagacttcaagtttttctgaacacatatggtattcaaactcaaactcctcaacaagtagaacccattcagatatggcctcagcaggagcttgtgaaagtaactctgggtgcctttgggcatgaagaagaagttatctctaatcctttgtctccaagagtgattcaaaacatcatctattataagtgtaacacccatgatgagagggaagcggtcattcagcaagaactggtcatccatattggctggatcatctccaataaccctgagttattcagtggcatgctgaaaatacgaatcgggttgcagaatgaatgctctctggtcatacaggtctcaaccatcatccctgccacatag

SEQ ID NO: 154374 - DNA, 2890 bp, Homo sapiens
gaggatacgaaaaagtttcataaagactccagatgatcgatggttctattgtgcttcttccagtttgagaaataaaattgatttattgcatccattcatgaagaaaacagatgaattattctttaaaacaattaaaggttttcgtcacagtagcgcaggagaaaagttttagtcgtgcaggagagcgtatcggcctgagccagtcggcagtgcagtcacagtgtgaaggaactggaaaatcatactggtgttcgcctgctggacagaaccacgcgtgcagtggtgcttacagatgcagggcagccgctggctttgcgtcttgagcgactgctggatgaactgaacagcacgttgcgcgacaccgggcgtatggggcaacaactgagcggaaaagttcgggtcgctgccagccagaccatttccgcgcatcttattccgcaatgcattgctgaaagccatcgccgctatccaaatattcagtttgtcctgcacgatcgtccgcagcagtgggtaatggaaagtattcgccagggagatgtcgattttggcatcgtcatcgatccaggcccagtgggcgatctgcaatgtgaagcgattctttccgagcctttctttctgctttgccatcgcgatagcgctttggccgtggaagattatgtaccctggcaggcattacagggagcgaaattggtgttgcaggattacgcgtcaggcagccgaccgctgattgacgcagcgctggcgcgcaatggtattcaggcgaatattgtgcaggagattggacatccggcgacgctgttcccgatggtagccgcaggcatcggcatcagtattcttcccgcactggcgctaccattgcctgaaggtagcccactggtggtaaagcgcattacgccggttgttgaacgccagttgatgctgcgggtagacctgagatttgcccaaaagtttcagattggcgaccggaagatcctgcgttctggcaacaacgcggtcaacgtattgccagccgcaacctgtggatttccgttccctgtctgctgctggcgttttgcgtatggatgttgttcagcgctgttgcggatacctccacgcctctatagcgtcttcatcatcatctctctgctatacggcttttctcgcgcgcacatctcaagcccgggtgcctgttgggtcttcatccacgaacgatttggtcagtttatgtatgggctttacccacacgaccaacgctggcgaattaacctcgcattactgattgggcttgtgtcgatcgcaccaatgttctggaaaatactcccgcatcgcggtcgctatattgcggcctgggcggtgatttacccactgattgtctggtggctgatgtatggcggtttttttgctcttgagcgggttgaaacccggcaatggggcgggctgacgctaactttaattattgcatcagttgggattgcgggggcgctaccgtgggggatcttactggcgttaggtcgccgctcccatatgccgattgtgcgtatcttatcggtcatttttatcgaattctggcgcggcgtgccgctgattaccgttctgtttatgtcttcggtcatgctgccgttgtttatggcagaaggcaccagtatcgacaaattgatccgcgcgctggttggcgtgatcctgtttcagtcagcatatgttgcggaagtcgtgcgaggtggattacaggcgctgcctaaagggcaatatgaagcggcagagtcgctggcgttgggttactggaaaactcaggggctggttattctgccacaggcgttgaagctggaaacggtcagacagccacaaacgctggcgatggaagagatcaactgtcaccacaactatgtgcaaaaagaacagcactttggtgaagagatctacgtgacgcgtaaaggcgcggtgtctgcgcgtgctggtcaatatggaattattcccggttcgatgggagcaaaaagctttatcgtccgtgggctgggaaatgaagagtcgttctgttcgtgcagccacggtgccgggcgggtaatgagccgaactaaagcgaaaaaactgttcagcgtggaagatcaaattcgtgccaccgcgcatgtggaatgccgtaaagatgccgaagtgatcgacgaaatcccgatggcgtataaagatattgatgcggtgatggcggcacaaagcgatctggtggaagttatctataccctgcgtcaggtgcattcgtgccgggcgggcgaaaccggggctgttgcgccagcatctgaccgcggtaaaggcggcgacggaaatttgcggagcaaccgtggaaggcgcggagctggggtcgcagcgtctgctcttccggcccggcaccgtgcgcgggggcgattaccgctttgctatcggtagcgccggaagttgtacgctggtgctgcaaacggtgctgcccgcgctgtggtttgccgatggaccttcgcgtgttgaagtgagcggcggcaccgataacccgtcggcgccgcctgcggattttatccgccgggtgctggagccgctgctggcgaaaataggaattcatcagcaaaccacgctgttacgccacggtttttatcctggccgaagcggtgtggtggcaacggaagtctcgcccgtggcatcgtttaacaccttgcaacttggcgagcgcgggaacattgtgcagatgcgtggagaagttctattagctggtgtgccgcgccatgttgctgagcgtgaaatcgctacactggcggggagtttttccctgcatgaacagaatattcataccctgccgcgcggtttttcccgtttaatacccgcgtgccagtgggaagagcgtgaagaacaggcggtaaaccaattaggcaacttaattcaagaacggctgtaa

SEQ ID NO: 154375 - DNA, 345 bp, Homo sapiens
cttgagggacagagattttcatcgcatagtccaaatttcttctttcatagagttgcatgctgagaatttgaaaaatgaagatgatgtagacactggactattaggattctggactctacttataatatccctaactgctggattctcctgttgcagcttttcttggacagtgacttactttgattcttttgaaccaggaatgtttcctcctactcctctttcacctgccaggttcaagaaactgactggacattctttccacatgggctatagcatggcgattttgaatggcatcgtagctgctcttactgtagcatggtgcctcatgtaaacccacactggagc

SEQ ID NO: 154376 - DNA, 378 bp, Homo sapiens
tctgctcgctgctcttcgccattcttctcgccttcctcctcgccatcgcctacttgatcgttaaagcgtttagtgggctacagatggcatggcatctaaaaccttacaatgcttgattttcatacagaagacactttggccagttgatgtgggttttacctcttcataaaatgagttgcatgctgagaatttgaaaaatgaagatgatgtagacactggactattaggattctggactctacttataatatccctaactgctggattctcctgttgcagcttttcttggacagtgacttactttgattcttttgaaccaggaatgtttcctcctactcctctttcacctgccaggttcaagaaactgactggacattc

SEQ ID NO: 154377 - DNA, 442 bp, Homo sapiens
tctgctcgctgctcttcgccattcttctcgccttcctcctcgccatcgcctacttgatcgttaaagagttgcatgctgagaatttgaaaaatgaagatgatgtagacactggactattaggaattatctgtattagcaggaaattttcccttatgctgtaagttgcaaaggattctggactctacttataatatccctaactgctggattctcctgttgcagctttttcttggacagtgacttactttgattcttttgaaccaggaatgtttcctcctactcctctttcacctgccaggttcaagaaactgactggacattctttccacatgggctatagcatggcgattttgaatggcatcgtagctgctcttactgtagcatggtgcctcatgtaaacccacactggagcgatattgttggcaaaacttaatcatgattg

SEQ ID NO: 154378 - DNA, 1270 bp, Homo sapiens
ttcggcctccgctcgcttctccctgcgcgctttcctgctcccctttccggctacagccctggggtcgagctctggtcgaagcgcattccgcctctcctttggccctgcggcttcctttgcaacccgccgcccacccttgctctccgtggtttacccctgggctctgaggcctggtggtagcggccactgccgcggattggctgttgcggacccggggcggggcaggtgggagaggctcgttctccgcgggtttcgttgtgtttcgcgccatgtcgtttgctgagagcgggtggcggtcgggctctgcggcgccgcggtcccggcaccccgggccctgtggctcggccatcgtattcctcctttactcagggggacagctggggtgaaggcgaagtcgacgaggaggagggatgcgaccaagtggcccgcgaccatgcgggcggagttcatcggcatggggcagtggtcagagcccagaaagctctcggtgctcccgccggaccggaacgggtcacccgttctgcccgataagcagcaatggtatctttcccagcggccgcgggcagcaagaacccagccttcggcgttggccgttccaggtcctctctattctctgctcgctgctcttcgccattcttctcgccttcctcctcgccatcgcctacttgatcgttaaagagttgcatgctgagaatttgaaaaatgaagatgatgtagacactggactattaggattctggactctacttataatatccctaactgctgggattctcctgttgcagcttttcttgggacagtgacttactttgattcttttgaaccagggaatgtttcctcctactcctccattcacctgccagggttcaaggaaactggactggggacattcttgtccacatgggggctattaggcatgggcgatttttgaatgggcatcgtaggcttgctctttacttgtaggcatggggtgccctcatggttaaaccccacacttgggagcgatattgttgggcaaaacttaatcatgattgttttgtaataacaaggaagggagcatcactggtctactcagaagactgaggaaacctgctgtccattatgtagctcagatattcatcacaatcatcctcattatgcgagaccttttaaagcattggtttaagaatggctgagtattaagatacagattaattgggaatatctgagtattaagtactttcttcagagtataagatgtttacctcatctttttacttttgggtgagag

SEQ ID NO: 154379 - DNA, 386 bp, Homo sapiens
aagcagatgaagcttcgagtgatgaattcccaggagcagtgcctcccttcaggagccgaggacatcatgtctggtggccccactttggaggctgctgaatttgatgacttgattgggaagtgtctgccagatcgccccattgcagagtgaggatggacagttcccgcgtttggaaacacatttcctggatgaacttaagagctgtggccactagttcgttctaaaaatcattattgggcaccagcatgtgtggataaataaagcctcccacctgccccacatcaccaaggatgagaagatccagtaaactggggagagtgaattggtttgaaaacacatttgatttcaggaataaaaggtgcaaatgagtaaaaaaaaaaaaaaaa

SEQ ID NO: 154380 - DNA, 1899 bp, Homo sapiens
atgccctttgccccccatctgctctctgctcttgaatgggctgctggtgaagagacactgctgttcggccatcatgataaagggcctgaagctcgaagcacaggggcagatggcctgtcggagccagagggcatctctctgaagcgggtcgctgtggtggaagatttctttgacatcatctactcgatgcatgtggagagctcagcggagccaggcaaagcccccaagcacgctgggcagaagaaaacctaccgagcgatcgcagagacctatgccttcctcccgagagaggccgtgacccggttcctgatgagctgtacggagtgtcagaagaggatgcactttaactccaatggcctggaacccaaaggtggctttggcacattgagacggcccagcacatttggctggtacaattataatgctgccctgagaaatggtcgccagcccgtgtcgtggcctacggtgcccagacacaaggctgccaacgtccaggtggcccaacagagacacaaggtctgcctctacccaggccaatgggagatgctgggaggattcacggggggctctgtagccaggctcactcatgaagcaaaggccaaagtggccccagctgactcctctgctagctcaggaactcaagtccagggccaggggctccacagtgagccagtggctcatactgtgtgccagcctcggggcctttccatttgctacgctgggttccagtctgttgctcaaccactcggtggccctggagatgacacatcttttggggcgccctcagtttctccgtatgtaaaagggtacttccggctggaaaaggagatatgtgttcctgagatcatgttcctggaggaggatggagagcagaaagcccttccagcttcatcacccctggggtcatacctcagccctgtcctgtgcctgccatgtgagccttcctccagccagcatccctctggggctgttttccttgtctggcaaatggagctgacactacctgcccctgtggagccctcagctggctgggagagcccccgagagagagcgcagacgtggggattttcattcattcatttattcagtaaacacatatgggacacctactacgtgtcaggtattgttctggatgttggagatactgcagtgaacaggacagagctctgccctctaggaatgtacattccagtaggcctggaacttcctgtggcacagtcagggccacctcactgtcaagttgcaggcatccccgctcatctgggcccagggtcagagctcagtgaaaggcaggtgatctgggccaaatcaggcaaaggccaggtgtctggaatggaaatcaaaaaagagcagctgccccctgggaccgtgattgcatccccccaggagttgggcattgtgggagacttaccccacaccccacccagcatgcccctcctaaaggaccccagtgacacggataggctgaagacccagggtctgtttctgcaaaagtcaggccacctctccaagctccaggtcttcgtctgtaaaatggagccattccggaaaagaagagctgccaccagccccaaaggaaaacccagtgttcttgccccagaagaaaacgagcctccatctccactggtctctgggattattgattacaacatgcccctcacctccacctacctgaagcagatgaagcttcgagtgatgaattcccaggagcagagcactgcaggggaggtgtacagggagctaacgattgaaaaagcggatgattcccacgaacgttccagcatcttctggacgctctgcgtgtgttgcttacagaacctcacagccgctcatgggttgataccgctctcagccccatttacaggggagaaaactgagcccctcacagagctgtcctga

SEQ ID NO: 154381 - DNA, 275 bp, Homo sapiens
aaaacgagcctccatctccactggtctctgggattattgattacaacatgcccctcacctccacctacctgaagcagatgaagcttcgagtgatgaattcccaggagcagagcactgcaggggaggtgtacagggagctaacgattgaaaaagcggatgattcccacgaacgttccagcatcttctggacgctctgcgtgtgttgcttacagaacctcacagccgctcatgggttgataccgctctcagccccatttacaggggagaaaactgag

SEQ ID NO: 154382 - DNA, 395 bp, Homo sapiens
gctgtcaccggcgcccgccccgctcactcgcggatcccgaccgcccatctccgcctcgcttgcagcccaggatgagacttctgtgagcagcgaggattttgatatgagcgactccacatggatgtcagctgacccgcacctggcctccagcctgagccccagccaggacgagaggatgcggagcccgcagaacctccacagtcaagaggacgatgactcctcctctgagagtggcagcggcaatggctcctccaccctgaacccatccacgtcgagcagcacgcagggcgaccctgccttccccgagatgaatggcaacggcgccgtggcccccatggacttcaccacggccgccgaggatcagcccatcaacctgtgtgacaagctcccgccgg

SEQ ID NO: 154383 - DNA, 536 bp, Homo sapiens
tcccgaccgcccatctccgcctcgcttccagcccaggatgagacttctgtgagcagcgaggattttgatatgagcgactccacatggatgtcagctgacccgcacctggcctccagcctgagccccagccaggacgagaggatgcggagcccgcagaacctccacagtcaagaggacggtggtgtctgtctccagggccccaccgcttgagccacctgtcccaaggcctgaacatcatctgcagcttggacacctctctacgggccaggaaccccagggtctctgcagagagaaatgatttcagttttaggggaagatctaggtgtgtgacgtctaattcattagccaaggacggctactgagccttggaaaaggctagtgcagacaggtgtgcaatacacgctgcgtctcagcggctccgtaggaaagaagaaggtgaaatatctcagctctgataacacggtatcaattatttgttgaaatggtactattttggatatattgggttaaataaagtagattattaaaattgaaaa

SEQ ID NO: 154384 - DNA, 3317 bp, Homo sapiens
cagcagaggcactcaccgcggagggtctgtgaggactacgggagatcaggcttggcacggcgcctggcacatagcgggcgctccctgaaggagagctggcaagatcgaatggtaccgccctgcacaaaggacagggggcagatggcctgtcggagccagagggcatctctctgaagcgggtcgctgtggtggaagatttctttgacatcatctactcgatgcatgtggagagctcagcggagccaggcaaagcccccaagcacgctgggcagaagaaaacctaccgagcgatcgcagagacctatgccttcctcccgagagaggccgtgacccggttcctgatgagctgtacggagtgtcagaagaggatgcactttaactccaatggcctggaacccaaaggtggctttggcacattgagacggcccagcacatttggctggtacaattataatgctgccctgagaaatggtgcccaggtgggcgatttatcagggtttccaggactgcctggtgcatcatgccagctcccgggcatcgggcctgtggaagttgctgaacccgtgtcgtggcctacggtgcccagacacaaggctgccaacgtccaggtggcccaacagagacacaaggtctgcctctacccagctgctgggaaagcagagcctgccaccagccccagaggcagacccagtgttcctgccccaggaagaaaacgagcctccatctccactggtctctgggattattgattacaacatgcccctcacctccacctacctgaagcagatgaagcttcgagtgatgaattcccaggagcaggcgggtagctccccgacccctattcagactgagaggcacacagcacagctgctgctcacggccgaccagacccttgtcctccctgcaacacagcattatgtagttttaaagaaatttcctaggccaggagccgaggacatcatgtctggtggccccactttggaggctgctgaatttgatgacttgattgggaagtgtctgccagatcgccccattgcagggtctgtccgcctgggggaccgcatctggaatccgcgtggctcccctccccggcggtgccgtctccacggacagtgcgtgcccgggtctgggctggagcgacgtccccgagattatcctattactttacaactgtggctcgcgcgccgtcaggacccggcccggtgtgggctggcggagcacaatgaccggcggcggggcgggggcgggcacgcgggcggcgggcgctgggggtcgcgtagatgtttgggtcgaacagtgacgcgccgcggtggtgccagcccctctccccgggcagccgcggcggcagcagcagcagcagcagctggagctgtggggctgtcaccgccgcccgccccgctcactcgcggatcccgaccgcccatctccgcctcgcttccagcccaggatgagacttctgtgagcagcgaggattttgatatgagcgactccacatggatgtcagctgacccgcacctggcctccagcctgagccccagccaggacgagaggatgcggagcccgcagaacctccacagtcaagaggacgggtgggcagtcgggggattgctgagcaagagtcgtgtggagccctggctggggcaggtgatgcccaccctcccctgggcccatccctgggtcacagcagccctctcccaccaggaggcacagaactccggcctgctgctgcctccccctggacccaacactcatggccagacgtctgctctggagcagagagctggggcccaagccttccagggattggctgtgggccacactggcagtcccgggtcacaggaaagtgtccatcatcagctgggccgcaggcggcacagacaatgctgggctgtgctgggccccggcccgccaagggagtctcatggaggcggcactgcctccagcagccacacctctggacacggaaggcagtctgcacgcagggcctgctggcctccagtggccgtgtacctggcctatggtcccagggatgagccgtggcccacagccggtgccacgatggagatcggggcagatgactcctcctctgagagtggcagcggcaatggctcctccaccctgaacccatccacgtcgagcagcacgcagggcgaccctgccttccccgagatgaatggcaacggcgccgtggcccccatggacttcaccacggccgccgaggatcagcccatcaacctgtgtgacaagctcccgccggccacggcacttggcacagcctcctacccctcggatggctgcggtgccgacgggctgcggagccgcgtcaaatacggggtgaagaccacccccgagtcccccccctacagctctgggagctacgattccatcaagaccgaggtcagcggctgccctgaggacctgacagtgggccgggccccgacggcagatgatgacgacgatgaccacgatgaccatgaggacaatgacaagatgaacgactctgaaggcatggaccctgagcgtcttaaggccttcaacgtgagcaccggccggaaacagatgtttgtgcgtctctttgtggacgagaacctggaccgcatggtgcccatctccaagcagcccaaggagaagatccaggccatcatcgagtcctgcagccggcagttccctgagttccaggagcgggcccgcaagcgcatccgcacgtacctcaagtcctgccgtcgcatgaagaagaacggcatggagatgaccagacccacgccaccccatctgacctcggccatggcagaaaacatcctggcagctgcctgtgagagcgagacaagaaaggcagccaagcggatgcgtctagagatctaccagtcctcacaggatgagcccatagccctggacaagcagcactcgcgggactccgcagccatcacccactccacctactcactgccagcctcctcctactcccaggaccctgtgtacgccaacggcggcctcaactacagttaccgcgggtacggggccttgagcagcaacctgcagccccctgcctccctccaaacaggaaaccacagtaatgggcccacggacctcaagcatgaaaggcggggcctttaccacctccaccacccccacgcccaccccttccagcaccagcaccagcaggcccgtgcccaccgctcagctcagccccacggagatcagcgccgtgcggcagctcatcgcgggctaccgggagtctgctgccttcctgctgcgctctgcagatgaactggaaaacctcatcctacagcagaacagaccccgccggcacctgtaat

SEQ ID NO: 154385 - DNA, 1547 bp, Homo sapiens
gcccctctgagaaacacatgcccctccaagtggggtctggggcctggagagaccctcccacccagcagaccaggagatagctgggggacaagggcagacggcccctgcctgggaaaaaccacactcacaccccaccccgaagagctgtggagaccaaaccaagactacgctacacacagaacgccgagaagataaaccaagctttacacgagcaggatggggatgggaaaacttaaaggggccccctgtgaccgaaggagcagggtccccagggggcagctcccacggagcgggcttgaacagggaccaccccctgcagagccagccagggcggagagccataccctggccccagcgcgccccgacacacatgcttttctccatgacacgaggccagtccccaggagcagccccaggagcacaacctgagatttctaagcttgcaggttacaaaaaacaaaaaaaacagagaagctgcctgcgtaaaaagtgccacccacggaggcaggacacaggcagcgtgtggcccattcagcaggcccaggtcttcagggtgaggctgctggcgagggcaggggagagggggcattctggttaaaagcaagaaattccaaatactcctccctcgggatcaacatccccccaaataagggcgcccagggatcttgcctggggaaagtggggtgcagaaggcatgacccacgccacagcgggctctcagcacccttcccacgtcccatgtcacaggctctttgagctgctggctttgttctctcaagtcaggtctgagggaacccatcggcttctgtaataatcgtattgcctatatacttgaattaaaaatatatggtggctcaaatgtgcccgcgtgtatggcagacggtgcggggtggaggccgtcacgcccatacacgtgtgcacacacagcggggggctgtgtccacggactgcgcacacagtatatattaacatatatattgctcaagtatatatgctatttacagtatatatctctatcaacataaaacacaggtatttataggtgtgtacaatagatacgtcctaggaagtctaggggacacacgactctggggtcacggggccgacacacttgcacggcgggaaggaaaggcagagaagtgacaccgtcagggagaaatgacagaaaggaaaatcaaggccttgcaaggtcagaaaggggactcagggcttccaccacagccctgccccacttggccacctcccttttgggaccagcaatgtacgagttttgttctggagttttgtgcaaaacaaattaacttaaaaaaaaaaaagttggtttctaattaatgtggtgggccttcaacacccacaaggattttaaagaacagcttctccttctggtgggcttccagggctcagagggtcccactcagagaagcagggaacactttgtcaggactagaaaatatccttctcctctgaccacagaaaccagcacaactcggctgggtgtgtggctcacgcctgtaatccggcatttgggagccgagcctcgttccgaa

SEQ ID NO: 154386 - DNA, 1213 bp, Homo sapiens
  misc_feature (1)...(1213): n = a,t,c or g
atgaggaaagagcagaagatggaaggggacacctatgagattatgcagggtggggggagggagcgcacgacgtgcgcgcaccctctcccctcgtccaccgctgccgcctccttcttctgccgctcctggtgctgcttgtgtgctcgtttggtgcggacctgcgtacctcttrttgtgaagcggcagctgaggagactccggcgctcgccatggcccgacgaaaagcccaaggaaggagtcaagactgagaacaacgatcatattaatttgaaggtggcggggcagygatggttctgtggagcagtttaagattaagaggcatacaccacttagtaaactaatgaaagcctattgtgaaccgacagggattgtcaatgaagcagatcaagattcccgattttgacgggcaacccaatcaatgaaacggacacacctgccacagttgggaaatggaaggatgaaagataccaattgatggtgttccaacaagcaagaccgggaggtgtctacctgaaaagggaactttgcttcctttactcccagaactctgtttctttttaaaggacccaagattacatttcttcaattaggaaaacttgcaatttgggttccacccacatcatgactattactatagtatagtttttttctaatcctttcatttccccctttccccattccctttattgtaccataaagtaactgggtatatgtggcaccaagccatattgcattttttttttttttttttaactaaacagcccaatggtatgtttggattgaccatccaagtgggagacggggatgggggaaaaatactgattctgtggaaaatacccccctttctcccattagtggcatgctccattcagcccttaaacctttatattccgagtaagttattttgctctcactgttttaacaaaaacaacaacaacaacaacataaaaatccttgcataccttgttcaattggagaattttaatgtttttcatttatcattgtaaaaccaaggacgaattttataacttttttggtacggtagctgttaccnatgtagggcaatctcgtctttaagtagggattaaattactcnctaaaacaaaaaagaatcctagatagttttcccttcaagtcaaagcgtcttgttgtttaaataaacttcttgtttaaaatgaaaaaaaaaaaaaaaaaaaaaaaagggcggccgctc

SEQ ID NO: 154387 - DNA, 493 bp, Homo sapiens
cggacgcgtgggggaagtttgtgctctctgcgtggctaagtttttcacctactaggacgggggtggggtggggagaacaggtgtccttctaaaatacagcacaagctacagcctgcgtccagccataacccaggagtaacatcagaaacaggtgagaatgaccactttaactcaccgggcccgtcgcactgaaataagcaagaactctgaaaagaagatggaaagtgaggaagacagtaattgggagaaaagtccagacaatgaagattctggagactctaaggatatccgccttactcttatggaagaagtattgcttctgggactaaaagataaagaggtaatgcagttaggtttgctaggctatctcaaagactattaaatattggaatgttttaggaagtaacctaatggaatatatttaataataaattggtcttagaattgtgctctaaccatctggaagatggaggagttgggagagcacccacag

SEQ ID NO: 154388 - DNA, 479 bp, Homo sapiens
ccgatagtgcggtggaattccacactcctccttagcgaggggtctccccgccgcggtggctgcccggccccaaggtcaggagggatttgtgcactgactcctgaccccgtcctccagcgctgctctgaagggagagtctgtgcagtggcacctgcgcgaagctggccaaagcctgcccagacggctcacctgtgcgggatggaacaaaaggttccttcattggattgaccagctgtcaggttgaacgcaaacctgcctccttttggtggtgtttgtctggatcgcaacagaatagctgggggagagcctccccctgtgagctccgattggcgggactcaaccttggtgatttctgattggcgcaatgaagaaacaccaagaaacaggtgagaatgaccactttaactcaccgggcccgtcgcactgaaataagcaagaactctgaaaagaagatggaaagtgagtaagacagtaattgg

SEQ ID NO: 154389 - DNA, 1926 bp, Homo sapiens
  misc_feature (1)...(1926): n = a,t,c or g
cggggaccattgaccctcgtccgtgtggtggaattccgaaggatcaggaagtttgtgctctctgcgtggctaagtttttcacctacataggacgggggtggggtggggagaacaggtgtccttctaaaatacagcacaagctacagcctgcgtccagccataacccaggagtaacatcagaaacaggtgatgaatgaccactttaactcaccgggcccgtcgcactgaaataagcaagaactctgaaaagaagatggaaagtgaggaagacagtaattgggagaaaagtccagacaatgaagattctggagactctaaggatatccgccttactcttatgggaagaagtattgcttctgggactaaaagataaagaggggtacacatctttctggaatgactgcatatcatcaggcctgcgagggggcatcctgatagagctggccatgcggggtcgaatctatctggaaccccggaccatgcgtaagaagcgactactagacagaagggtactgctaaagtcagacagcccaacagggtgatgtttactgggatgaaactctgaaacacatcaaagcaactgaacccacagaaactgtccaaacatggatagagctactcactggtgagacctggaaccccttcaaattacagtaccagctgagaaatgtacgagagcgcatcgcaaagaacctagtagagaaaggtattctaaccactgagaagcagaatttcctgctatttgacatgactactcatccagtgaccaatacaacagagaaacagcgactagtgaaaaaacttcaagatagtgtactagagcggtgggtaaatgaccctcagcgtatggacaagcgaacactagcactcctggtgctagcccactcctctgatgtgctagagaatgtcttctcctctctgacagatgacaagtatgatgtggcaatgaatcgagccaaggacttagtagaactggaccctgaagtggaagggacaaagcctagtgccacagaaatgatctgggctgtgctggcagccttcaataaatcttaaagccggcaggtggatttctccttttcccctgctggctggtgactgtcagagaccccatcactgagttttgtgtgatgagatgttttcatcatttttgtttccttttcttgaatcagacttgtgatttggggagagcaacttcagggcttctccatagaccttgaccattataagcagaccttatttctccctacacttccactccataggtaaataaactgggtgaaccccacacacacccaatgaacattttctcccatttggtggtttagtttcaccacagtgtgcttttggataagcagaaatatctaaatgggattttgagttctccagctatagaatgtgaatgagataaaaagtgaactatctattatatttttctgagtttgttttctatcataaatacatgttttcacagcctttgtctctcagactctgctaaataatgtagcttattgaaataactgtcgctgaataaggagcaatgagaaacaaaactaatttttggagcagatggtctctggaattgcatatcctgctagtgattttctcatctttccttttctaacctaatgagaatgtcccagattcaattacctggatgtcaaagtcctagagccagaaatatattctctcatccctcttagcattctcttgctccttcattcactagggcaaatgtctaaatgaagaaaagtctctctcaacacctcgttcatgcaatcagcattagaatttgtaaggaaggaaggggggtggcatgaaaatttccattcttggggtatatgactgtcctgtttcccccaggccacnnnnnnnnnnnnnncttttggaaacagggtcttgcttttgcccagccaggattccagaatg

SEQ ID NO: 154390 - DNA, 1737 bp, Homo sapiens
atggagcccataggggcgcggctaagtttggaggcgccgggaccagcgcccttccgagaggccccgccggccgaggagctgcccgccccggtggtcccctgtgtgcagggtggcggcgacggcggtggcgcttcggagaccccgagtcctgacgctcagctaggggataggcccctgtccccgaaggaagaggccgccccccaggagcaggaggagctgctggaatgccgccgccgctgccgcgcgcgctccttttccttgcccgccgaccccatcttgcaggcggccaagttcctgcagcagcagcagcaacaggcggtggcactgggcggcgagggggcggaggacgcacagctcggcccgggcggctgctgcgccaagtgcaagaagcgggtgcagttcgcggacacgctggggctaagcctggccagcgtgaagcacttcagcgaggcggaggagccgcaggtgccgcccgccgtgctctcgcgcctgcgaagcttccctatgcgtgccgaggacctggagcagctcggggggctgctggccgcggcggcagtggccgcgcccctttcagcgccgccttcccggctccggccgctcttccagctcccggggccgagcgccgcggccgagcgtctgcagcggcagcgcgtgtgcctggagcgcgtgcagtgctcgacggcctcgggcgctgaggtgaagggctccggccgggtgctcagctgccctgggcccagggccgtgaccgtgcgctacacctttaccgagtggcgctccttcctggacgtgccggctgagctgcagcccgagccgctggagccacagcagccagaggcaccgtctggggcctccgagccagggtccggggatgccaagaaagagccaggcgccgagtgcttccacttctcgctgtgcctgcccccgggcctgcagcctgaggacgaagaggacgccgacgagcgcggcgtcgcggtccacttcgctgtctgctaccgctgcgcgcagggcgagtactgggacaacaacgcgggcgccaactacacgctgcgctacgcgcgccctgcggacgcgctctgagcctggagagtatgcaagagccgtggggcggggttgattagcacgtggagctcgggctgccgcctcaaggaacttgctgggacgctttgctgagcgtggcgagtctggcgtgaggggcgcgtggagggaaaggagggagactttgaaccgtcgactcgcacccccgcagacaagtgagcgagcttagagagacccggcaatgctccgaaagcctctgacctcagtcttctcgtccgtttgaccttcctacaaggcctctagaattcccagcctgcgtcagagtaggaagaaacttccaaggcccggagcagctgcctccaagaaaaaggctcccaactcccgggcatggttctaaggccttgggattggtttttaactctaaatatcatattgtagccccttgcagtttgctggagacccctagggaaaagaataaagcgtcctgcccacggtgcaccagaggaaggtgccacggactgtgggtgcacgcgtgggacctttacaccccaacctatttctcagagaaaacccttcggggctgggccaggccacccttttcttttgactgagatgtgggtaatgtgtgcccagacttgacgttgtttattgtgcgacattgtgtacaaatgtcctttataaaagtaaaggccactcgcaaaa

SEQ ID NO: 154391 - DNA, 424 bp, Homo sapiens
ccatgcggtggaattcatcatatctatagaatttgaactagaatggattttgtgtacaacctccttattttacaggtgagataacagtcctgaagatgttgtttctttcccaagatttcctatgtgttagtagtagaggggatttactatatggtggagggtctcctgagccctggcccagggctgtttgccacatacacactgtttctggacattgtctccttttcttgccttttagtgctgttaacaaagatagacacttttcttgcgaagactgtaatggaaatgtcagtggaggttttgatgcttcaacatctcagatagttttgtgccagaataatatccataatcaggcccatatgaacagagtggtcacacacgagctcattcatgcatttgatcattgtcgtgcccatgtcgactg

SEQ ID NO: 154392 - DNA, 1282 bp, Homo sapiens
tcccgcctaacgtcttcagcccagccagtctgcccttcttccctgcggagggagggcctgggcggtcgcgttggcgggagggaggttacctttcccagtctcgctctggccgcctgagccaggaggaagcagcgtcgaggtctgcgggaggcatggcgggagctccggacgagcgccggcggggccccgcggcaggggagcagctgcagcagcaacacgtctcttgccaggtcttccccgagcgtctggcccaggggaatccccagcaagggttcttctccagcttcttcaccagcaaccagaagtgccagcttaggctcctgaagacgctggagacaaatccatatgtcaaacttctgcttgatgctatgaaacactcaggttgtgctgttaacaaagatagacacttttcttgcgaagactgtaatggaaatgtcagtggaggttttgatgcttcaacatctcagatagttttgtgccagaataatatccataatcaggcccatatgaacagagtggtcacacacgagcttattcatgcatttgatcattgtcgtgccccatgtcgactggttcaccaacatcagacatttggcgtgctcagaggttcgagctgctaaccttagtggagactgctcaacttgtcaaatgaaatattccgggtttcaatttggattaaaacacccccccccagacttggtgtgcgagacagagccactctttctatcctggctgttaggaatatcagcaaagaagtagctaaaaaggctgttgatgaagtttttgaatcctgtttcaatgaccatgaaccttttggaaggatccccacataacaagacttatgcaagatatgctcacagagactttgaaaaccggggtcgggtattattcaaatatatgagcacaatgacatttttatattacagagcttccatcatcatgaagaaaaaaaaaatttggttctcaagtgaacaaaccatataaaatgtaaacaatccctacaatccagataaaacagagaagactgtgattctagcatattatcagaaaaagtaactatggcaaaaaatgaaactgctttaaactccaaggcagaaattgtatctttatagctaaccatttagtaaataaatacattacatttttgtattttagtcatttgtttttattacatgtgattattttaaaatttgattatgaaacctgtgaagtgtgctcttccatgatgttgataggtgaccactgttggtatttacattaaatgtaaagaaatgtgaaaaaa

SEQ ID NO: 154393 - DNA, 349 bp, Homo sapiens
  misc_feature (1)...(349): n = a,t,c or g
atacagagtttctgtcattggatctctgattggtagtgttaataaatattctttcagtgtgagccagattcataaaattaattttcttcattttagtagtaaaaagtagtctaatagctttttgtcagcttgatttttttgtgtgtgtaatattcaagggcataatgacaggacagataagcaataagaaatgtatagaattagaaaatatnnnnnnnnnnnnnnnnnnnnnnnnnnnnnnnnnnnnnnnnnnnnnnnnnnnnnnnnnnnnnnnnnnnnnnnnnnnnnnnnnnnnnnnnnnnnnnnnnnnnnnnnnnnnnnnnnnnnnnnnnnnnnnnnnnnnnnncag

SEQ ID NO: 154394 - DNA, 2165 bp, Homo sapiens
tgtttaattttataaaattgaaaagtttaggaatgagttttattgcaatcttttctctgcaaatgaagtttttttctactagtggatattttaaagggactattttataattccaaaacgtctagtttcaaatgcttcagagaattttgtaacttaagtttcatatagagtagtctccccttatccacgattttgctttctgtggtttcggttactcacggtcaaccacagtctgattacaggtgagtacagtacaataagatattttgagagaaagagacagacatatccacattaacatcacttttaattacagtgcactgttaataattgttctatttgcagttattgtttatctcttgctgtccctgatttataaatagaactttatcataggtatatatgtataggaaacaacagtgtatagaggtgtctatactatccatgggtttcagacgttcactgggggtcttggaacgtatgtcccatgggtaagagggaactactatattttctaattctatacatttcttattgcttatctgtcctgtcattctgcccttgaatattacacaccacaaaaaaatccaagctgacgaaaaagctattagactactttttactactaaaatgaagaaaattaattttatgaatctggctcacactgaaagaatatttattaacactaccaatccaggaggatccaatgagcaggaaacactggtgctgggaatacaaaagaacaaaaaatgaggtcatttggaattggccctggaaaaactcggaaattcttgcgaaggatggtggtacttgtatctgatattctggaagtgactagtggtttgaattttaactcaaaggattaaataagagtttgttttttttttttttgagacggagtctttctctgtcacccatgctggagtgcagtgggcacaatcttgggctccattgtaacctccacctcccaggttcaagcaatgctcctgcctcagcctcccgagtagctaggattacaggcgcacaccaccacgccaggctaatttttgtatttttagtagagatggggtttcaccaaactggctgggccatgctggtcttgaaactccctgacatccaggtgatatgcccgccttggcctccccaaagtgctgggatttacaggcatgagccacagcaccctggccgtaaatgagagtttttatgtgcaagtaaaggcagttaaataactttcagtaataaaatgcatctcagatatttccacaggttgtaaaacacaacctgggttacctttttgaataaaataacatttggaagaaggcatagctacttttaaaagctattctatgctttccttgtgtttgaaatttcaagaaaaaataaaatgatcaatcacggaattaacaatgccaaattcaagttaattcctataattcttccattatgttatgaatattatgtaatatcaaaccatccatttttaatgtgctaaaaaatatgggtttaccaaaatatgaacaggtaatttttaaagagtaaattatgttaagaactttattattttcgattcattttatagggtagtaaaataatacttcttcaaaatcatttaaatgttattggatgcccattggcaaaatcatttataaataaattttcctcccattatcccaatcacatcctagataacattgaaatatgttacagggtttctctggataggtaccaaaaggtaccacattttatacaggacttaattgtgaaagctggggtgaaataaattttcaggatcaaaattttttttaaggtttaaatcattcactctttaaatttccagacagtgtccagtgtgactccttacttttaaagggaaaaaaaattagtttaaaatttaatagcccacagatttaataatttttttactttaacacttaatgtacattttcatgagcagtaattaagatatgttgaaattttaaatgtgaaagatttcaaagtttcagtatgttaacattactcttcaaatgttcttaatatatatataaacacttacaaattatagatacaactagttgtatatctacaatacatatatgaacaccattcttcttctctagccatatttatatgaggataaagtaataaatctctgtgctattcaagga

SEQ ID NO: 154395 - DNA, 617 bp, Homo sapiens
gaatatagcaaggttatttttaaatcattttaataatgcggaaatgctgatacatggtgctttcatctttcaacttccaaaaggctataaaattggctcttctcaaatattttaaaatttcatttcaactatttcctttttacgttcacaaaattgggtgcagacactctcactttgccatgaatgtttcttgataaatctgtgtcctttacgctgcggaataagctctttttcatcttgctggtgcttctctggaatgcatgaaactatccaaggctgttcttgccgctgtaaatacaaaaaagagtaacaataatctactgttaaatcactgaactgtttaaaatcataattcaaaataacaaatttgaataccttttccctttttctgcactccaggagtaagtttcactttatatctttaaaaaggaattacatgtgttactaaatagatgttacaaaacaattcacaaaagccattctgtccactaatggtaacttacttgtagtttgtcatggtggtgtaacgagcacatatcggaatggcaaacagtagtacatcttcaggatgtggctggcctgtcaaagaatcaaathaggttttcctcatttccctg

SEQ ID NO: 154396 - DNA, 742 bp, Homo sapiens
ggtcaacagatgttttattgaatgcctaagacctgccaatgctatgttggtacaaagactacaaatcccagtgcctggccatcaaggtgatcaggggcaaaatgtgcctagtgagtaagggatgagtcaggggtgacaatatgttgagcttggatgatggaaagaaagataaatcccatgagagatgaaaaacttgcatctttttccccacatgatgattttaagcatctttgtattttctaacttggtgattatcaagtgaagcagaagccatgaccatttatatactgtatatgtgccttccccatggaacttttttagggcactaagaatttcaaattctaagaatgaaatgttttccatgtcttttttattcagggaaatgaaaaagaaaaaacttccaagtgactcaggagatttagaagcgttagagggaaaggataaagaaaaagaaagtactgtacacattgaaactcatcagaacacaagcaaaaatgttgcggctgtgcagccaatgaaacgatggacaaaagagtaaaatgaaaaaaatgaaagaaaaatactaagaccaggatgaagaagaccgtgaacttatcatgaagttgctggggtctgcaggttcaaacaaagaagaaaaagggaagaaggggaagaaaggaaaaacaaaggacgaacctgtgaagaaacagccccagaaacctagaggtggacagagggtctctgacaacattaagaaagaaat

SEQ ID NO: 154397 - DNA, 2759 bp, Homo sapiens
aatttattgtggtaaaggatcttggagatcatttagttcaacctattcatgatacaggttattcttttgtctaagagtaccctttgggaatgatcagacacttttctgttgattttttggagaaatatgggagaaacagtggaatatttttatgacatttttaggaaatcacctggcttggttggtagtcccacactgactttccttatgataattctacagatggaggtgacacgagcagtgatgaggataaagaagaacatgaaactcctgtggaagtagaactcatgactcaggttgaccaagaggatatcactcttcagagtggcagagatgaactaaatgaggagctcattcaggaagaaagctctgaagacgaaggagaatatgaagaggttaagaaaaagatcaggattctgttggtgaaatgaaggatgaaggggaagagacattaaattatcctgatacctaccattgacttgtctcacctttcaaccccaaaggtccatccagaaattggcttcaaaagaggaatcttctaattctagtgacagtaaatcacagagccggagacatttgtcagccaaggaaagaagggaaatgaaaaagaaaaaacttccaagtgactcaggagatttagaagcgttagagggaaaggataaagaaaaagaaagtactgtacacattgaaactcatcagaacacaagcaaaaatgttgcggctgtgcagccaatgaaacgaggacaaaagagtaaaatgaaaaaaatgaaagaaaaatacaaagaccaggatgaagaagaccgtgaacttatcatgaagttgctggggtctgcaggttcaaacaaagaagaaaaagggaagaaggggaagaaaggaaaaacaaaggacgaacctgtgaagaaacagccccagaaacctagaggtggacagagggtctctgacaacattaagaaagaaactccgttccttgaggttataactcatgagttacaagacttttgcctgtagatgatccacattgattgaccaagggaaagagccagatctggatcaacagggaaatgaggaaaacctattttgattcctttgaccagggccagccacattcctgaagatgtactactggttttgccattccaatatgtgccccttacaccaccatgacaaactacaaatataaagtgaaacttactcctggagtgcagaaaaagggaaaagctgcaaaaacagccttgaatagtttcatgcattccaaagaagcaacagcaagagaaaaagacttattccgcagcgtaaaggacacagatttatcaagaaacattcctggcaaagtgaaaagtgtctgcacccaatcttctgaacgtaaaaaggaaatagctgaaatgaaattctaaaatatttgagaagagccaattttatagccttttggaagttcaaagatgaaagcaccatgtatcaggatttccgcattataaaaatgaactaaacattgccttgctatattcaccaaaaggacttaattcttgtttttttcccagttttatatagaggaaacactgtctatgataggatttccaaaagtatttgtggacagttaaatgctaattaatatacatccgtagttattctacattttcttgaaatttgggaggttaataccaagtattcatttcatgatgtaaagaaactgaacagtgaagtggcttgattgcttaaactattgacttggtaagtctactgtatataacatctaatatatatattacaggccaaatgaactaaacattgccttgctatattcaccaaaaggacttaattcttgtttttttcccagttttatatagaggaaacactatgataggatttcctaaagtatttgtggacagttaaatgctaattatatacatctgtagttattctacattttcttgaaatttgagaggttaataccaagtattcatttcatgatgtaaagaaactgaacagtgaagtaggcttgattgctttaaactattggactttggtaagtctactgtatataacatctaatatatatatattataggccagctacaaggggtttaaatatttaggacttgtgtcttgaaaactaagtattgggagtgggattttcttctgctttcattgatacttgtcaggaaaaaaatattaggccccaaaatgtaaaatataaagaataattcctcatgactccaggctaatcatttccaattatttgtagccccttcaaggttgatcttaaattttttcctgtatttctaaatcagttccggacccattttaattccccacctttaagaattaatttcccaattatagcacgttaagagtatcttaacccaataatacaggaagcgcattttaggcttaccacttaaagcctctaacccaccttttctctgtctcttaacagaaaggaaaatgatgtcatcattatttccattccttcatgagctataaaacctattaattaaaaaaaaactttttaattgactggacagcacctgcctgtattcagcatgaccacttgctccagcccctacactgaagcattaaggtcaaagtactgaacagttgttggtccctccacactttgtttttccagcttcgtcataatgtgaatattaatgtttaaaaaaaaaacctttattatattgtatttacaacactaggttacataactatagactactcttgccattaaaaaaaaactctataatgttttcaaaaaaaaaaaa

SEQ ID NO: 154398 - DNA, 1511 bp, Homo sapiens
gcagctggaccactccagctgggactgctaggaaggttgcgggtccacccggccgagccgaacgagggaaatggtcctcacccggccactcgccggttgaaaaggggccgccctggcagggaagcggccgccgcggcgcggtgcagcgcagcggcgagaaggagtgcgttatcgtcttgcgctactgctgaatgtccgtcccggaggaggaggagaggcttttgccgctgacccagagatggccccgagcgagcaaattcctactgtccggctgcgcggctaccgtggccgagctagcaacctttcccctggatctcacaaaaactcgactccaaatgcaaggagaagcagctcttgctcggttgggagacggtgcaagagaatctgccccctataggggaatggtgcgcacagccctagggatcattgaagaggaaggctttctaaagctttggcaaggagtgacacccgccatttacagacacgtagtgtattctggaggtcgaatggtcacatatgaacatctccgagaggttgtgtttggcaaaagtgaagatgagcattatcccctttggaaatcagtcattggagggatgatggctggtgttattggccagtttttagccaatccaactgacctagtgaaggttcagatgcaaatggaaggaaaaaggaaactggaaggaaaaccattgcgatttcgtggtgtacatcatgcatttgcaaaaatcttagctgaaggaggaatacgagggctttgggcaggctgggtacccaatatacaaagagcagcactggtgaatatgggagttacagcctttatccataaccgcagccatccatccagaaatgcccaccgtctgaggttgggagagccggtgcggcaaaagcctctcgtcctcctccgggacggacattcagcagtagcgcaagacgataacgcactccttttcgccgctgcgctgcaccgcgccgcggggcacgctatccctgccagggcggccccttttcaaccggcgagtggccggcggaagaatttgcgtagacccccgtgcatcaagggctggattccttggattggagttggatttgagtttgggaaagcccctctagaatttatagagaaagcaagaatcaagatgagaagtttagagaagttacgcagtgtaaccaaggttcaacaactctttgatcaggctgacttgggaatccaagcctttacctactgtgctgcctccctgtggcattgtgtctggaatttgtgggttcttggtctcactgacttcaagaatgaagccacggcccctcgtggaatgaagctgcagaccttcgcggtgagtgttacagctcttaaggcaacgcgtctggacttgttcgttcctcccggtgggctcgtggtctccctggcttcaggagtgaagctgcagaccttttcgataccaccacctcctccaagagacctgaattcttctggtctgaattcttcagactacattatgagctccaggtaa

SEQ ID NO: 154399 - DNA, 1109 bp, Homo sapiens
cggccgccgcggcgcggtgcagcgcagcggcgagaaggagtgcgttatcgtcttgcgctactgctgaatgtccgtcccggacgaggagggagaggcttttgcgtctgacccagagatggccccgagcgagcaaattcctactgtccggctgcgcggctaccgtggccgagctaggtacccggctgcccacgcctgggcctcccgggccagtggcacgcgccgcgctgggggaggagaccgcgggggcggcttcgcgcccgggcagtgcgcaatcgaagaggtcgcccccttcccatgcccgcctggcagaggttgcggtggaggccaggccccgcggtgggaggaggagggatttggaggtctccacggccttttccttctaatctcttctaaatgcttcccttagggcatgtgctgtggtgcttgaatgttgtactttaaggaagcttcgcgagctgtcattcctcgtgtaggaatcattttccttttcatgaggatgacctttttaaaaaacgtaatctgttttccatccttactgagatcatctctgtggtttatagtcttacacagccacactgtcattatcttgtgggtccaagttgtggacctaccttgtgggacttccgttattaacctgccactcacagagcatcgactacttgacctctttgagtgtaattcatctatactgtttaccttgcaggattctgagaagtcaataatatatgattgctaaacccaaggcaggacacccattagttgcgacatttttataattcctacaataccagggactgtggatatataatttgaaaagacccagttctgaccttcttacaggctgctggggagacagagaaagacaattataatgtgctacttgttataatgaagatattattaggtgtcataaaagcatagaagagcagttacatctgcctacatgagtaagaaaaaactttaagaggccatctagagtggaatgatgatgcccttgaatgagcaagtagcgtttattccaaggattttgtgagtagtatactcatgtgtttcctgtgaagccttaactgtgtattttaagattacccttacattttcttgcctgttac

SEQ ID NO: 154400 - DNA, 1960 bp, Homo sapiens
ggggggccgtgcggacctggggaagaggattccaaacagaaaaatgccaagcatcacttttaaacttctggaacccgcctaccactgcccaagtcacgattgaagccgagccaaccaaagtttccaaggggaaggacgttcttctacttgtccacaatttgccccagaatcttgctggctacatctggtacaaagggcaaatgaaggacctctaccattacattacatcatacgtagtagatggtcaaataattatatatgggcctgcatacagtggacgagaaacagtatattccaatgcatccctgctgatccagaatgtcacccgggaggacgcaggatcctacaccttacacatcgtaaagcgaggtgatgggactagaggagaaactggacatttcaccttcaccttataccgtcattccttggactctgctctatctttagaggtcactggctcaagtcagccactatgagacacctgggaaaactgccccaccttgtggctccactgcctgatgactgaactgacctccggacttgactctgttctcccctgtgttatttctgctgaagtacccagtcccaggtcaggctttccagtatccaaagggtttaaagacaattggaagttccatcacccatctctaggatgtccttggcaagggaagctgcagagaaaacatacctcgggcggcaaagtaagactgaaactaagaagattccagcactgcatgctccaagtgaggaccacaagtggagactcccaagccctccatctccagcagcaacttataccccagggaggacatggaggctgtgagcttaacctgtgatcctgagactccggacgcaagctacctgtggtggatgaatggtcagagcctccctatgactcacagcttgcagttgtccaaaaacaaaaggaccctctttctatttggtgtcacaaagtacactgcaggaccctatgaatgtgaaatacggaacccagtgagtgccagccgcagtgacccagtcaccctgaatctcctcccgaagctgcccaagccctacatcaccatcaacaacttaaaccccagggagaataaggatgtcttagccttcacctgtgaacctaagagtgagaactacacctacatttggtggctaaatggtcagagcctcccggtcagtcccagggtaaagcgacccattgaaaacaggatcctcattctacccagtgtcacgagaaatgaaacaggaccctatcaatgtgaaatacaggaccgatatggtggcatccgcagttacccagtcaccctgaatgtcctctattactacaaagcatagcgggctctatgcttgctctgttcgtaactcagccactggcatggaaagctccaaatccatgacagtcaaagtctctgctccttcaggaacaggacatcttcctggccttaatccattatagcagccgtgatgtcatttctgtatttcaggaagactggcagacagttgctttcattcttcctcaaagtatttaccatcagctacagtccaaaattgctttttgttcaaggagatttatgaaaagactctgacaaggactcttgaatacaagttcctgataacttcaagatcataccactggactaagaactttcaaaattttaatgaacaggctgatacttcatgaaattcaagacaaagaaaaaaacccaattttattggactaaatagtcaaaacaatgttttcataattttctatttgaaaatgtgctgattctttgaatgttttattctccagatttatgcactttttttcttcagcaattggtaaagtatacttttgtaaacaaaaattgaaacatttgcttttgctccctaagtgccccagaattgggaaactattcaggagtattcatatgtttatggtaataaagttatctgcacaagttcaaaaaaaaaaaaaaaaccc

SEQ ID NO: 154401 - DNA, 1011 bp, Homo sapiens
atggccacggagaagaggctcagtgcagaaggaggaaggacagcacagctgacagccgtgctcaggaagtttctggatcctaggctcatctccacagaggagaacacacaggcagcagagaccatggggcccctctcagcccctccctgcacagagcacatcaaatggaaggggctcctggtcacagcatcacttttaaacttctggaacctgcccaccactgcccaagtcacgattgaagcccagccaccaaaagtttccgaggggaaggatgttcttctacttgtccacaatttgccccagaatcttactggctacatctggtacaaagggcaaatcagggacctctaccattacattacatcatatgtagtagacggtcaaataattatatatgggcctgcatatagtggacgagaaacagcatattccaatgcatccctgctgatccagaatgtcacccgggaggacgcaggatcctacaccttacacatcataaagcgaggtgatgggactagaggagtaactggatatttcaccttcaccttatacctggagactcccaagccctccatctccagcagcaacttaaaccccagggaggccatggaaactgtgatcttaacctgtgatcctgagactccggacacaagctaccagtggtggatgaatggtcagagcctccctatgactcataggtttcagctgtccgaaaccaacaggaccctctttctatttggtgtcacaaagtatactgcaggaccctatgaatgtgaaatacggaactcagggagtgccagccgcagtgacccagtcaccctgaatctcctccgtgagtatcttctgttcctctgtgggccagactgccatcccaaatacacatggccagaggccaggcctctcagtccctctcaggtccaagtacagagacctttacccctaggcatcaaagctggccatgactttctgccccaggcaaaccagaataggcctaggcttgatccacaatag

SEQ ID NO: 154402 - DNA, 1882 bp, Homo sapiens
ggacagcacagctgacagccgtgctcagagagtttctggatcctaggcttatctccacagaggagaacacacaagcagcagagaccatgggaaccctctcagcccctccctgcacacagcgcatcaaatggaaggggctcctgctcacagcatcacttttaaacttctggaacctgcccaccactgcccaagtcacgattgaagccgagccaaccaaagtttccgaggggaaggatgttcttctacttgtccacaatttgccccagaatcttaccggctacatctggtacaaagggcaaatgagggacctctaccattacattacatcatatgtagtagacggtgaaataattatatatgggcctgcatatagtggacgagaaacagcatattccaatgcatccctgctgatccagaatgtcacccgggaggacgcaggatcctacaccttacacatcataaagggagatgatgggactagaggagtaactggacgtttcaccttcaccttacacctggagactcctaagccctccatctccagcagcaacttaaatcccagggagaccatggaggctgtgagcttaacctgtgaccctgagactccagacgcaagctacctgtggtggatgaatggtcagagcctccctatgactcacagcttgaagctgtccgaaaccaacaggaccctctttctattgggtgtcacaaagtatactgcaggaccctatgaatgtgaaatacggaacccagtgagtgccagccgcagtgacccagtcaccctgaatctcctcccgaagctgcccaagccctacatcaccatcaacaacttaaaccccagggagaataaggatgtcttaaacttcacctgtgaacctaagagtgagaactacacctacatttggtggctaaatggtcagagcctcccggtcagtcccagggtaaagcgacccattgaaaacaggatcctcattctacccagtgtcacgagaaatgaaacaggaccctatcaatgtgaaatacgggaccgatatggtggcatccgcagtgacccagtcaccctgaatgtcctctatggtccagacctccccagaatttacccttcattcacctattaccgttcaggagaagtcctctacttgtcctgttctgcggactctaacccaccggcacagtattcttggacaattaatgaaaagtttcagctaccaggacaaaagctctttatccgccatattactacaaagcatagcgggctctatgtttgctctgttcgtaactcagccactggcaaggaaagctccaaatccatgacagtcgaagtctctgcttatagcagttcaataaactatacttctgggaaccgtaattgaaacatttacttttgctttctacctgactgccccagaattgggcaactattcatgagaattgatatgtttatggtaatacacatatttgcacaagtacagtaacaatctgctttctttgtaacatgacacatttgaaatcattggttatattaccaatgctttgattcggatgttatattaaaaacatagatagaatgaaccaatatgaactgcaggcaaagtctgaagtcagccttggtttggcttcctattctcaagaggtttgtgaagatttaatctcagattccttataaaaacttagagaaaagaaaattttagaagacagcctacatggtccattgctactcttgctgcacttatgtaaacaatcagaccacatttgaagaaactccacctattttgcaaacaaacttattctactgaaattatcattggtaaaagtagagatgcccatagagggaaaaattatgtggaaaataaaaactgtagtatacctgttatgagactgc

SEQ ID NO: 154403 - DNA, 1857 bp, Homo sapiens
atggccacggagaagaggctcagtgcagaaggaggaaggacagcacagctgacagccgtgctcaggaagtttctggatcctaggctcatctccacagaggagaacacacaggcagcagagaccatggggcccctctcagcccctccctgcacagagcacatcaaatggaaggggctcctggtcacagcatcacttttaaacttctggaacctgcccaccactgcccaagtcacgattgaagcccagccaccaaaagtttccgaggggaaggatgttcttctacttgtccacaatttgccccagaatcttactggctacatctggtacaaagggcaaatcagggacctctaccattacattacatcatatgtagtagacggtcaaataattatatatgggcctgcatatagtggacgagaaacagcatattccaatgcatccctgctgatccagaatgtcacccgggaggacgcaggatcctacaccttacacatcataaagcgaggtgatgggactagaggagtaactggatatttcaccttcaccttataccgggaggccatggaaactgtgatcttaacctgtgatcctgagactccggacacaagctaccagtggtggatgaatggtcagagcctccctatgactcataggtttcagctgtccgaaaccaacaggaccctctttctatttggtgtcacaaagtatactgcaggaccctatgaatgtgaaatacggaactcagggagtgccagccgcagtgacccagtcaccctgaatctcctccagcattcttggctgattgatgggaagttccagcaatcagcacaagtgttctttatccctcaaatcactaaaacatatagagggctctatgtctgtttcatccataactcagccactgctggaacaaatctcataatcaagaggaccatagtccctgccttaaaaaataaacgagtgcagcatggccagtatggaattgaccgaaaactaatcaccaagccagaaacgtgggagaataaggatgtattagccttcacctgtgaacctaagagtgagagctacacctacatttggtggctaaatggtcagagcctcccggtcagtcccagggtaaagcgacccattgaaaacaggatcctcattctacccagtgtcacgagaaatgaaacaggaccctatgaatgtgaaatacgggaccgatatggtggcatccacagtgacccagtcaccctgaatgtcctctgtatcttttgttcctctgtgggccaggccaccagcttaaatccaaatgaccaggggccaggcctctcagtctctctccggtccaagtatagacaactttacttctggacatccaagctggccatgactccctgccctgggaaaacctgggtaggcacagccttaaccaagaatataaggggagtggacggtcttgtcgtgggagacttggggcccacatcttgtgatggtccagacctccccagaattcacccttcatacaccaattaccgttcaggagataacctctacttgtcttgcttcgcgaactctaacccaccggcacagtattcttggacaattaatgggaagtttcagcaatcaggacaaaatctgtttatcccccaaattactacaaagcatagcgggctctatgtttgctctgttcgtaactcagccactggcgaggaaagctccacatcgttgacagtcaaagtctctggctgcagggaaatgagaagagaaggagcctcagggcagactcctaagcctggtcctggctctgaagtcagcggttgtatgaagctgtgggcacagtacgtgggacacagcatggaggactgtgactga

SEQ ID NO: 154404 - DNA, 1922 bp, Homo sapiens
gtgctcagagagtttctggatcctaggcttatctccacagaggagaacacacaagcagcagagaccatgggaaccctctcagcccctccctgcacacagcgcatcaaatggaaggggctactgctcacagcatcacttttaaacttctggaacctgcccaccactgcccaagtcacgattgaagcccagccacccaaagtttccgaggggaaggatgttcttctacttgtccacaatttgccccagaatcttaccggctacatctggtacaaagggcaaatgagggacctctaccattacattacatcatatgtagtagacggtgaaataattatatatgggcctgcatatagtggacgagaaacagcatattccaatgcatccctgctgatccagaatgtcacccgggaggacgcaggatcctacaccttacacatcataaagggagatgatgggactagaggagtaactggacgtttcaccttcaccttacacctggagactcctaagccctccatctccagcagcaacttaaatcccagggagaccatggaggctgtgagcttaacctgtgaccctgagactccagacgcaagctacctgtggtggatgaatggtcagagcctccctatgactcacagcttgaagctgtccgaaaccaacaggaccctctttctattgggtgtcacaaagtatactgcaggaccctatgaatgtgaaatacggaacccagtgagtgccagccgcagtgacccagtcaccctgaatctcctcccgaagctgcccaagccctacatcaccatcaacaacttaaaccccagggagaataaggatgtcttaaacttcacctgtgaacctaagagtgagaactacacctacatttggtggctaaatggtcagagcctcccggtcagtcccagggtaaagcgacccattgaaaacaggatcctcattctacccagtgtcacaagaaatgaaacaggaccctatcaatgtgaaatacgggaccgatatggtggcgtccgcagtgacccagtcaccctgaatgtcctctatggtccagacctccccagaatttacccttcattcacctattaccgttcaggagaagtcctctacttgtcctgttctgcggactctaacccaccggcacagtattcttggacaattaatgaaaagtttcagctaccaggacaaaagctctttatccgccatattactacaaagcatagcgggctctatgtttgctctgttcgtaactcagccactggcaaggaaagctccaaatccatgacagtcgaagtctctgaagccctataagctggaggtggacaactcaatgtaaatttcatgggaaaacccttgtacctgaagcatgagccactcagaactcaccaaaatattcgacaccataacaacagatgctcaaactgtaaaccaggacaacaagtggatgacttcacactgtggacagtttttcccaagatggtcagaaccagactccccatcatgataaggctctcccccctcttaactggcccttgctcatgcctgcctctttccacttgggcaggataatgcagtcattagaatttccacatgtagtagcttctgagagtaacaacagagtgttcagatatgtcatctcaacctcaaacttttacataacatctcagggggaaatgtgggctctctccaccttgcattacagggctcccaataggaaatggaacacagaggtatttgcctgtgtgtttgcagagaagatggtttgtatgaagacgtaggaaagctgaaattataatagagtcccctttaaatccacattgtgtggatggctcttgccgtttcctaagagatacattgtaaaacgtgacagtaagacattctagcagaataaaacatgtaccacctttgctaaa

SEQ ID NO: 154405 - DNA, 2250 bp, Homo sapiens; identical to SEQ ID NO: 132665

SEQ ID NO: 154406 - DNA, 1993 bp, Homo sapiens
atggggcccctctcagcccctccctgcacacagcgcatcacctggaaggggctcctgctcacagcattacttttaaacttctggaacttgcctaccactgcccaagtcacgattgaagccgagccaaccaaagtttccaaggggaaggacgttcttctacttgtccacaatttgccccagaatcttgctggctacatctggtacaaagggcaaatgaaggacctctaccattacattacatcatacgtagtagatggtcaaataattatatatgggcctgcatacagtggacgagaaacagtatattccaatgcatccctgctgatccagaatgtcacccgggaggacgcaggatcctacaccttacacatcgtaaagcgaggtgatgggactagaggagaaactggacatttcaccttcaccttatacctggagactcccaagccctccatctccagcagcaacttataccccagggaggacatggaggctgtgagcttaacctgtgatcctgagactccggacgcaagctacctgtggtggatgaatggtcagagcctccctatgactcacagcttgcagttgtccaaaaacaaaaggaccctctttctatttggtgtcacaaagtacactgcaggaccctatgaatgtgaaatacggaacccagtgagtgccagccgcagtgacccagtcaccctgaatctcctccagcattcttggctgattgatgggaagttccagcaatcagcacaagtgttctttatcccccaaatcactaaaacatatagaggggtctatgtctgtttcatccataactcagccactgctggaacaaatctcataatcaagaggatcatagtccctgatacactgagaaaaagaggcaaccatgaaaaggtggaaagttctgatgacatagaaaatagcaatcagcctttctcacatcccaaggccttcaaaaatatacaagtgcagcatggccagtatggaattcaccgaaaactaatcaccaagctagaaaagtggcttgattctggtctcccctgtgttatttctgctgaaacatccagtcccaggccaggctgctcagtatcttcagggtttcagggccatgggaagtcccattattactcatctctagaatgtccttggaaatggaagttgcagagaaatcacatctatgggggcaaagtaggatggaatttggaaggggcccaccagttgcacattccagcgaagctgcccaagccctacatcaccatcaacaacttaaaccccagggagaataaggatgtcttagccttcacctgtgaacctaagagtgagaactacacctacatttggtggctaaatggtcagagcctcccggtcagtcccagggtaaagcgacccattgaaaacaggatcctcattctacccagtgtcacgagaaatgaaacaggaccctatcaatgtgaaatacaggaccgatatggtggcatccgcagttacccagtcaccctgaatgtcctctgtatcttttgttcctctgtgggccaggacaccagcttaaatccaaacgaccaggggccaggcctctcagtctctctccggtccaagtacagacacctttacttttggacatccgaggtggccatgactccctgccctgggaaaacttgggtagacacagccttaaccaagaatataaggagaggggatgctcttgtcatgggagacttggggcccacagcttgtgatggtccagacctccccagaattttcccttcagtcacctcttactattcaggagagaacctcgacttgtcctgcttcgcaaactctaacccaccagcacagtattcttggacaattaatgggaagtttcagctatcaggacaaaagctctttatccctcagattactccaaagcataatgggctctatgcttgctctgctcgtaactcagccactggcgaggaaagctccacatccttgacaatcagagtcattg

SEQ ID NO: 154407 - DNA, 1696 bp, Homo sapiens
gaggagaacacacaagcagcagagaccatggggcccctctcagcccctccctgcacacacctcatcacttggaagggggtcctgctcacagcatcacttttaaacttctggaatccgcccacaactgcccaagtcacgattgaagcccagccacccaaagtttctgaggggaaggatgttcttctacttgtccacaatttgccccagaatcttgctggctacatttggtacaaagggcaaatgacatacgtctaccattacattacatcatatgtagtagacggtcaaagaattatatatgggcctgcatacagtggaagagaaagagtatattccaatgcatccctgctgatccagaatgtcacgcaggaggatgcaggatcctacaccttacacatcataaagcgacgcgatgggactggaggagtaactggacatttcaccttcaccttacacctggagactcccaagccctccatctccagcagcaacttaaatcccagggaggccatggaggctgtgatcttaacctgtgatcctgcgactccagccgcaagctaccagtggtggatgaatggtcagagcctccctatgactcacaggttgcagctgtccaaaaccaacaggaccctctttatatttggtgtcacaaagtatattgcaggaccctatgaatgtgaaatacggaacccagtgagtgccagccgcagtgacccagtcaccctgaatctcctccatggtccagacctccccagcatttacccttcattcacctattaccgttcaggagaaaacctctacttgtcctgcttcgccgagtctaacccacgggcacaatattcttggacaattaatgggaagtttcagctatcaggacaaaagctctctatcccccaaataactacaaagcatagtgggctctatgcttgctctgttcgtaactcagccactggcaaggaaagctccaaatccatcacagtcaaagtctctgactggatattaccctgaattctactagttcctccaattccattttctcccatggaatcacgaagagcaagacccactctgttccagaagccctataagctgggaggtggacaacttcgatgtaaatttcatggggaaaacccttgtacccgacatgttgagccattcagaactcaccaaaatgtttcgacaccataacaacagctactcaaactgtaaaccaggataacaagttgatgacttcacactgtggacagtttttccaaagatgtcagaacaagactccccattcatggattaagggctcccacccctcttaactgtccttggcttcatggcctggcctctttcacttgggcaggataatggcagtcattaggattttcacatgtaggtaggttctgagggtaacacagggtgttcaggtttgtccttctcaacctcaaacttttacgtaacatctcagggggaaatgtggctctctccaccttgcatacaggactcccaatagaaatgaacacagagatattgcccgtgtgtttgcagataagatggtttctatgaagaggtaggaaagctgaaattataatagagtcccctttaaatgcacattctgtggatggctctcgccatttcctaagagatacattgtaaaatgtgacagtaatactgattctagcagaataaaacatgtaccacatttgca

SEQ ID NO: 154408 - DNA, 1551 bp, Homo sapiens
cagcacagctgacagccgtgctcaggaagtttctggatcctaggctcatctccacagaggagaacacacaggcagcagagaccatggggcccctctcagcccctccctgcacagagcacatcaaatggaaggggctcctggtcacagcatcacttttaaacttctggaacctgcccaccactgcccaagtcacgattgaagcccagccaccaaaagtttccgaggggaaggatgttcttctacttgtccacaatttgccccagaatcttactggctacatctggtacaaagggcaaatcagggacctctaccattacattacatcatatgtagtagacggtcaaataattatatatgggcctgcatatagtggacgagaaacagcatattccaatgcatccctgctgatccagaatgtcacccgggaggacgcaggatcctacaccttacacatcataaagcgaggtgatgggactagaggagtaactggatatttcaccttcaccttatacctggagactcccaagccctccatctccagcagcaacttaaaccccagggaggccatggaaactgtgatcttaacctgtgatcctgagactccggacacaagctaccagtggtggatgaatggtcagagcctccctatgactcataggtttcagctgtccgaaaccaacaggaccctctttctatttggtgtcacaaagtatactgcaggaccctatgaatgtgaaatatgggaactcagggagtgccagccgcagtgacccagtcaccctggaatctcctccatgggtccagacctccccaggattttccctttcagttcacctcttaattatttcagggagaggaacctcggatttgttcctggtttgggggacttttaaaccccaccaggcacagtattcttggacaattaatgggaagtttcagctatcaggacaaaagctctttatccctcagattactccaaagcataatgggctctatgcttgctctgctcgtaactcagccactggcgaggaaagctccacatccttgacaatcagagtcattgctcctccaggattaggaactttttgctttcaataatccaacatagcagctgtgatgtcatttctgtatttcaggaagactggcaggagatttatggaaaggtctcttacaaggactcttgaatacaagctcctgataacttcaagatcataccactggactaagaactttcaaaattttaatgaacaggctgataccttcatgaaattcaagacaaagaagaaaaatactcaatgttattggactaaataatcaaaaggataatgatttcataattttctatttgaaaatgtgctgattcttggaatgtttcattctccagatttatgaacattttttcttgagcaattggtaaagtatacttttgtaaacaaaaattgaaacatttccttttgctctctatctgagtgccccagaattgggaatctattcatgagtattcatatgtttatggtaataaagctatttgcacaagttcagtaaaaaaaa

SEQ ID NO: 154409 - DNA, 2329 bp, Homo sapiens
gaattcgggctgaccctgcccatgagcttgagaattgctcctgccctgggaagaggctcagcacagaaagaggaaggacagcacagctgacagccgtgctcagagagtttctggatcctaggcttatctccacagaggagaacacacaagcagcagagaccatgggaaccctctcagcccctccctgcacacagcgcatcaaatggaaggggctactgctcacagcatcacttttaaacttctggaacctgcccaccactgcccaagtcacgattgaagcccagccacccaaagtttccgaggggaaggatgttcttctacttgtccacaatttgccccagaatcttaccggctacatctggtacaaagggcaaatgagggacctctaccattacattacatcatatgtagtagacggtgaaataattatatatgggcctgcatatagtggacgagaaacagcatattccaatgcatccctgctgatccagaatgtcacccgggaggacgcaggatcctacaccttacacatcataaagggagatgatgggactagaggagtaactggacgtttcaccttcaccttacacctggagactcctaagccctccatctccagcagcaacttaaatcccagggagaccatggaggctgtgagcttaacctgtgaccctgagactccagacgcaagctacctgtggtggatgaatggtcagagcctccctatgactcacagcttgaagctgtccgaaaccaacaggaccctctttctattgggtgtcacaaagtattacttgcaggaccctatcgaatgtgaaatacggaacccagtgagtgccagccgcagtgacccagttcaccctggaatctcctgcccgaaggttgcccaagccctacatcaccatcaacaacttaaaccccagggagaataaggatgtcttaaacttcacctgtgaacctaagagtgagaactacacctacatttggtggctaaatggtcagagcctcccggtcagtcccagggtaaagcgacccattgaaaacaggatcctcattctacccagtgtcacaagaaatgaaacaggaccctatcaatgtgaaatacgggaccgatatggtggcgtccgcagtgacccagtcaccctgaatgtcctctatggtccagacctccccagaatttacccttcattcacctattaccgttcaggagaagtcctctacttgtcctgttctgcggactctaacccaccggcacagtattcttggacaattaatgaaaagtttcagctaccaggacaaaagctctttatccgccatattactacaaagcatagcgggctctatgtttgctctgttcgtaactcagccactggcaaggaaagctccaaatccatgacaagtcgaagtctctggtaaagtggatcccaagcatcgttggcaatagggttttaggtggagtctatctggcattcagagaagagtcagggaaaacaattgtattcccagcctgtgtcccatgggcacaagcaaatcccaaattctcctcctgaaccctccaaatttgtctaagaacttcgaaaactttaacaaacaggctgatatcttcataatattcccagcctagacccaagcaggaagaacattgatttcattgaaataattgataataatgaagataatgtttttatgatttttatttgaaaatttgctgattctttaaatggtttgttttctacattgatggaatttttctcttaattaatctatctacagcttatagcagttcaataaactatacttctgggaaccgtaattgaaacatttacttttgctttctacctgactgccccagaattgggcaactattcatgagaattgatatgtttatggtaatacacatatttgcacaagtacagtaacaatctgctttctttgtaacatgacacatttgaaatcattggttatattaccaatgctttgattcggatgttatattaaaaacatagatagaatgaatgaaccaatatgaactgcaggcaaagtctgaagtcagccttggtttggcttcctattctcaagaggtttgtgaagatttaatctcagattccttataaaaacttagagaaaagaaaattttagaagacagcctacatggtccattgctactcttgctgcacttatgtaaacaatcagaccacatttgaagaaactccacctattttgcaaacaaacttattctactgaaattatcattggtaaaagtagagatgcccatagagggaaaaattatgtggaaaataaaaactgtagtatacctgtacccgaattc

SEQ ID NO: 154410 - DNA, 2055 bp, Homo sapiens
gggcgggacaactggtctgagtactatggctgattttcgctgtctggcattgagaagccacacgccccttttgcttaggaggcctctctgctggaggatgacgatggcatggtttatctaaggccactgacaagtcatcaatataggacagcacagctgagagccatgctcaggaagtttctggatcctaggctcagctccacagaggagaacacgcaggcagcagagaccatggggcccctctcagcccctccctgcacacagcgcatcacctggaaggggctcctgctcacagcatcacttttaaacttctggaacccgcctaccactgcccaagtcacgattgaagccgagccaaccaaagtttccaaggggaaggacgttcttctacttgtccacaatttgccccagaatcttgctggctacatctggtacaaagggcaaatgaaggacctctaccattacattacatcatacgtagtagatggtcaaataattatatatgggcctgcatacagtggacgagaaacagtatattccaatgcatccctgctgatccagaatgtcacccgggaggacgcaggatcctacaccttacacatcgtaaagcgaggtgatgggactagaggagaaactggacatttcaccttcaccttatacctggagactcccaagccctccatctccagcagcaacttataccccagggaggacatggaggctgtgagcttaacctgtgatcctgagactccggacgcaagctacctgtggtggatgaatggtcagagcctccctatgactcacagcttgcagttgtccaaaaacaaaaggaccctctttctatttggtgtcacaaagtacactgcaggaccctatgaatgtgaaatacggaacccagtgagtgccagccgcagtgacccagtcaccctgaatctcctcccgaagctgcccaagccctacatcaccatcaacaacttaaaccccagggagaataaggatgtcttagccttcacctgtgaacctaagagtgagaacttacacctacatttggtgggttaaatggtcagagccttcccggttcagttcccagggtaaagcgacccatttgaaaacagggtcctcatttttaccccgtgttcaaggggaattgaaacagggaccctattcaatgtgaaatacagggaccgattatgggtgggcctccgcagtttacccagttcaccctggaatgttcctcttatgggtccagacctccccagaattttacccttcatttcacctatttaccgtttcagggaggaaaaccttcggacttgtcctggctttcacgggaatcttaaccccaccgggcaggagtatttttttggggacaatttaatggggggagtttttcaggcattcagggacaaaagctctttatcccccagattactacaaagcatagcgggctctatgcttgctctgttcgtaactcagccactggcatggaaagctccaaatccatgacagtcaaagtctctgctccttcaggaacaggacatcttcctggccttaatccattatagcagccgtgatgtcatttctgtatttcaggaagactggcagacagttgctttcattcttcctcaaagtatttaccatcagctacagtccaaaattgctttttgttcaaggagatttatgaaaagactctgacaaggactcttgaatacaagttcctgataacttcaagatcataccactggactaagaactttcaaaattttaatgaacaggctgatacttcatgaaattcaagacaaagaaaaaaacccaattttattggactaaatagtcaaaacaatgttttcataattttctatttgaaaatgtgctgattctttgaatgttttattctccagatttatgcactttttttcttcagcaattggtaaagtatacttttgtaaacaaaaattgaaacatttgcttttgctccctaagtgccccagaattgggaaactattcaggagtattcatatgtttatggtaataaagttatctgcacaagttcaa

SEQ ID NO: 154411 - DNA, 2753 bp, Homo sapiens
atgctggaggctgctgtgcacgccccaggtaactcagatgtcaccaggacacgatgtgccactcaggtcctaaagcccttggtgtcctatggtcaggcagaaaccggcttctcagttcctcagctcaaatacccaccttgggacgggcttctgcaccgggacatcccgccaggaactctcccggtggaacacagtccatgttctctggctgccctgcagtttttaaatgccaccagtacacatggggaatgttctgccttcgcaaggaggaagctggaaagttcattttcccagcactccttgcaggagggacaccgacacgggtccaggctttccccatcaggtgctcccgtgaaagactcagggtcccgaacagcaccaggaagcagagggggccagcagcatccgagccagcttcttctctgtggcagagatgatctttttcaggcctcctccggccatggccctttcctgctcctctttccagagctcccaagtccccgggatgcactccagctgctaagagaggcctcgaagttccctacggataaacgtcaaggtcgttcctggtctgtggccatcaccaacactgccgcgactagtctagaatgggtgccatttcatgcatttgcaattcccagaagtacactggttagtcagcagaggctcagcacagaaagaggaaggacagcacagctgacagccgtgctcagagagtttctggatcctaggcttatctccacagaggagaacacacaagcagcagagaccatgggaaccctctcagcccctccctgcacacagcgcatcaaatggaaggggctcctgctcacagcatcacttttaaacttctggaacctgcccaccactgcccaagtcacgattgaagccgagccaaccaaagtttccgaggggaaggatgttcttctacttgtccacaatttgccccagaatcttaccggctacatctggtacaaagggcaaatgagggacctctaccattacattacatcatatgtagtagacggtgaaataattatatatgggcctgcatatagtggacgagaaacagcatattccaatgcatccctgctgatccagaatggtcacgcaggaggatgcagggatcctacaccttaccacatcataaagcgacgcgatgggactggaggagtaactggacatttcaccttcaccttacacctggagactcccaagccctccatctccagcagcaacttaaatcccagggaggccatggaggctgtgatcttaacctgtgatcctgcgactccagccgcaggctacccagtggtggatgaatggtcagaggcctcccctatgactcacaggttgcagctgtccaaaaccaacaggaccctctttatatttggtgtcacaaagtatattgcaggaccctatgaatgtgaaatacggaaccccagtgagtgcccagccgcagtgacccagtcaccctgaatctcctcccgaagctgcccaagccctacatcaccatcaacaacttaaaccccagggagaataaggatgtcttaaacttcacctgtgaacctaagagtgagaactacacctacatttggtggctaaatggtcagagcctcccggtcagtcccaggggtaaagcgacccattgaaaacaggatcctcattctacccagtgtcacgagaaatgaaacaggaccctatcaatgtgaaatacgggaccgatatggtggcatccgcagtgacccagtcaccctgaatgtcctctatggtccagacctccccagaatttacccttcattcacctattaccgttcaggagaagtcctctacttgtcctgcttctgcggactctaacccaccggcacagtattcttgggacaattaatggaaaagttttcagcttaccagggacaaaagctctctatcccccaaataactacaaagcatagtgggctctatgcttgctctgttcgtaactcagccactggcaaggaaagctccaaatccatcacagtcaaagtctctgactggatattaccctgaattctactagttcctccaattccattttctcccatgggaatcactaagagcaagacccactctgttccagaagccctataagctgggaggtgggacaactcaatgtaaattttcatgggggaaaacccttgtacgtgaaggcatgaggccactcagaactcaccaaaatattcgacaccataacaacagatgctcaaactgtaaccccgggataacaagttgatgacttccacactgtgggacagtttttcccaaagatgtcagaacaagactcccccatccatgataaggctccccacccctcttaactgtccttgctcatgcccggcccccttcaccggggcaggataatgccagtcattagaatttccacatgtagtataggagcttctgagggtaacaacagagtgtccagatatgtcatcctcaaccctcaaaccttttaccgtaacatcctcaggggaaatgtggctctctccatcttgcatacagggctcccaatagaaatgaacacagagatattgccctgtgtgtttgcagagaagatggtttgtatgaagacgtaggaaagctgaaattatagtagagtctcctttaaatgcacattgtgtggatggctctcaccatttcctaagagatacagtgtaaaaacgtgacagtaatactgattctagcagaataaaacatgtaccacatttgctaaaaaa

SEQ ID NO: 154412 - DNA, 405 bp, Homo sapiens
  misc_feature (1)...(405): n = a,t,c or g
ccttcttgtctttctcctttttctttggtttgttctgctggggctgagagagggctgcaantgctcgtgcacggctttgagctgctcctggantcagccagccgctgggtcgctcctcctcagagtcatcagtcgaactgtcactgtccnaggagctatcgctgctgctgctcttctctggtnctgggtgctgctgagagtcgggcacgtccttctttggaggtttcacaggccggctgctctcccgccgctggccagcttggtggtcttgggctccgggggcagcgagggtggctcgtgaatggggtcaatggtggtgggggtggtggtgtctgctttcctcttcactcccttctttgtcttcacaggctgtggggtggccgcgatgatggggtnggtggctct

SEQ ID NO: 154413 - DNA, 2729 bp, Homo sapiens
agtgcctggtgaagaatgtgatgggatcactagcatgtctgcggagagcggccctgggacgagattgagaaatctgccagtaatgggggatggactagaaacttcccaaatgtctacaacacaggcccaggcccaaccccagccagccaacgcagccagcaccaaccccccgcccccagagacctccaaccctaacaagcccaagaggcagaccaaccaactgcaatacctgctcagagtggtgctcaagacactatggaaacaccagtttgcatggcctttccagcagcctgtggatgccgtcaagctgaacctccctccctcacccccagggcagttccatgagctgtgccaaaaccttacatatcacttgctgatgccagtaggagctgtggctcccgtggatttacctgtggagcagccaggggattactataagatcattaaaacgcctatggatatgggaacaataaagaagcgcttggaaaacaactattactggaatgctcaggaatgtatccaggacttcaacactatgtttacaaattgttacatctacaacaagcctggagatgacatagtcttaatggcagaagctctggaaaagctcttcttgcaaaaaataaatgagctacccacagaagaaaccgagatcatgatagtccaggcaaaaggaagaggacgtgggaggaaagaaacagggacagcaaaacctgggcgtttccacggtaccaaacacaactcaagcatcgactcctccgcagacccagacccctcagccgaatcctcctcctgtgcaggccacgcctcaccccttccctggccgttcaccccggacctttattcgtccagacccctgttcattgacagtgggtgcctccccagccactgcagacgcccccgccagttgcccccccagccacaacccccacccgtttcaggttcctagcccgtacagagccacccacccatcatcgcggccaccccacagcctgtgaagacaaagaagggagtgaagaggaaagcagacaccaccacccccaccaccattgaccccattcacgagccaccctcgctgcccccggagcccaagaccaccaagctgggccagcggcgggagagcagccggcctgtgaaacctccaaagaaggacgtgcccgactctcagcagcacccagcaccagagaagagcagcaaggtctcggagcagctcaagtgctgcagcggcatcctcaaggagatgtttgccaagaagcacgccgcctacgcctggcccttctacaagcctgtggacgtggaggcactgggcctacacgactactgtgacatcatcaagcaccccatggacatgagcacaatcaaggttagcgggatgtgcctgagggaagggacaagtctgaggaaaagcaagacaagccctctggccttgggggcccagtgccccaggtaccttgcccacacagtagatgctccatgggagttggggcttggcggccttgccagcctctttgtggtggagaaggccttgctgtctcctctgtgttggaggcacgcttctaaactggaggcccgtgagtaccgtgatgctcaggagtttggtgctgacgtccgattgatgttctccaactgctataagtacaaccctcctgaccatgaggtggtggccatggcccgcaagctccaggatgtgttcgaaatgcgctttgccaagatgccggacgagcctgaggagccagtggtggccgtgtcctccccggcagtgccccctcccaccaaggttgtggccccgccctcatccagcgacagcagcagcgatagctcctcggacagtgacagttcgactgatgactctgaggaggagcgagcccagcggctggctgagctccaggagcagctcaaagccgtgcacgagcagcttgcagccctctctcagccccagcagaacaaaccaaagaaaaaggagaaagacaagaaggaaaagaaaaaagaaaagcacaaaaggaaagaggaagtggaagagaataaaaaaagcaaagccaaggaacctcctcctaaaaagacgaagaaaaataatagcagcaacagcaatgtgagcaagaaggagccagcgcccatgaagagcaagccccctcccacgtatgagtcggaggaagaggacaagtgcaagcctatgtcctatgaggagaagcggcagctcagcttggacatcaacaagcttccccggggagaagctgggccgcgtggtgcacatcatccagtcacgggagccctccctgaagaattccaaccccgacgagattgaaatcgactttgagaccctgaagccgtccacactgcgtgagctggagcgctatgtcacctcctgtttgcggaagaaaaggaaacctcaagctgagaaagttgatgtgattgccggctcctccaagatgaagggcttctcgtcctcagagtcggagagctccagtgagtccagctcctctgacagcgaagactccgaaacagctttctgcaccagtggagacttcgtgtccccagggccttccccgtatcacagtcacgtgcagtgcggccgcttcagggagatgcttcgctggtttctggtggatgtggagcagactgcagctggccagccgcatcgccagtctgctgctggccctgccatcacctgggccccagccattgcctacccctccccagagtgtgctcgttgctgtgttggctgctcctga

SEQ ID NO: 154414 - DNA, 4720 bp, Homo sapiens
attctttggaatactactgctagaagtctgacttaagacccagcttatgggccacatggcacccagctgcttctgcagagaaggcaggccactgatgggtacagcaaagtgtggtgctgctggccaagccaaagacccgtgtaggatgactgggcctctgccccttgtgggtgttgccactgtgcttgagtgcctggtgaagaatgtgatgggatcactagcatgtctgcggagagcggccctgggacgagattgagaaatctgccagtaatgggggatggactagaaacttcccaaatgtctacaacacaggcccatggcccaaccccagccagccaacgcagccagcaccaaccccccgcccccagagacctccaaccctaacaagcccaagaggcagaccaaccaactgcaatacctgctcagagtggtgctcaagacactatggaaacaccagtttgcatggcctttccagcagcctgtggatgccgtcaagctgaacctccctgattactataagatcattaaaacgcctatggatatgggaacaataaagaagcgcttggaaaacaactattactggaatgctcaggaatggtatccagggacttcaacactaatgtttacaaattgttacatctacaacaagcctggagatgacatagtcttaattggcagaagctctggaaaagctcttcttgcaaaaaataaatgagctacccacagaagaaacccgagatcatgatagtccaggcaaaaaggaagaggacgtgggaggaaagaaacagggacagcaaaacctggcgtttccacggtaccaaacacaactcaagcatcgactcctccgcagacccagacccctcagccgaatcctcctcctgtgcaggccacgcctcaccccttccctgccgtcaccccggacctcatcgtccagacccctgtcatgacagtggtgcctccccagccactgcagacgcccccgccagtgcccccccagccacaacccccacccgctccagctccccagcccgtacagagccacccacccatcatcgcggccaccccacagcctgtgaagacaaagaagggagtgaagaggaaagcggacaccaccacccccaccaccattgaccccattcacgagccaccctcgctgcccccggagcccaagaccaccaagctgggccagcggcgggagagcagccggcctgtgaaacctccaaagaaggacgtgcccgactctcagcagcacccagcaccagagaagagcagcaaggtctcggagcagctcaagtgctgcagcggcatcctcaaggagatgtttgccaagaagcacgccgcctacgcctgggcccttctacaagcctgtggacgtgaggccactgggcctacacgactactgtgacatcatcaagcaccccatggacatgagcacaatcaagtctaaaactggaggcccgtgagtacccgtgatgctcagggagtttggtgctgacgtccgattgatgttctccaactgctataagtacaaccctcctgaccatgaggtggtggccatggcccgcaagctccaggatgtgttcgaaatgcgctttgccaagaatgccggacgagcctgaggagccagtggtggccgtgtcctccccggcagtgccccctcccaccaaggttgtggccccgccctcatccagcgacagcagcagcgatagctcctcggacagtgacagttcgactgatgactctgaggaggagcgagcccagcggctggctgagctccaggagcagctcaaagccgtgcacgagcagcttgcagccctctctcagccccagcagaacaaaccaaagaaaaaggagaaagacaagaaggaaaagaaaaaagaaaagcacaaaaggaaagaggaagtggaagagaataaaaaaagcaaagccaaggaacctcctcctaaaaagacgaagaaaaataatagcagcaacagcaatgtgagcaagaaggagccagcgcccatgaagagcaagccccctcccacgtatgagtcggaggaagaggacaagtgcaagcctatgtcctatgaggagaagcggcagctcagcttggacatcaacaagctccccggcgagaagctgggccgcgtggtgcacatcatccagtcacgggagccctccctgaagaattccaaccccgacgagattgaaatcgactttgagaccctgaagccgtccacactgcgtgagctggagcgctatgtcacctcctgtttgcggaagaaaaggaaacctcaaggtctgagaaagttgatgtgattgccggctcctccaagatgaagggcttctcgtcctcagagtcggagagctccagtgagtccagctcctctgacagcgaagactccgaaacaggtcctgcctaatcattggacacggactcttaataaaacggtcttcagttccagattccttcccagcaagctatagcttaagtccattttcttccgtgaaagggacaggactccatcaagttatggaattcctcagagccctgggcctgtcccccggggtggattagtcatgtccagcagcacacgcctagtcccgccttcgggaaggctgcctgcctggccagccgcccaggtctctctgtgtaaagactgcctgggctgtcctgcccagccttcctggttctctggggtcctctgggtgggtggcatctcctgggagggtgatgacaatccccaacacatggcatttcatgtgggtgctaatttgtgttgcaaagccagaccccaagtatgttttctctctttgtcccatccctctttttctgggactttggaccctaactacttccctcctggaaccttgcagtgacatcagtccaggagagctctcgttcagtgtgcggaagaacactctgacctctagagctgtcctagataaggagtgggagctttagaggcaaggcctctgagacccgggaaggctcagtgaggctcttcccacagcatgcttctcactggtgccctgtaaggctcgagccaccgctgactctgagcctttttggagtctttcctccttcgtctccattgttcccgtgcatttccaaaagcttaagttgcctggtgggcatttccccagtttctttggcctccgtcttctcaagtcacatagggaaagtacctcctggaaccaggctgcagtatgcaggacctgccaggcaggcactggtgaagggccttgggcctatcatcccctcaaccccacctcaccccacccgccttctttagtggggtgagtctgggctggtggaccagagagggtgtcacagaccctcagggactgccccatggacacctctgactggtgttaacagtgtgaacattttccccgtcttcagtcccttagaatgacgaacagcccctggggttggggcaggcgtagtgtggccacatcatccaagccctcccagagacacaaataggcttttttgctctaaaaataaataccagcccttttttggtcacaaatccagcatctcagcagaaaactgcctgacatgaaaagtcccctgagggaactggcattcttgcgttttcagggggctttttcattttttctcctttttttaaagtgttaggttgtggggtgcttcctagaggcctgccttcttctggaactggaagtgggctatcaccatgggcaagcccttgggtgcaggctccccacctgcctggggaactctggcagctctcctcagctccttgggcttgagcagctgcaactgccccagatttgctgtgggaagcaggggcttagccctgggccttcaccagggccttcccggggccctgcagttgatgctcaggagttcctggggctgctttttgatcctttctggggcatcccagcttccagtttaagctctgtttgccaaacaaactattctcagctgccctttggcatgcgcatgatgtgttccctgtgcaagtcccgcctgcttgagacaggagcaggcaggagagccttcatgcccagattcccacaggacaattggggagctgctggcattgtctttctgggaagattctgctttcttggaccaaaatggcagccctgattacccagtgtcgggcctgcatgctggcccccgacacacgcacggcaccgccgacacacgtgtgcaacatggggccattaggccacaaggccaggttttccttccaggggtccttttcaaccttggttgttccagggggaccctgtccttccttgcccgtggggctcccaatctggcaagagaaccgtttcaggggctttgttcgaactttgaaagcctcaattagactttaagcttgtcaccttgtgcttggtgcccccaggaacagcccagagaggacagtgccccactcaccttcttgttggcagcctcctgtgcaggaagctgccagccgggcctcgacgcacccagctggctgtgggtcctgaggaggggcgggaggcggccgctcagtgcagatggggactcctctcctctgccctgaccttaccctccattacctccttcactggagtggggctggggggtgggtggaatcagtgttttaatcggatttttaaaaaacattttatttctttgtacaattaccatcctatgtaaagatgaaatttgtgttgagttgaagattgtcatggaataaagatcacaccgtacttgaggccaaaaaaaaaa

SEQ ID NO: 154415 - DNA, 536 bp, Homo sapiens; identical to SEQ ID NO: 121853

SEQ ID NO: 154416 - DNA, 3434 bp, Homo sapiens
atgcgccctccccgtgcccccgtcgtgcctccagacctgggcggcccccgcctgtgcccggtccccgccgccgggggcgcacgcagcccgagctcgccctactcggtggagacgccctacggcttccacctggacctggacttcctcaagtacatagaggagctggagcgtggccccgctgcccgccgcgccccgggacccccgacctcgcgccgtccccgcgcgccccggcccggcctcgcgggcgcacgtagcccaggcgcctggacatccagcgagtccctggccagtgacgacggtggagcaccgggcatactctcccagggcgcgccctcggggctcctgatgcagccgctgtcgccgcgcgcgcccgtgcgcaacccgcgcgtcgagcacacgctccgggagaccagccggcggctggagctggcgcagacacacgagcgcgcgcccagccccggccgcgggctggtgcgcgagcagatggccgcggcgctgcggcgcctgcgcgagctcgaggaccaggcgcgaacgctgcccgagctgcaggagcaggtgcgcgcgctgcgcgccgagaaggcgcggctgctggccgggcgcgcgcagcccgagccggacggggaggctgagacgcgcccggacaagctcgcccagctgcggcggctcaccgagcgcctggccacctccgagcgcggcggccgtgccagggccagcccccgggctgacagcccagacggcctggctgcagggcgcagcgagggcgcgctccaggtcctcgacggggaggtcgggagtctcgatgggacgccccagacccgggaggtggccgccgaggccgtgcccgagacccgagaagcgggtgcccaggccgtgccggagacccgggaggccggcgtggaggctgcccccgagaccgtggaggcggacgcgtgggtgaccgaggcgctgctggggctgcctgcggccgccgagcgcgagctagagctgctgcgcgccagtctggagcaccagcgcggggtgagtgagcttctgcggggccggttgcgggagctggaggaagcccgcgaggctgcggaggaggcagcggcgggggcccgggcccagctacgcgaggccaccacccagaccccgtggagctgtgccgaaaaggccgcgcagaccgagtccccggcagaggcgccctccttgactcaggagagctcgcccggatccatggacggagacagggccgtggcgcccgcgggcatcctcaaatccatcatgaagaagagagacggcacacctggtgcccaacccagctccggacccaagagcctgcagtttgttggggtcctcaacggagagtacgagagctcctccagcgaggacaccaagcgacagcgatggcgacagcgagaacggtggcgccgagcccccgggtagctcctcgggctccggggatgacagcggcgggggatccgactcgggcacccctggccctcccagcggcggggacatccgggaccctgagcccgaggcggaggcagagcctcagcaggtggcacaggggaggtgcgagctgagcccgcgtctgagggaggcgtgcgtagcgctgcagcggcagctgagccggccccgcggagtagccagcgacggcggcgcagtgcgcctcgtggcccaggagtggtttcgagtgtccagccagcggcgctctcaggcggagcccgtggccaggatgctggaaggggtgaggcgcctgggacccgaactgctggcgcacgtggtgaacctggcggatggcaacgggaacacggccctgcactacagtgtgtcccacgggaacctggccatcgcaagcctgctcctggatacgggggcctgcgaggtcaaccgccagaaccgagccggctactcggccctcatgctggctgcactcacctctgtgaggcaggaagaggaggacatggctgtggtccagagactcttctgcatgggtgatgtcaatgccaaggccagtcagacggggcagacagccctcatgctggccatcagccatggccgacaggacatggtgggcaaccctactggcgtgtggggctgatgtgaatgcgcaggatgcggatggggccacagcgctgatgtgtgccagtgagtatgggcgcctggacaccggtgcggctgctgctcacccagccagggctgtgacccctgccatcctggacaatgagggccccagtgccctggccaatcgccctggaaggctgaaacaggaatgaaggtggccgctctgctaacatgcccacctgagctcgggccatcccgacacccagagcggagtcacccccttggctccccagacagccaacacctggtgaaggagaatgcggtgacaatggagagaacccccaggttcagtaagctgccttcgtctggctcactacacctagctgtggggagatctcctcgtcagtcacctcagcctttggcgcacagaagggtccagggtcccctggctcagaggctaacactggccgaagagaaaggcaatttcaggttggggtgactgtggcaggaacggggctcactctggccccaccaaggtgaggtggggacccaacgtgatagagccctgatccacccactctctgaaacttctttgctaataaaacattcctactacgcttgtgttttgtttggggtagaaggtgcaatcgaacaaacacgaaccccccgcctcaaaaaaggaaaagcttcgtttggcaagaccgcacggcccaggatttccagagtgcggaggatcggtgaaccgccctgggagcccactcaagaaacctggagaaaccctagtcgtataacccagaacaagaacctgagttaacttgaaaacacaaacgcttttattttaaaggagcatctcaagttacgtgtggcggacaaaaaaaaaggagcagactgtgacagacccattccccatcggcccaagtggtcgaacccgacatccaagacccagcgagcagccaagctcagcgcaacctccgggctttctcgctctgactccaaaagggtgagcacgtcgccctcgcgcacggggccttttacattgcggatgatggatcggctcgtgtcgtccatggaattccacggcgcacctacgggtccccaccggagtggaggaagaagtaagggcgggccgcggaaaggcaccgcggagtgggaagcagatatgaattcagagaacgtgtcggggccagaatacagatcgttaaagggaaccatcagaaccccgtgatgaaatgagaatcggctcccggattccggctggcaggggttagggcagggtagaggtcacatcagggtttaggtcgccggcagtcggccaaatgcccccacccgattacctgcatgcactgtccctgagaaccggtcctgcccaggaccttggtgaccctacgaaa

SEQ ID NO: 154417 - DNA, 400 bp, Homo sapiens; identical to SEQ ID NO: 120956

SEQ ID NO: 154418 - DNA, 2638 bp, Homo sapiens
ttcccgcgccgcggagcccggcccgagagccgcgtccacgttcctgcctcctgctcccgccgccctggggcgccgccatgacgcccgatctgctcaacttcaagaagggatggatgtcgatcttggacgagcctggagagcctccctccccctcgctcaccaccacctatacttcgcagtggaagaaacattggcttgtgctgacagattcaagtctcacatattacagagactccactgcctgaggaggcagatgagctggatggtgagatcgacctgcgttcctgcacggatgtcactgagtacgcggtgcagcgcaactatggcttccagatccacaccaaggatgctgtctataccttgtcggccatgacctcaggcatccggcggaactggatcgaggctctgagaaagaccgtacgtccaacttcagccccagatgtcaccaagctctcggactctaacaaggagaacgcgctgcacagctacagcacccagaagggccccctgaaggcaggggagcagcgggcgggctctgaggtcatcagccggggtggccctcggaaggcggacgggcagcgtcaggccttggactacgtggagctctcgccgctgacccaggcttccccgcagcgggcccgcaccccagcccgcactcctgaccgcctggccaagcatgaggagctggagcgggacctggcccagcgctccgaggagcggcgcaagtggtttgaggccacagacagcaggaccccagaggtgcctgctggtgaggggccgcgccggggcctgggtgcccccctgactgaggaccagcataaccggcttagtgaggagatcgagaagaagtggcaggagctggagaagctgcccctgcgggagaataagcgggtgcccctcactgccctgctcaaccaaagccgcggagagcgccgagggcccccaagtgacggccacgaggcactggagaaggaggttcaggctcttcgggcccagctggaggcgtggcgtctccaaggggaggctcctcagagtgcactgagatcccaggaggatggccacatccccccgggctacatctcacaggagacatgtgagcgcagcctggcagagatggagtcctcgcaccagcaggtgatggaggagctgcagcggcaccacgagcgggagctgcagcgcctgcagcaggagaaggagtggctcctggctgaggagacggcagccacggcctcagccattgaagccatgaagaaggcctaccaggaagagctgagccgagagctgagcaaaacacggagtctccagcagggcccggatggcctccggaagcagcaccagtcagatgtggaggcactgaagcgagagctgcaggtgctatcggagcagtactcgcagaagtgcctggagattggggcactcatgcggcaggctgaggagcgcgagcacacgctgcgccgctgccagcaggagggccaggagctgctgcgccacaaccaggagctgcatgggccgcctgtcagaggagatagaccagctgcgcggcttcattgcctcgcagggcatgggcaatggctgcgggcgcagcaacgagcggagttcctgcgagctagaggtgctgcttcgcgtaaaagaaaacgaactccagtacctaaagaaggaggtgcagtgcctccgggacgagctccagatgatgcagaaggacaagcgcttcacctcgggaaagtaccaggacgttctatgtggagctgagccaccatcaagaccacggctctgagcgggagattcgagcagctgaaggagcacctgcgtcttgccatggccggccctccaggagaaggagtcgatgcgcaaacagcctggctgaagtagaggtcccgcccagctgcagaccctccaaggctggaggaccagccgccctccttccctccctggatggaagtaaaaagccaagctttctccccaccctctgttgggccacacgtgcacttgcacccaccacacacacacacacacacacacacacacacacagacacacagacacatacgcacacacgtgcacacatgtacacacggatacacacacacacacacacacacacacactgcatatctgatgcgcgcccctcgcactggggtctcaccttgcaccttcttcaggattttatatgtgaagagatttttatatagatttttttcctttttttccaaaacactttatactttaaaaaaaaaaaaaaaaaaagcaattcctggtggctgtgtgcctccaaccctggtccccctctgtctccagccaccgctgtgcttgggcttctgagctggtggccctggcccagaggtctggcggaggcccaggcagcaagccatggcggcggtgtctctacaggggagaggcgggagcctgccaccctcttcctgccctacctcctactaacacttcctgccccatttggacccgtaccatggggctcaggacagagggagctagcagctgggcctccatggccccacagcctccttcgaggctgtgcttgggtgcagaaccgccagaagccacccaaaaggtgtttctcttctgctccctgaacctcttaacttaataaaacgttccagcagcaaaaaaaaaaaaaaaaaag

SEQ ID NO: 154419 - DNA, 776 bp, Homo sapiens
  misc_feature (1)...(776): n = a,t,c or g
gcggccgcggccaatcggagccgctcttgctgcgacgcagcggtgcggttagcggagcaaggtcgaggccgggttggcgccggagccggggccgcttggagctcgtgtggggtctccggtaccagggcgcggcatgggcgtcctggccgcagcggcgcgcatncatcggtccggggtgcggaccgaatgagcaagtggacgagcaagcggggcccgcgcagcttcaggggccgcaagggcccggggcgccaagggcaatcggctttcctcaccttcggcttggaggttcgtgcaagatcaaaggagatggtcccggagttcgtcgtcccggatctgaccggctttcaagctcaagccctacgtgagctacctcgcccctgagagcgaggagacgcccctgacaggtcgcgcagctttttcagcgaaagccgtgggcgcctgcccatcgaaaaggacttccaggaccggtaccttctgaccctgacaaccttggaaaagtaccgcttccgacccaacacaaggagggaaaagctcttccagctctaccccaggaacttcctgcgctagctgggcgggagaggagcgagcctgcccatcatctcatttctattaaacgcctttgccagctnnnnnnannnnnnnnnnnnnnnnnggggggggccgtttaaaagaaccaaagttaacgaccccgggctggcaaggtaaaagttttttaatggggcccccaaaatcaattcccggggccgcggtttaacaacgccgggactggagaaaag

SEQ ID NO: 154420 - DNA, 620 bp, Homo sapiens
  misc_feature (1)...(620): n = a,t,c or g
tgctcctttcactggaggagccgctgctcacgtcatcatcagtagggtacatcttttacaccttttctactgtacaccccatcccagacgaagacagtccctggatcaccgacagcacagacagaatccctgctaccacagcctcagctcataccagccatccaatgcaaggaaggacaacaccaagcccagaggacagttcctggactgatttcttcaacccaatctcacaccccatgggacgaggtcatcaagcaggaacgaaggatggatatggactccaagtcatagtacaacgcttcagcctactgcaaatccaaacacaggtttggtggaagatttggacaggacaggacctctttcaatgacaacgcagcagagtaattctcagagcttctctacatcacatgaaggcttggaagaagattaaagaccatccaacaacttctactctgacatcnagcaatagggatgatgtcacaggtggaagaagngacccaaatcattctgaanggtcaactactttacttggaaggttatacctctcattnnccacacacgaagggaagcaggancttnatnccagtgactcagctaanntggggccttttgngttnctg

SEQ ID NO: 154421 - DNA, 403 bp, Homo sapiens
  misc_feature (1)...(403): n = a,t,c or g
agacacctcagtttttctggatcaggcattgatgatgatgaagattttatctccagcaccaatatggactccagtcatagtacaacgcttcancctactgcaaatccaaacacaggtttggtggaagatttggacaggacaggacctctttcaatgacaacgcagcagagtaattctcagagcttctctacatcacatgaaggcttggaagaagataaagaccatccaacaacttctactctgacatcaagcaataggaatgatggtcacaggtggaagaagagacccaaatcattctgaaggctcaactactttacttggaaggttatacctctcattacccacacacgaaggaaagcaggaccttcatcccagtgacctcagctaagactgggtcctttgg

SEQ ID NO: 154422 - DNA, 530 bp, Homo sapiens
gacacatattgcttcaatgcttcagctccacctgaagaagattgtacatcagtcacaggacctctttcaatgacaacgcagcagagtaattctcagagcttctctacatcacatgaaggcttggaagaagataaagaccatccaacaactcctactctgacatcaagcaataggaatgatgtcacaggtggaagaagagacccaaatcattctgaaggctcaactactttactggaaggttatacctctcattacccacacacgaaggaaagcaggaccttcatcccagtgacctcagctaagactgggtcctttggagttactgcagttactgttggagattccaactctaatgtcaatcgttccttatcaggagaccaagacacattccaccccagtggggggtcccataccactcatggatctgaatcagatggacactcacatgggagtcaagaaggtggagcaaacacaacctctggtcctataaggacaccccaaattccagaatggctgatcatcttggcatc

SEQ ID NO: 154423 - DNA, 484 bp, Homo sapiens
ccgttcgctccggacaccatggacaagttttggtggcacgcagcctggggactctgcctcgtgccgctgagcctggcgcagatcgatttgaatataacctgccgctttgcaggtgtattccacgtggagaaaaatggtcgctacagcatctctcggacggaggccgctgacctctgcaaggctttcaatagcaccttgcccacaatggcccagatggagaaagctctgagcatcggatttgagacctgcagtttgcattgcagtcaacagtcgaagaaggtgtgggcagaagaaaaagctagtgatcaacagtggcaatggagctgtggaggacagaaagccaagtggactcaacggagaggccagcaagtctcaggaaatggtgcatttggtgaacaaggagtcgtcagaaactccagaccagtttatgacagctgatgagacaaggaacctgcagaatgtggacatgaagattggggtgtaa

SEQ ID NO: 154424 - DNA, 1010 bp, Homo sapiens
acgagaaagtgcggccaacttccgaggcaggctcattgcccagcggaccccagcctctgtcaggtttcgggcgtcattctcgatccgtcctccgtcggcccctgccccgcgcccagggatcctccagcttctttcgtccgcgcactccgttcgctccggacaccatggacaagatttggtggtacgcagcctggggactctgccttgtgccgctgagcctggcgcagatcggtgagtgcccgccgcagcctgggcagcaagatgggtgcggggtgctcagcgcggacccggcggcagcccctccggctgagtcggccctgggggactggagtcaacctcagagcagagagaagagccttgataccagggcaacatcagggaccctggagctagggctccaatatctcatccaaacagggtcagtgctttgtggtggctatggaggggaggggctgcgttctctggtatgcttttatcagcagcatgaaaacgaattaatgcacttggtaacatgccaattacttgaccaagggaagggctgtcaagcagggacgtttaagcctgcagaagctgtctgctgccttttgttcagatatgccctgcccccagaggtggaatctagagaggcagtaggccttgttgagctatggtcgatctcagactgctgtgctagcagcgagcaaggctctgtgggcatgggacttaccaaaccaggcacgggaagggatctcctggtctgctggttgggaagactgggaaaagcgcagtatttgggcgagagtgtaccactcctccagatacatcttctcacaggtaattgggcagaaaaatgcttattgactgatcttgaaaacttcaatgcatctaaagctggagaacattcaaaaaccatgcttctctttatttatttcagtttccatggcaagaggaaaataaaaggcaactgttttgaaagcaacaacagtaaacgaagcaacatctctggcaagcaggcaaaccttaaagagtaa

SEQ ID NO: 154425 - DNA, 2265 bp, Homo sapiens
atggacaagttttggtggcacgcagcctggggactctgcctcgtgccgctgagcctggcgcagatcgatttgaatataacctgccgctttgcaggtgtattccacgtggagaaaaatggtcgctacagcatctctcggacggaggccgctgacctctgcaaggctttcaatagcaccttgcccacaatggcccagatggagaaagctctgagcatcggatttgagacctgcaggtatgggttcatagaagggcatgtggtgattccccggatccaccccaactccatctgtgcagcaaacaacacaggggtgtacatcctcacatacaacacctcccagtatgacacatattgcttcaatgcttcagctccacctgaagaagattgtacatcagtcacagacctgcccaatgcctttgatggaccaattaccataactattgttaaccgtgatggcacccgctatgtccagaaaggagaatacagaacgaatcctgaagacatctaccccagcaaccctactgatgatgacgtgagcagcggctcctccagtgaaaggagcagcacttcaggaggttacatcttttacaccttttctactgtacaccccatcccagacgaagacagtccctggatcaccgacagcacagacagaatccctgctaccactttgatgagcactagtgctacagcaactgagacagcaaccaagaggcaagaagcctgggattggttttcatggttgtttctaccatcagagtcaaagaatcatcttcacacaacaacacaaatggctggtacgtcttcaaataccatctcagcaggctgggagccaaatgaagaaaatgaagatgaaagagacagacacctcagtttttctggatcaggcattgatgatgatgaagattttatctccagcaccatttcaaccacaccacgggcctttgaccacacaaaacagaaccaggactggacccagtggaacccaagccattcaaatccggaagtgctacttcagacaaccacaaggatgactgatgtagacagaaatggcaccactgcttatgaaggaaactggaacccagaagcacaccctcccctcattcaccatgagcatcatgaggaagaagagaccccacattctacaagcacaatccaggcaactcctagtagtacaacggaagaaacagctacccagaaggaacagtggtttggcaacagatggcatgagggatatcgccaaacacccagagaagactcccattcgacaacagggacagctgcagcctcagctcataccagccatccaatgcaaggaaggacaacaccaagcccagaggacagttcctggactgatttcttcaacccaatctcacaccccatgggacgaggtcatcaagcaggaagaaggatggatatggactccagtcatagtacaacgcttcagcctactgcaaatccaaacacaggtttggtggaaaatttggacaggacaggacctctttcaatgacaacgcagcagagtaattctcagagcttctctacatcacatgaaggcttggaagaagataaagaccatccaacaacttctactctgacatcaagcaataggaatgatgtcacaggtggaagaagagacccaaatcattctgaaggctcaactactttactggaaggttatacctctcattacccacacacgaaggaaagcaggaccttcatcccagtgacctcagctaagactgggtcctttggagttactgcagttactgttggagattccaactctaatgtcaatcgttccttatcaggagaccaagacacattccaccccagtggggggtcccataccactcatggatctgaatcagatggacactcacatgggagtcaagaaggtggagcaaacacaacctctggtcctataaggacaccccaaattccagaatggctgatcatcttggcatccctcttggccttggctttgattcttgcagtttgcattgcagtcaacagtcgaagaaggtgtgggcagaagaaaaagctagtgatcaacagtggcaatggagctgtggaggacagaaagccaagtggactcaacggagaggccagcaagtctcaggaaatggtgcatttggtgaacaaggagtcgtcagaaactccagaccagtttatgacagctgatgagacaaggaacctgcagaatgtggacatgaagattggggtgtaacacctacaccattatcttggaaagaaacaaccgttg

SEQ ID NO: 154426 - DNA, 1738 bp, Homo sapiens
ccagcctctgccaggttcggtccgccatcctcgtcccgtcctccgccggcccctgccccgcgcccagggatcctccagctcctttcgcccgcgccctccgttcgctccggacaccatggacaagttttggtggcacgcagcctggggactctgcctcgtgccgctgagcctggcgcagatcgatttgaatataacctgccgctttgcaggtgtattccacgtggagaaaaatggtcgctacagcatctctcggacggaggccgctgacctctgcaaggctttcaatagcaccttgcccacaatggcccagatggagaaagctctgagcatcggatttgagacctgcaggtatgggttcatagaagggcacgtggtgattccccggatccaccccaactccatctgtgcagcaaacaacacaggggtgtacatcctcacatccaacacctcccagtatgacacatattgcttcaatgcttcagctccacctgaagaagattgtacatcagtcacagacctgcccaatgcctttgatggaccaattaccataactattgttaaccgtgatggcacccgctatgtccagaaaggagaatacagaacgaatcctgaagacatctaccccagcaaccctactgatgatgacgtgagcagcggctcctccagtgaaagggagcagcacttcaggaggttacatcttttacaccttttctactgtacaccccatcccagacgaagacagtccctggatcaccgacagcacagacagaatccctgctaccaatatggactccagtcatagtacaacgcttcagcctactgcaaatccaaacacaggtttggtggaagatttggacaggacaggacctctttcaatgacaacgcagcagagtaattctcagagcttctctacatcacatgaaggcttggaagaagataaagaccatccaacaacttctactctgacatcaagcaataggaatgatgtcacaggtggaagaagagacccaaatcattctgaaggctcaactactttactggaaggttatacctctcattacccacacacgaaggaaagcaggaccttcatcccagtgacctcagctaagactgggtcctttggagttactgcagttactgttggagattccaactctaatgtcaatcgttccttatcaggagaccaagacacattccaccccagtggggggtcccataccactcatggatctgaatcagatggacactcacatgggagtcaagaaggtggagcaaacacaacctctggtcctataaggacaccccaaattccagaatggctgatcatcttggcatccctcttggccttggctttgattcttgcagtttgcattgcagtcaacagtcgaagaaggtgtgggcagaagaaaaagctagtgatcaacagtggcaatggagctgtggaggacagaaagccaagtggactcaacggagaggccagcaagtctcaggaaatggtgcatttggtgaacaaggagtcgtcagaaactccagaccagtttatgacagctgatgagacaaggaacctgcagaatgtggacatgaagattggggtgtaacacctacaccattatcttggaaagaaacaaccgttggaaacataaccattacagggagctgggacacttaacagatgcaatgtgctactgattgtttcattgcgaatcttttttagcataaaattttctactctttttaa

SEQ ID NO: 154427 - DNA, 2770 bp, Homo sapiens
cgagaactgcacgagactgttgatgacgtgagcagcggctcctccagtgaaaggagcagcacttcaggaggttacatcttttacaccttttctactgtgcagcaaacaacacaggggtgtacatcctcacatccaacacctcccagtatgacacatattgcttcaatgcttcagctccacctgaagaagattgtacatcagtcacagacctgcaggtatgggttcatagaagggcacgtggtgattccccggatccaccccaactccgttcgctccggacaccatggacaagttttggtggcacgcagcctggggactctgcctcgtgccgctgagcctggcgcagatcgatttgaatataacctgccgctttgcaggtgtattccacgtggagaaaaatggtcgctacagcatctctcggacggaggccgctgacctctgcaaggctttcaatagcaccttgcccacaatggccccagatggagaaagctctgagcatcggatttgagacctgcaggtatgggttcatagaagggcatgtggtgattccccggatccaccccaactccatctgtgcagcaaacaacacaggggtgtacatcctcacatacaacacctcccagtatgacacatattgcttcaatgcttcagctccacctgaagaagattgtacatcagtcacagacctgcccaatgcctttgatggaccaattaccataactattgttaaccgtgatggcacccgctatgtccagaaaggagaatacagaacgaatcctgaagacatctaccccagccaaccctactggatgatgacgtgagcagcggctcctccagtgaaaagggagagcactttcaggaggttacatcttttacaccttttctactggtacaccccatcccagacgaagacagtccctggatcaccgacagcacagacagaatccctgctaccagagaccaagacacatttccaccccagtgggggttcccattaccacttcatggatctgaattcagatgggacactcacatgggaagtcaaggaaggtgggagcaaacacaacctcttggtcctataagggacaccccaaattcccagaatgggctgattcatcttgggcatcccctcttggcccttggcctttgattccttgccagtttgccattgccagtccaacagttcgaagaaagttttgggccagaagcaaaaagcttagtgatccaaccagtgccaatggagcttgtggaggacagaaagccaagttggactcaacggagaggcccagcaagtctcaggaaatggtgcatttggtgaacaaggagtcgtcagaaactccagacccagtttatgacagctgatgagacaaggaacctgcagaatggtggacatgaagagttggggtgtaacacctacaccatttatcttggaaaagaaacaaccggtggaaaacatacccattacagggaagctgggacacttaacagatgcaatgtgctactgattgtttcattgcgaatcttttttagcataaaattttctactctttttgttttttgtggtttgttctttaaagtcaggtccaatttgtaaaaacagcattgcttcctgaatttcggcccccattaataatcgccaagaattggatcgtttccagttcccacttggaggcctttccatcccctcggggtgtgctatgggatggcttcctaaacaaaaacttacacatatggtagtccctggattcgcccaaccttttccccccaccagctaagggccatttcccaggggttaatagggcctggtccctgggaggaaatttgaatgggtccattttgcccttccatagcctaatccctgggcattgctttccactgagggtggggggttggggtgtactagttacacatctttcaacagaccccctccaagaaattttttcagatggcttttggggagacacccaaagggtgaagctatttatctgtagtaaactatttatctgtgtttttgaaatattaaaccctggatcagtcctttgtatcagtataaattttttaaagttacttttgtcagaggcacaaaagggtttaaactgattcataataaatatctgtacttcttcgatcttcaccttttgtgctgtgattcttcagtttctaaaccagcactgtctgggtccctacaatgtatcaggaagagctgagaatggtaaggagactcttctaagtcttcatctcagagaccctgagttcccactcagacccactcagccaaatctcatggaagaccaaggagggcagcactgtttttgttttttgttttttgttttttttttttgacactgtccaaaggttttccatcctgtcctggaatcagagttggaagctgaggagcttcagcctcttttatggtttaatggccacctgttctctcctgtgaaaggctttgcaaagtcacattaagtttgcatgacctgttatccctggggccctatttcatagaggctggccctattagtgatttccaaaaacaatatggaagtgccttttgatgtcttacaataagagaagaagccaatggaaatgaaagagattggcaaaggggaaggatgaatgccatgtagatcctgtttgacatttttatgggctgtatttgtaaacttaaacacaccagtgtctgttcttgatgcagttgctatttaggatgagttaagtgcctggggagtccctcaaaaggttaaagggattcccatcattggaatcttat

SEQ ID NO: 154428 - DNA, 1439 bp, Homo sapiens
atgccggtccgggcgaggttgcaggagatgggcgcgattccggcgggccggcgggtgggcggcgatgctggctcaattggagtggctctgggaaatcactccggaaagggaacccttcggtatcgatttattgtttttgtcttccaaaccattatctctttgaccgaaatactgtctgagaagttccgcagggacaaagtcagggtcctatcctccacaaatcagttccctgatgctgatactggttcctccatgtgtcccacagcagactcacccaggactggacttgaaaacccaaaagctttccttgctgtctgcccttatctaaccactgaagccttgtgttctgttctttcccctccaggcttggtttccagatttccaagaatacagccagctactctgcccccagacgtggctgtgatggacagcagctgcaggttggaagtgggcgcgtccagatacccaccacatggtgtaattgccctttgtgaaattctgggtgctgggattatggcattagccaccgcccttatccaggtgagtcattcttttgtggaacccctgaatcatagagaaagccaattggctgtgcaggttgctttcctggacataacaacagctgccattttgctacttagaggagctgagaactttgccaagcacttgacacacattgctaccgaatcttccccacaaccgcaatgtgatgttactatccccattttacagatgactcaaatgtggcatagagagctccaggaaattgccctgggtctcagaggcagccaggaggttgtgataccagtgccacaccctctgagctccaaggcagccaccgtggctcctcatgcggtgctcaggcagctgaacccaaggctggaatcagagtttctcacctctgactctgccttctggaaaaccagcagagagacccctcctcacccacgtgtaaacgaaattgctacaaccattaaaggtcaagagagaaatgtgcttctcaggacatgccaggaaaagggaagaaccctagaccaatctctccttgctgaaaactgtgttaccaaaaggctcccctttcatgtctcccattttaagctcctctacacagagtcactctcagcaagttccccagcacccctgcaaccgttccttctccctgattcaaagccctgtgagcacccctgctacttacagaattaaatccaaactcgtttatttgacattcattgctctctgcaatttaatgccaacctctcttcccatcaacaacacctaagaaacttttttcctatccatactttgtgtgtttgctctttgtgtaaggaggaaataagtgcatgatttatttggcttctcaaaagcagattgtgaatgctcaggacggaatacaagagtctttccctaggcatatgatgacggtctagaccaagacaaat

SEQ ID NO: 154429 - DNA, 919 bp, Homo sapiens
  misc_feature (1)...(919): n = a,t,c or g
ccactgaagcgctcagatggctgtaacgacggccgacccacgcgtccgcccacgcgttcgcacaactgtgttcactagcatcgctcatacagacaccatggtgcacctgactcctgtggagagagtctgccgttactgccctgtgggcaaagcgtgaacgtgaatgaagttggtggtgaggcccctgggcaaggctgctgggtggtcctacccctgggacccccaaaaggtcctttgaaaccctttgggggaatctgtcccaactccctgaatgctggttaaatggggcaaaccccctaaaggtgaaaaggctcaatggcaaaagaaaaagtgctcgggtgccctttaagtgaatggcccctggcctnacccctggaaaaccctcaaggggcaccctttgccccacactgaagtgaagctgcacctgtgaacaagctgccaccgtggatccctgaagaacttgcaggctcctgggggcaacagtgcctggtctgtgttgctgggcccattcacttttgggcaaagaatttcacccccacccagtgcaggctgccctatcagaaagtggttggctggtgtggctaatgccctgggcccacaagtatcactaagctcgctttcttgctgtccaatttctatttaaaggttcctttgtttccctaagttccaacttattaaactggggggatattattgaagggccttgagcatctgggattcttgcctaattaaaaaacatttattttcattgcnnnnnnnnnnnnnnggggcggccgttttaaagaaccaaagttaacgaacccgggcaggcaaggaaaaagtttttttatggggcccccaaaattaattccctggcccgcggtttaaaaacgcgggaacgggaaaaacccgggggttacccaattaaatgccctgtgag

SEQ ID NO: 154430 - DNA, 1383 bp, Homo sapiens
ttacttgctgggtcctacggagcaaattaacatcattccttgaaccctagtttctatgtctgtaaaatactgagtaagtttgccaagacgaaaacaggagacaaactgagaaattactggctgttcaattttatgtcgagagatggaatcgtatttacctttttcgtctttggtccggaatgcaaatgcattgcacaggagcagaatgactggatttgtttctgcgacaaaaaagggcaaacaaaacactaacagctttgcttgcaggttttcctggcagctcaccctccaggcacagttctccaaaatgcagcaaacttggtctgtttgtttcaatactaaaataatgtagagattatttggggtatttttctttcctgccctgtcaaaattctgtacactgacgacacgtgttgtttcttttgaagaacggggcgaatgatgtgaaacaccatcggtggttccgctccgtggactggaaagctgttccgcagagaaaactaagcagaccagaagcaaaatgtcttcttcacggcctgaggacatttccagttttctctgtacctcaaatatggcattgctcaaatctgctgtgtatgaggtcacagggcccagctgtggcaggggtgagtgcattgaagaagtaggttttggagccttccaggaattccatcctgttgggattaacagttgagggccatcgctgcctaaacatttagcgtgcggtttcccatcagttttactgtgaatgtgaaaaggtgaaactgttgctgacttcggcagcaggtatacttgttgccaacgtgcttctggggcccctgtgactgctgccggatgcaaacagatgaaggctatccctaaacctttggggcaagaccatccatgtaagttgggacatgtggtctgtgggatcctcaaaggcaaagagaaactgagagagtgcagcggaatacagaaaaaggcatcttggaggtcccgaacagtgaaccattctgtttcctctggtatttgagagatgagggtataggggttgggtataactggatatagaggaattactgcctcattgatgagtctaagctcttgcactagtctccactgaccatttggtttttgaactcctagaattggggtgttgcaaggactgctgcatttccttactaagccttgagcttttaaatgtttaacaatatcctgtaatcctttatgagcttcaggccttaagacatattgccattgataaggaaaagtgatgggaacttttagcctgatttggactgggagggcattttttgcccttccaaattgtccttccaatccccagacttcagggttgattccctcctcaagtagggcacagcaaatgggtaacttgttccccat

SEQ ID NO: 154431 - DNA, 606 bp, Homo sapiens
ttacttgctgggtcctacggagcaaattaacatcattccttgaaccctagtttctatgtctgtaaaatactgagtaagtttgccaagacgaaaacaggagacaaactgagaaattactggctgttcaattttatgtcgagagatggaatcgtatttacctttttcgtctttggtccggaatgcaaatgcattgcacaggagcagaatgactggatttgtttctgcgacaaaaaagggcaaacaaaacactaacagctttgcttgcaggttttcctggcagctcaccctccaggcacagttctccaaaatgcagcaaacttggtctgtttgtttcaatactaaaataatgtagagattatttggggtatttttctttcctgccctgtcaaaattctgtacactgacgacacgtgttgtttcttttgaagaacggggcgaatgatgtgaaacaccatcggtggttccgctccgtggactggaaagctgttccgcagagaaaactgaagcctcccatcgtgcccaagatagctggtgacggcgacacttccaacttcgaaacttaccctgagaatgactgggacacagccgcgcccgtgccgcagaaag

SEQ ID NO: 154432 - DNA, 852 bp, Homo sapiens
atggcagaaggcactgggacgttcgggcgggtgcacctggtgaaggagaagacagccaagcatttcttcgccctcaaggtgatgagcattcccgacgtcatccgcctaaagcaggagcaacacgtacacaatgagaagtctgtcctgaaggaagtcagccacccgttcctcatcaggctgttctggacgtggcatgacgagcgcttcctctacatgctcatggagtacgtgccgggcggcgagctcttcagctacctgcgcaaccgggggcgcttctccagcaccacggggctcttctactctgcagagatcatctgtgccatcgagtacctgcactccaaagagatcgtctacagggacttgaagccagagaacatcctgctggatagggatggccacattaagctcacggactttgggttcgccaagaagctggtagacaggacttggaccctctgtggaacacccgagtacctagcccccgaagtcattcagagcaagggccacggaagggccgtggactggtgggccctcggcatcctgatattcgagatgctttcgggcctgaatcaatcaatagactgtgatctgtgtcaacccatcagaattcaacaagcatcaactagtcagaactcggtaagtgtcaaccagttagaacccaacaagtgtcaaacagtcagagctcatcgggggtcgacccatcagaactcaacaagtgttgactcatcagaacccaagtgccaaactcatcagaactcaacaagtgcccaccagtcagaacccaataagtgtcaacccatcagaactcaacaagtgtccgcctatcagaactcaatgagcatcagcccatga

SEQ ID NO: 154433 - DNA, 1891 bp, Homo sapiens
cccacaacagtccccagagtgtgatgttccccttcctgtgtccgtgtgttctcattggtcaattcccacctctcaccggctcctccgagtgctggttacagtcgaatgtgagctgtatgtcaggtggccccgttgcaatgctgacttgacttgcaccaaggcagtacagaatggatgggatttgctaaaggtgcccacctgcctccaccttttgctggcagttccaggtgttggactttttattgatgaaggtgtaaagcaaggattttcagtggagacattcagggacacacgtggagttttggtacatggatgtatcatgtcatgcctgtgcaacaacagagtgagaccctatctaggaaaaaaacagaaaagtaagaaaacaacagatgttggtgtggaagtggaggaaagtggccgtggatgcgctgctggtgcggaggaggtcttccagtgcatgcagcaggggagccactcagctgctgaggggcaggaatctagcagcaaggtggagagcggaaggcattcctacaacctgtatttgtgggtcattagtccccgaactccagcatccttgcagaatctgcaaattttaaagtgcatcaggttctggacgtggcatgaggagcgcttcctctacatgctcatggagtatgtgccgggtggcgagctcttcagctacctgcgcaaccgggggcacttctccagcaccacggggctcttctactctgcggagatcatctgtgccattgagtacctgcactccaaggagatcgtctacagggatttgaagccggagaacatcctgctggatagggatggtcacatcaagctcacggactttgggtttgccaagaagctgggcttacagattaatgtggaaaagtctcttgtcggaaaagaggtgggtatggagatgtggtggagaagcgaaggaaagataacagtaacaacaatttgggtgggttcctgcaagcaggaaggtgaggagctgaagccaagatacgtgcccacaccaccgcaaacagggcagactcaggacttggaccctctgtggaacacccgagtacctagcccccgaagtcattcagagcaagggccacggaagggccgtggactggtgggccctcggcatcctgatattcgagatgctttcggggtgggttttgtaagagtggcaagcctcgccaaccccaactctccccaggcatttctgggctctccctccactctcgctggcctgagctcttgccttgacggagatgcaggatacagctttctcacagtctcctgcatctcctgcctgcagtaccttttcgttgaagcagctgcagcccgtgtctgcacctttcctatcgcagctcgatttgctggattcccactcttagcaggatcaagcatttccaaagcacgtgtcttccaatgccagccctggtcttcagaactggggcagctgaatgtattgacacagggtcgccccccaaacccagagagaaacaggaatgcgactcccctaactactgttagaacgctgcgggcagtgtattggacagttcacatgtgtagttcgacgtatgaatgtcctgacgctgcagttagaaactatcacagactggaaggtttaaacaagagaactttatcctctcttagtcctggagaccagaaatttgagatcaaagtatctcaggactgtgctccaaggaaggatcctttctgcctctgccagctcctggggctccaggcatccctggacttgtggccgcatcactacagtctctgcctctgtccccatgtggccttctcctctgtgtgtgtgcctcctcttcagtcccttatgacaatacttgtcattggatttggacctaccctattccaggatgatttcgtctga

SEQ ID NO: 154434 - DNA, 7268 bp, Homo sapiens
gcacgcggccaccgagctggaggaagcggcgggcgtgagaccgggaatgcttgggcccccgccttcctcgcagccatccagcactcggtgcacgccccgcgaggccagcggctgctccctcccggggctattgctgctagtgccgtgagcaccgcccagccattgtctctgtgtctccgtcagccgtgccgagccgcgcacccagaggcgagggcgcgcatggggagcctccgttgatgctgccgcggctgccgcgccgccctccgaggctgcgtcccggggagtccggcttcccgagcgctccggcctggcccggcgccccggacctgagtgcctccccatggaggcgcccgggccggcccaggcggccgcggcggagagcaactcccgagaggtgacggaggatgccgccgactgggcgcccgcgctctgccccagccccgaggcgcggtcgccggaggcvcctgcctaccgcctgcaggactgcgacgcgctggtcaccatgggcactgggacgttcgggcgggtgcacctggtgaaggagaagacagccaagcatttcttcgccctcaaggtgatgagcattcccgacgtcatccgccggaagcaggagcagcacgtgcacaatgagaagtctgtcctgaaggaagtcagccacccgttcctcatcaggctgttctggacgtggcatgaggagcgcttcctctacatgctcatggagtatgtgccgggtggcgagctcttcagctacctgcgcaaccgggggcacttctccagcaccacggggctcttctactctgcggagatcatctgtgccattgagtacctgcactccaaggagatcgtctacagggatttgaagccggagaacatcctgctggatagggatggtcacatcaagctcacggactttgggtttgccaagaagctggtagacaggacttggaccctctgtggaacacccgagtacctagcccccgaagtcattcagagcaagggccacggaagggccgtggactggtgggccctcggcatcctgatattcgagatgctttcggggtttcctccattttttgatgacaacccgtttggcatttatcagaaaattcttgcaggcaaactatatttccccagacatttggatttccatgtaaaaacggggcgaatgatgtgaaccaccatcggtggttccgctccgtggactggaaagctgttccgcagagaaaactgaagcctcccatcgtgcccacgatagctggcaacggcgacacttccaacttcgaaacttaccctgagcatgactgggacacagccgcgcccgtgccgcagaaggatttagaaatcttcaagaatttctgaggacgagctcacatctggaagaaacaggaagattggaatctgcctggaacaaagaactgcacctaagcagaccagaagcaaaatgtcttcttcacggcctgaggacatttccagttttctctgtacctgtgtgtatagaaatagatcagagcacagttgaaattcatggaactggcattatttaagcaaccagaattccacactgtaggaaggttttgaaaattgtttcgttatagattttatcttatcttttggtgttgtcttggtttttctcatagactttataagtttgaactggacttatttgattataaccacaaattgtgtgtgtgtgtgtgtgtgtatatatagaagtcattatggcagatgcacaaattgtgcagtgatgtaaatatacatacttcacagagcctattatttttatttttcaattcagtttctcaaattatcttcccttctcttggggacaacatctgaagggtatgttgcatgcatttttaaaaaaatcatctcatatgcattgtatagtttgggggaataagatatccgggggccgggggtgtctacattcagtatctttagttcttcctacctagtaacttgrgactttaaaagargaaacatggagaagatgtgggagcgaatttattgcaggaatccacaatgactttgaagttgttggagcaatgcattgtattcagaaaacctgtgtcacattaaaaaatttcatctaggctaggtgcagtggcttgttcctgtagtcccagcactctgggaacctgggttgggaggattgcttaaggccaggagtttgagaccagcttgggcaacatagtgaaccctgtctgtatggaatttacacaaattataaaaattagtcgggtgtcattgtgcatacctgtagtcccagctattcaggagctgttgtaggagagattgcctgagctcaagaggttgaggctgcagtgagccctgattgtgccagtgcactccaggctggacgacagagcaagaccctgtattaaaaaaaaaattcatcctgcacagggaaatggctacctattaaagtcccagttgaaattttttgaaaaaatacacctcccacagttcacaaataacttttaagatcagctcatctataaggctgaccttcatgcagagattttatttcacctttagttttgggaaaagcgagaaacagatgatctataggatgtgagtgggtggcagagtcaaaaggaacctcacctgttcctaatttctccttttaaatattcatgttgagtgtgcctaatactctcctcgacaagtcatgctgttttatgcagaataatccaggcgtgagagtgttctcttgggaaatgactggggagacacctgaaaggagcaacccccagatgttcttccctgggtgttgatggcatgacagccatacagtgagtttgttctgaaacatctcttgctaaatgtgggtcatgctagacacagcataaactgagggtgtggggtctggctttgtacataactcattttctcccttgctttttctctggaccatcctggctggaaacttggctgtagacatctgaagagggtgcaccttttctctttactgtgactcacctcaaatatggcattgctcaaatctgctgtgtatgaggtcacagggcccagctgtggcaggggtgagtgcattgaagaagtaggttttggagccttccaggaattccttgttgacaacaggggtacactcacacagacctccaagactttcttctccacctcttctttttctcatgccctgccttcatctgtctccttctgcacccagagtaggggtggagtatacccttgccatgtgttagtgaaaatgtgtgcagtgagaagccagttgggtcccctcggctcctaatctcttctcaaaactcagtagctcaggttctctggagccatccggtgcattccttgctattggagctgtttttccaagcaatatctgggaagagatttctccctctagcacttgctacctctcttctgcacacatatcacacatcagtactgtggagagtttctgttaggaaaagccatacatttttaaaaatgtaggcaaaatgtcaagggaaatgtaatcagatttgggccagagttcgcctacagataagaaggcactggggccaggctcacacctgtaatcctaagtaacactttgggaggctggggcgagaggattgcttgagcccaggagttcaatacctgtctgggaaacacctcatctctacaaaatacaaaaaagttaactgggcatggtggagcatgcctgtagtctcagctactcaggaggctgagatgagaggatcacttgagcctgaggaggtccaggccacagtgatctgagatcacaccattgccctccagcctgggtgacagagtgagaccctgttccaaaaaaaaaaaaaaacccaaaaaacctcaatggctttttgcttttgaaggtggtatgaagagaacgtccactttaaggctttaaaagacagtgaagctggttgtagggctcacttttataatcctaggatttggggaagctgaagcagaaagattgcttgagcctgggagtttgagactggcctgggcagcatagcgagaccccatctctatataaaaaaaaagatgttaaaacagtgaaattacagaaacagaacatagccaccctgtttcatcagtgaccttttcttcacgtgacggtcaactcagtaggtgagaataattagtaggttcagcagaataaactctttacaattaataactcagtggaaaatgatgttcagatggtgaaatgtggaaatgttttagacaactctattttcagcctgtgcttctcactcaccatcctgttgggattaacagttgagggccatcgctgcctaaacatttagcgtgcggtttcccatcagttttactgtgaatgtgaaaaggtgaaactgttgctgacttcggtagcaggtatactaaaattggaatgacacagaggagattagcatggccccctgcgcgaggaagatccgcagattcatgcagcattccatatttttttaaaaaaaggttacactgtgcaccgacgtggagctagaaggaaaagcatgaagtctcatgtttgctgactataaaaataaatcatagtaataatattattgaacattctactttaaaaattattaataaaaccataaatgaaacacttgagcacactttaaaaagtacataaacccatgagtccatatgtgtaattttatgttgtctgttttattatccaggatttcatactcagatgagcattagcatcaggaaagcctgaaatgccttaattgtgaactgatacgcaggaaaatgaaatatgtaagcacattggtgaccttgttctttacagacatcatgatcagcctccagccatacagaacaaatgagaaattagaagcaattccaagaacgtgtgatggtgtgaacccacttttgaccgtcacacacatttcagcatttgaagagacacaggctacctggaaactgcccatggcggggtcataatttaaatgtcccaatgtcatatagaggttaatttaatcaaaatgagctaaaacatggaacaatcactgaataatttaaaaagagtttacctggcagagtgtgtcatgcctgcaatcccagcactttgggaggccaaggcaggcagatcacctgaggtcaggagtttgagaccagcctggccaacatgatgaaacccttgtctctattaaaaacacaaaaattagccagatgtggtggcacatgcctgtaatcccagttagtcgggaggctgaggcaggagaatatggaactcaggaggcggaggctgcagtcaaccaagattgcgccactgcactccagccagggcgaaggagtgagactcccatctcaaaaaataaaaaaaaaaataaataaaaatagttgacccgggtgggcattccaaaatgttcccatagatgatcgtgaaacaatcactgtgcaaaatgtagaggaaaattcttacgataatcacaaaatttgtatcagaaaaacattacaaatttactttgctccatgtaattttatgaattggcagtattttcttaaattgggatacagtaagagaatatctttaggaaatggaaatgttaaaacaagaagtaacaagaggttgtttttctgaagggaaatgccaccggcctgctttcataggcattgataaagccaggaaggaaataaagtcacaaccgaatagtatacactgtatctactgaattcttctaattccttcacaacagaagtctaaatcctgcttagcctaaacatatctatagccagcgatgggcaaattatatttgctgtcagcatgatggaataagaaacagaaaccccccagcagtgggtaagattgcacgcttcatcccctcaaaatgcagttcagccccactccctctccatgcccatcaaacaactgcaaaatcacttgttactgaatttctcattcagcgttttgtttcttttctgtccatattcaagacctttttatttgtttgctttgaagaaaaagcaaaagcaacaaaacaccaaatcatttgaaattccaaccttaaccccccaattttaaaaaaaaattccaccagtggaactaaacagttgagtggtttgggatgtgttgttcgccatttctgtgtttgacctacatggtctctagttctttggacaattgtaactgtgaaactatggcttaacactgttaaagactccaaggctccactctgtagccaggtgcaactcaggctgcacaaataccccaccagaatgtcacaatcattcattgctccagctgctgagtgaacagagtgcaagacagcactggcttgggttttatttttgcagccagttaactttgcatcaggtctacacagtccttgcagcctttgatttctccagttgtacagatttgaaatggggtgcccgggttcctctcgtttttccttcaatctacctagcatgcattttacacacattggaggagtcgatgcactgtttttctcttgctgatggaggcaagaacgccttctaattagtataacttaaatggacgggattgacttaaaagcaagaagaaaagcacatgaacaggtgtcttaatgcatttggatactttggggtgtgtgcctgtctgtgtgtgtgtcttggtgaaggtgggctgtattttcaccaagccttttcataatcaagtttgctttgcaaaccatctgccttgcccccagcagtacagtccttcctaataacggggatgctctgtcatgtttctctgtaaattgttgtgtgttgggaagttctgttgaggcttagtttgatcttccatggtggacatgtctgttctgtatataaaaagcattacatctgtgttttagcaggtgggatttgaagcttttccacagtccttgtgctctgagatggctgttgagctctgctcagctgtcacagctgaattctttttttgtgctgaacactgggcagcctcgccttgttgccaacgtgcttctggggcccctgtgactgctgccggatgctgtgcacacaggcagagtgccttggcaggtttgtgcaccccttggcgagccagaactgggaaccccgcggagtgaccccaccttctcatggggggtcagggaggggagtgcctatttttaatcttgtttgttgcgcaatggaaatcactgtgatttgtacatatgccctaggaaaattttaccgctgtctaatttatgtaataatactgatgattctaggtttgcccaataaactttatatcttttcagaagcaaggctccactctgtagccaggtgcaactcaggctgca

SEQ ID NO: 154435 - DNA, 971 bp, Homo sapiens
atggctgcagaggttctgacagtcatggcagaaggcactgggacgttcgggcgggtgcacctggtgaaggagaagacagccaagcatttcttcgccctcaaggtgatgagcattcccgacgtcatccgccggaagcaggagcagcacgtgcacaatgagaagtctgtcctgaaggaagtcagccacccgttcctcatcaggctgtggccccgttgcaatgctgacttgacttgcaccaaggcagtacagaatggatgggatttgctaaaggtgcccacctgcctccaccttttgctggcagttccaggtgttggactttttattgatgaaggtgtaaagcaaggattttcagtggagctgacggcgtaccccctgccctgccctggcggggccctgagcgtatgctgtccctgcaggttctggacgtggcatgaggagcgcttcctctacatgctcatggagtatgtgccgggtggcgagctcttcagctacctgcgcaaccgggggcacttctccagcaccacggggctcttctactctgcggagatcatctgtgccattgagtacctgcactccaaggagatcgtctacagggatttgaagccggagaacatcctgctggatagggatggtcacatcaagctcacggactttgggtttgccaagaagctggtagacaggtaagaggaacgtgaactccgatggaatctacactgcttggcaatgagaaaggtggtggtagttgtggcaggtcaggcagggaaagattgggaaccagagtttaactctcatgtgtaggagacacttgcaaccagggatgagagagccaggttgacccacagctcgttttaggtgggctgcgattgctggcaaagagccagtgggcaggaagtcagtctccttcactggcaccgtggaggaaatcagaacaccacatatccgctattgatccgaaatgatgaggaaatgag

SEQ ID NO: 154436 - DNA, 1634 bp, Homo sapiens
atgaacatgaacatcaaaaaaattgtaaaacaagccacagttctgacttttacgactgcacttctggcaggaggagcgactcaagccttcgcgaaagaaaataaccaaaaagcatacaaagaaacgtacggcgtctctcatattacacgccatgatatgctgcagatccctaaacagcagcaaaacgaaaaataccaagtgcctcaattcgatcaatcaacgattaaaaatattgagtctgcaaaaggacttgatgtgtgggacagctggccgctgcaaaacgctgacggaacagtagctgaatacaacggctatcacgttgtgtttgctcttgcgggaagcccgaaagacgctgatgacacatcaatctacatgttttatcaaaagggcttacagattaatgtggaaaagtctcttgtcggaaaagaggtgggtatggagatgtggtggagaagcgaaggaaagataacagtaacaacaatttgggtgggttcctgcaagcaggaaggtgaggagctgaagccaagatacgtgcccacaccaccgcaaacagggcagactcaggacttggaccctctgtggaacacccgagtacctagcccccgaagtcattcagagcaagggccacggaagggccgtggactggtgggccctcggcatcctgatattcgagatgctttcggggcatttccaaagcacgtgtcttccaatgccagccctggtcttcagaactggggcaggtttcctccattttttgatgacaacccgtttggcatttatcagaaaattcttgcaggcaaactatatttccccagacatttggatttccatgtaaaatgccaaacaccaaaagaaaaacaaaaaacaaaaaacaaggtcatcttcttacatgccagacaccaaaaacaaaacaaaacaaacaacaacaacaacagcaacaacaaaatgaagtttattaagaacggggcgaatgatgtgaaacaccatcggtggttccgctccgtggactggaaagctgttccgcagagaaaactgaagcctcccatcgtgcccacgatagctggcaacggcgacacttccaacttcgaaacttaccctgagcatgactgggacacagccgcgcccgtgccgcagaaggatttagaaatcttcaagaatttctgaggacaggagctcacatctggaagaagcaggaaggctggaatctgcctgcaacaaagagctgctcctgagcagaccagtagcaatgtcttcttcacgtgataaggacatttccacttttctgtctttgtgcctgtatgtatagaaacagatcagagcacagttgaaattaatgtaactggcattatttaagcaactggaattccacactgtaggaaggttttgaaaattgtttgcttgtagattttatcttatcctttagtgttgtgttcctactgtgatgtcttggtttttctcatagacctaagtttataagttatgaactcgacttgttcaattataaccacaaattgtgtgtgggtgagtgtgtgtgaaaacatgcgcccgcctatgtttatatatacattacagtttggcagatacagagaagttgtgcgttgtttcatatgcttatacttcacagagcctgtatt

SEQ ID NO: 154437 - DNA, 6067 bp, Homo sapiens
ccacgcgtccggagctggaggaggcggcgggcgcgagacccggaatgcgcagggcccccgcctcgccccccccagcccgggccgcggcccccgccttccccgcagtcgtcccgcactcggtgcccgccccccgaggccggcggctgctcccactcggggccgttgctgcttgtgccgtgagcgccgcccagccattgtccccgtcgctccgtcagccgcgccggaccgcgcaccaggaggcgagagcgcgcatggggagcctctgttgatgccgccgccgcgccgccctccgaggctgcgtcccgggaagcccggctccccgagcgctccggcctggcccggtgccccggacctgagtgcgtccccatggaggcgcccgggctggcccaggcggccgcggcggagagcgactcccgcaaggtggcggaggagacccccgacggggcgcccgcgctctgccccagccctgaggcgctgtcgccggagccgcctgtgtacagcctgcaggactttgacacgctggccaccgtgggcactgggacgttcgggcgggtgcacctggtgaaggagaagacagccaagcatttcttcgccctcaaggtgatgagcattcctgacgtcatccgcctaaagcaggagcaacacgtacacaatgagaagtctgtcctgaaggaagtcagccacccgttcctcatcaggctgttctggacgtggcatgacgagcgcttcctctacatgctcatggagtacgtgccgggcggcgagctcttcagctacctgcgcaaccgggggcgcttctccagcaccacggggctcttctactctgcagagatcatctgtgccatcgagtacctgcactccaaagagatcgtctacagggacttgaagccagagaacatcctgctggatagggatggccacattaagctcacggactttgggttcgccaagaagctggtagacaggacttggaccctctgtggaacacccgagtacctagcccccgaagtcattcagagcaagggccacggaagggccgtggactggtgggccctcgggcatcctgatattcgagatgctttcggggtttcctcccgttttttgatgacaaccccgtttggcatttatcagaaaattcttgcaggcaaaaatagatttccccagacatttggatttcccatgtaaaagaccctcattaagaaactgctcgtggttgacagaacaaggcgattaggaaacatgaagaacggggcgaatgatgtgaagcatcatcggtggttccgctccgtggactgggaagctgttccgcagagaaaactgaagcctcccatcgtgcccaagatagctggtgacggcgacacttccaacttcgaaacttacacctgagaatgactgggacacagccgcgcccgtgccgcagaaggatttaaaaatcttcaagaatttctgaggacaggagctcacatctggaagaaacaggaagattggaatctgcctggaacaaagaactgcacctaagcagaccagaagcaaaatgtcttcttcacggcataaggacatctccacttttctctgtacctgtgtgtatagaaatagattagagcacagttgaaattcatggaactggcattatttaagcaactggaattccacactgtaagaaggttttgaaaattgtttggttgtagattttatcttatcctttagtgttgtgttcctactgtgatgtcttggtttttgtcatagacttaagtttataagtttgaactggacttgttcgattataaccacaaattgtgtgtgtgtgtgtgtgtgtgtgtgtgtgtgtgtgtgtgtgtgtgtatgcctgtgtgtatatatagaagtcattatggcagatgcacagaaattgtgcagtgatgtaaatgttcatactttacagagcctataatttttatttttcaatttgttttttcaaaaatctcttctcggggacaacatctgaagggtatgttgcatgcattaaaaaaaatcatctcacatgcattttatagttttggggaagaaaaatatcatggggaggtctaccttcagtatctttagtgcttcttacctgggtaacttgagactttaaaagaagaaacaaagaggggaaggatatggggagcgaatttattcccaagaatcctacaatgacattgaagttgttggaggaatgtactgtatttaaaaaaaccttctgtgacacattcaaaaaatttcatctaaagctgggcgcagtggcttgttcctgtagtcccagcacttcaggaggctgaggtgggtggattgcttgagcccaggagttggagaccagtctgggaaacatggtgagatgtcatctctctacaaaatacaaaaaaattagccgggcatggtggcacgtgagtgtaggtctcagctactcaggaggctgagatgagaggatcacttgagcctggggaggtccaggccgcagtgatccgagatcacaccactgcattccagcctgggtgacagagtgagaccctgtccaaaaaaaaaaaaaaaaaaaagaaggcaatggctttgtgcttttgaagatggattgaagagaacgtccaccttaaggctttaaaagacagtgaagctgggtgcggtggtgcactcctgtaaccctgggactttgggaagctgaggcaggaagattgagcctaggagttcgagactgacctgggcagcatagcgagaccccatctctatataaaaaaaaagatgttaaaacagtgaaattacagaaacagaacatagccaccctttttcatcagtgaccttttcttcacgtggaggtcaactcagtaggtgagaataattagtaggttcagcagaataaactctttacaattaataactcagtggaaaatgatgttcagatggtgaaatgtggaaatgttttagacaactctattttcagcctgtgcttctcactcaccatcctgttgggattaacagttgagggccatcgctgcctaaacatttagcgtgcggtttcccatcagttttaccgtgaatgtgaaaaggtgaaactggtgctgacttcggcagcaggtatactaaaattggaatgacacagaggagattagcatggccccctgcgcgaggaagatctgcagattcatgcagcattccatatttttttaagaaaaggttacactgtgcaccgacatgtggagctagaaggaaaagcttttaagtctcatgtttgctgactataaaaataaatcatagtaataatattgaacattctactttaaaaattattaataaaaccataaatgaaacacttgagcacactttaaaaagtacataaatccatgagtccatatgcctatttttaggttgtctgttttattatccaggatttcatactcagatgagaattagcatcaggaaagcctgaaatgccttaattgtgaactgatatgcaggaaaatgaaatatgcaagcacattggtgaccttgttctttacagacgtcgtgatcagcctccagccatacagaacaaatgagaaattagaagcgattccaagaacgtgtgatggtgtgaacccactttggaccatcacacacatttcagcatttgaagtgacacaagctacctggtaactgcccatggcggggtcatagtttaaatggcccaatgtcatgtagaggttaatttaatcaaaatgagctataaacatggagcaatcactgtataattttaaaatagtttacctggccaggcatggtcgtcacgcctgtaatcccagcactttgggaggccgaggcaggtggatcacctgaggtcaggagttcgagaccagcctggccaacatggcaaaacccccgtctctactaaaatacaaaaattaggtgtggtggcgggcacctgtaatcctggctactcgggaggctgaggcaggagaatcgcttgaacccgggaggcagaggctgcagtgagccgagatcgtgccactgcactccagcctgggccacagagcaagactccgtctcaaaacataaaaataaaaaaaatacaaatagctgacccgggtgggcattccaaaatgtccgcatggacgatcacgaaacaatcacggtgcgaaatgtccgcatggatgatcacgaaacaatcacggtgcggaatgtccgtatggatgatcatgacaaacaatcactgcgcaaaatgtggaggaaaattcattaccataatcacaacatttgtatcagaaaaacattacaaatttactttgcttcatgtaattttacgagttggcaatattttcttaaattggaatactctaagagaataggacatggatatgttacaagaagaagtgtattggggcaagtcttgtttttctgaagggaaatgccaccggcctgctttcataggcattgataaagccaggaaggaaataaagtcacaaccaaatagtatacactgtctctactgaattcttctaattccttcgcaacagaagtctaaatcctgcttagcctaaacatatctatagccagcgatgggcaaattatatttgctgtcagcatgatagaataagaagcagaaaccccccagcagtggggtgaagattgcacgcttcatcccctcaaaatgcagttcagccccactccctctccatgcccatcaaacaactgcaaaatcacttgttactgaatttctcattcagcgttttgtttctttctgtccatacttaaagaccaaattatttgtttgctttgaagaaaaagcaaaaacaagaacaaaaacaccaaatcatttgaaatcactgtccattaaaaaaaatcaccagtggaactaaacagttgagtggtttgggatgtgttgttcgccatttctgtggtttgacctacatggcctgtaattctttggaccattgtaactgtgaactatggcttaatactgttaaagaccccaaggctccactctgtagccaggtgcacctcaggctgcacaaataccccaccagaatgtcacaatcattcattgctccagctactgagtgaacagggtgcaagacagcactggcttgggttgtatttttgcagccagttaactttgcatcaggtctacacagtccttgcagcctttgatttctccagttgtagagatttgaaatggggtgcccgggttgctctcgtttttccttcaagctacctagcatgcattttacacacattggaggagtcgtatgcactgtttttctgttgctgatggaggcaagcaggccttctaattagtctaagttaaacggatgggattcacttaagaaaagcaagaagaaaagcacacgaacaggtgtcttaatgcatttggatagtttctttgcggggtgtgtgtgtgtgtgtgtgtgtgtgtgtgtgtgtgtgtgtcttggtgaaggtgaggggctgtattttcaccaagccttttcataatcaagtttgctttgcaaaccttatggccttgcaccccgcagaacagtcccttcctaatagcagggatgctctgtcatggtttttctgtaaattatcgtgtgttgggaagttctgttgaggcttagtttgatcttccatggtggacacgtctgttctgtatgtaaaaggcattacaattgtgttttagcagatgagacttgaagcctttccacagtccttgtgctctgagatggctgttgagctctgctcaactgtcgtagctgaattctttctttgcgctgaacactgggcagcctcaccatgttgccaacgtgcttctggggcccctgtcactgccgctggatgccgcgcacacaggcagagtgccttggcaggtttgtgcaccccttggcgagccagaactgggaaccccgcggggtgaccccttctcatggggggtcggggaggggagtgcctatttttaatcctgtctgtttgttgcacaatggaaatcactgtgatttgtacatatgccctaggaaaattttactgctgtctaatttatgtaataatactgttgattccaggtttatttaataaaactttgtatcttttcagaaaaaaaaaaaaa

SEQ ID NO: 154438 - DNA, 568 bp, Homo sapiens
  misc_feature (1)...(568): n = a,t,c or g
acatgcccatgcntgcacagatagaagaacctcagcccattcaggtaaaaactcgcacaaacctccggctcactcagttaagggaacaagaccagacacagaaatgcctttgtcctttgtataatcagcaggctccgaggaaaaagtttcttcttttgtgggcatgaacacagtgggcttcagtaggttcaggttggcactttcttttgtggaaaaggaaaagcccagcctctgtaaatcatcacttcagctcctgattggtcccaggccaagctgaatagcccttaggaattatccacttcaactcctgattggtcccgggccaagctgaatagcccttatgaatcatcacttcggttcctgattggtcccgggccaaggtcccagaccaagctgaatcacgctttctccaagaacagcccgcaggctaagtgcattccttccccttcccagtccataaaaaccccggaccccagcctcatactgggcaacttatttggatccccatctccactgtggagagcttttttctttcacttattaaacttttactccaatttcaaaaaaa

SEQ ID NO: 154439 - DNA, 2197 bp, Homo sapiens
  misc_feature (1)...(2197): n = a,t,c or g
atggaccctggtacgttgcagagtgcttcacaaggccctacagccattaacccgtgtgactatgtactcaaaaggagaaatattcaaacatcttggcaacgactaactcctattatcaaatggcacgtttatattttgatgattgggcctggtgagaaggaagcaggaaggaatctaggcatatttggcaaatggactccatttcccaagataccagcgaaacgcctgcgggagtctaattgcccggtcgatgcgcaggaaatttggctcccgcaggcgtttcgcgagtatcttgggaggcgtgggaattttggcccaggcaggaggacctgtgaattctgggaagtggagtccatttgctctgtggagtcgtgggaactttggctcaggcaggcggattcgggggattctgggaagtgtagtccagacgcctgtggcatcatcgacacttccggtctccgagcaggacactgctacttaacaagactgtggcacgtttcaggcaggattcctccttcattcaaactgcatcacccaggagtctgcaaattccccaaagtaggaggaaaaatgaccacattcaaggaggcagtgaccttcaaggatgtggctgtggtcttcactgaggaggagctggggctgctggaccctgcccagaggaagctgtaccgagatgtgatgctggagaacttcaggaacctgctctcagtggggcatcaaccgttccaccaagatacttgccacttcctaagggaagaaaagttttggatgatggggacagcaacccagagagaagggaattcaggaggcaagatccaaactgagttggagtctgttccagaagcaggagcacatgaagagtggtcctgccagcaaatctgggaacaaattgcaaaagacttaaccaggtctcaggactctatcataaataactctcagttctttgaaaatggtgatgtcccctcccaggttgaagcaggactacccacaattcatacaggacagaaaccttcccagggtgggaagtgtaaacagtccttcagtgatgttcccatctttgatcttcctcagcagttatactcagaagagaagtcttatacatgtgatgagtgtggaaaaagcatctgttacatctcagcccttcatattccatcaaagagtccacatgggagagaaatgctataagtgtgacgtgtgtggtaaggaatttagtcagagctcacatcttcaaactcatcagagagtccacactgggagagaaaccattcaaatgtggagcaatggtgggaaaggtttcagtcgtagatcagcacttaatgttcatcataaattacacacaggagagaaaccttacatttgtgaggcatgtgggaaggctttcattcatgattcccagcttaaggaacataagagaatccatactggggagaaaccattcaaatgtgatatatgtggtaagaccttctattttaggtcaagacttaagagccattccatggttcacacaggagaaaaaccatttaggtgtgatacatgtgataagagctttcatcagagatcagcacttaataggcattgcatggtccacacaggagagaaaccgtacagattgtgagcagtgtggaaaaggctttattggtaggctagatttttataagcatcaggtggtccacacaggagagaaaccatataattgtaaagaatgtgggaagagcttcagatggtcctcatgccttttgaaccatcagcgagtccacagtggagaaaaaagcttcaaatgtgaagaatgtgggaagggattttatacaaattcacaactgtcttcccatcagagatcccacagtggtgaaaagccatataaatgtgaggagtgtgggaagggctatgttactaagtttaatcttggacttgcaccagagggtccacacgggagagagaccttataattgtaaggaatgtggggaagaactttagccgggcctccaagtattttgaatcataagagactccactgccagaaaaaaaccntttcaaatgtgaggactgtggaaagaggcttgtacacaggacataccgtaaagaccagccaagagactatagtggggaaaacccatccaaatgtgaggattgtgggagacgctacaagaggcgcttgaatctggatatacttttatcattatttctaaatgacacataa

SEQ ID NO: 154440 - DNA, 5664 bp, Homo sapiens
  misc_feature (1)...(5664): n = a,t,c or g
atggatggtgccaaagcattttttagtgcagtggcagcaggatttgtcatcattctcacatgccagctgcagtggcagtggcaacatggtggggtgcatgctcatcagctgtggcagcttgctagtgggtaccgggatgcctgcttctgtgtgagcacttacagcagtggcccttctgaatttcctggacctactctcggaaccctcaacgagctagcgatagatttagaggaaaggaagcaccgtcggaaagcaaaggtttggaagggtgagggcggcggtttgcgatccccgcggcagagccttcttgcgtttagggctgtcctagcatcccgagggactcggtcctgtcacgtttcgccctatttgggggtttctggggctctcagctcgcccaatccgcatccctccactactggcgcggggccgattcccccggtacaacgttggggtcttccccagatcaaccagaaaaatagagaaattgctatcccactgacattgggtatgagcacacacttgcgaagagggtgcaagaacatgtctcgatttagcccatctttgcactgctgcactactcccatatccactaatttcacggacccaggcagccactgcaagggagcacatggggatatctgcttgttgattcaaaacctgaagggggctctgccaatgagcatcaacaggtcctactttaatgcacaccccctacttcaaatttctgaggcagtgacattcaaggatgtggctgtggtcttcactgaggaggagctggggctgctggaccctgcccagaggaagctgtaccgagatgtgatgctagagaacttcaggaacctgctctcagtagggaatcaacccattcccacccaagatactttcccacttcttagggaaggaaaagttttggaagatgaagacaacaagcccaaagagaagggaattcaggaggcaagatccaaattgagatggagactgttccagaagcaggcccacatgaagagtggtcctgtcagcaaatatgggaacaaattgcaagtgacctaaccaggtctcaaaactccataaggaacagctctcagttcttcaaagaaggtgatgtcccctgccagattgaggcaagactatctataagtcacgtgcaacagaaaccttaccgttgtaatgaatgtaaacagtccttcagtgatgtttctgtctttgatcttcatcaacaatcacactcaggagagaaatctcatacatgtggtgagtgtggaaaaagcttctgttacagcccagcccttcatattcatcagagagtccatatgggagaaaaatgctataagtgtgatgtgtgtggtaaggaatttaatcagagctcacatctgcaaactcatcagagagtccatactggagagaaaccattcaaatgtgggcaatgtgggaaaggcttccatagtagatcagcacttaatgttcattgcaaattgcacacaggagagaaaccttataattgtgaggaatgtgggaaagccttcattcatgattcacagcttcaagaacatcagagaatccatactggggagaagccattcaaatgtgatatatgtggtaagagcttccgtgttagatcaagacttaataggcattccatggttcacacaggagaaaaagcattcagatgtgatacatgtggcaagaactttcgtcagagatcagcacttaatagtcattccatggtccacatagaagagaagccatacaaatgtgagcaatgtggaaaaggcttcatttgtaggcgagatttttgtaagcatcagatggtccacacaggagagaaaccatataattgtaaagaatgtgggaagaccttcagatggtcctcatgtcttttgaaccatcagcaagtccacagtggacaaaaatccttcaaatgtgaagaatgtgggaagggattttatacaaattcacgacgatcttcccatcagagatcccacaatggagaaaagccatataactgtgaggagtgtggtaaggactataaaaggaggttggatcttgagtttcaccagagggtccacacgggtgagagaccctataattgtaaggaatgtggcaagagctttggctgggcctcctgtcttttgaaacatcagagactccacagtggggaaaaacctttcaaatgtgaagagtgtggaaagagatttactcagagttcacaacttcattcccatcagacatgccatactggagaaaagctatacaaatgtgagcagtgtgagaaggggtacaacagtaaatttaatcttgacatgcaccagagggtccacgggggagagcgaccctataattgtaaggaatgtggaaagagctttggctgggcttcatgtcttttgaaacatcagagactccacagtggagaaaagccattgaaatctggagtgtgggaagagatctactcagaattcacagcttcatttacatcagagtcttcaggccagaaactggtcagtatccccctgggacagagtttccaaaagaaggagaaggctgccatctttgctgttttgcagctttcactggtgacacctccaggtacgggaaaaacggaggcaactagggtctcgagcagaccccagcaaactgtggcagccctacagttgctaacagtcagtggcttgactgttaaaaacaggcagaaaacaacaagaacatcaacaaaaagaccccacaaaaaccccattcaagggtcagcaacctcaagattgaagagcaaatggactccatttcccaagataccagcgaaacgcctgcgggagtctaattgcccggtcgatgcgcaggaaatttggctcccgcaggcgtttcgcgaactgtggcacgtttcaggcaggattcctccttcattcaaactgcatcacccaggagtctgcaaattccccaaagtaggaggaaaaatgaccacattcaaggaggcagtgaccttcaaggatgtggctgtggtcttcactgaggaggagctggggctgctggaccctgcccagaggaagctgtaccgagatgtgatgctggagaacttcaggaacctgctctcagtggggcatcaaccgttccaccaagatacttgccacttcctaagggaagaaaagttttggatgatggggacagcaacccaaagagaagggaattcaggaggcaagatccaaactgagttggagtctgttccagaagcaggagcacatgaagagtggtcctgccagcaaatctgggaacaaattgcaaaagacttaaccaggtctcaggactctatcataaataactctcagttctttgaaaatggtgatgtcccctcccaggttgaagcaggactacccacaattcatacaggacagaaaccttcccagggtgggaagtgtaaacagtccatcagtgatgttcccatctttgatcttcctcagcagttatactcagaagagaagtcttatacatgtgatgagtgtggaaaaagcatctgttacatctcagctcttcatgttcatcagagagtccacgtgggagagaaactctttatgtgtgatgtgtgtggcaaggaatttagtcaaagctcacatctgcaaactcatcagagagtccacactggagagaaaccattcaaatgtgagcaatgtgggaaaggtttcagtcgtagatcagcacttaatgttcatcgtaaattacacacaggagagaaaccttacatttgtgaggcatgtgggaaggccttcattcatgattcccagcttaaggaacataagagaatccatactggggagaaaccattcaaatgtgatatatgtggtaagaccttctattttaggtcaagacttaagagccattccatggttcacacaggagaaaaaccatttaggtgtgatacatgtgataagagctttcatcagagatcagcacttaataggcattgcatggtccacacaggagagaaaccgtacagatgtgagcagtgtggaaaaggctttattggtaggctagatttttataagcatcaggtggtccacacaggagaaaaaccatataattgtaaagaatgtgggaagagcttcagatggtcctcatgccttttgaaccatcagcgagtccacagtggagaaaaaagcttcaaatgtgaagaatgtggaaagggattttatacaaattcacaactgtcttcccatcagagatcccacagtggtgaaaagccatataaatgtgaggagtgtgggaagggctatgttactaagtttaatcttgacttgcaccagagggtccacacgggagagagaccttataattgtaaggaatgtgggaagaactttagccgggcctcaagtattttgaatcataagagactccactgccagaaaaaaccattcaaatgtgaggactgtggaaagaggcttgtacacaggacataccgtaaagaccagccgagagactatagtggggaaaacccatccaaatgtgaggattgtgggagacgctacaagaggcgcttgaatctggatatacttttatcattatttctaaatgacacnnnnnnnnnnnnnnnnnnnnnnnnnnnnnnnnnnnnnnnnnnnnnnnnnnnnnnnnnnnnnnnnnnnnnnnnnnnnnnnnnnnnnnnnnnnnnnnnnnnnnnnnnnnnnnnnnnnnnnnnnnnnnnnnnnnnnnnnatttgagaggagttggtagacagcaagggaagggtccctggagacccccagccaaaggggtcagtgtctcatccccacataacacaaaaagcagcctggggaagacaatcaagctacaggcactgataagggaactagcacaggggattgtgcctggagacatgcccatggctgcacagatagaagaacctccagcccattcaggtaaaaactcgcacaaacctccggctcactcagttaagggaacaagaccagacacagaaatgccctttgtcctttgtataatcagcaggctccgaggaaaaagtttcttcttttgtgggcatgaacacagtgggcttcagtaggttcaggttggcactttcttttgtggaaaaggaaaagcccagcctctgtaaatcatcacttcaactcctgattggtcccgggccaagctgaatagcccttatgaatcatcacttcggttcctgattggtcccgggccaaggtcccagaccaagctgaatcacgctttctccaagacagcccgcaggctaagtgcattccttccccttcccagtccataaaaaccccggaccccagcctcaatactgggcaacttatttggatccccatctccactgtggagagcttttttctttcacttattaaacttttactccaatttcacccttgtgtctgtgcttcttaatcatattggacgtgagattaagaactccgggggatacatcacaagagagactgttacagtgtggtgcatttgtgagactacaacacatttttagcaatttgtaaataattgttgatgatagtcacctttagtgctgcagaacagtagaacttattcttcccctctacctcttttgtatctgttgccaacctttggccatctcacctacctcctacacttccctgcctgtctacatccactgttctactctctactacaaaatcaactttttttaacttc

SEQ ID NO: 154441 - DNA, 450 bp, Homo sapiens; identical to SEQ ID NO: 130660
  misc_feature (1)...(450): n = a,t,c or g

SEQ ID NO: 154442 - DNA, 2453 bp, Homo sapiens
ttcggcacaggagaaaaagaagaatctcaaccgatctggtaagcgtggccggccttcgggaaccaccaaatcagcaggataccggaccagcacaggcagacccctgggaaccaccaaagcaagctggatttaagacaagtccaggcagacctttggggacaactaaagctgcgggatacaaagtcagcccaggcagacctccaggtagcattaaagctctatcccgtcttgccgatcttggttatggctgtggcactgctgcttttccttaccctatgatgcatggcagagcagttcatggggtagaggaaactagcagtgaagtcaaaccacccaattgagtgaatgaggcaggaaaagagggccaggtttagaaggaagattgtgaataatcccaaagcttcttgggtttattttgatatacataattttatggcctgggcttttccaaatttgttttcctgtttggtttttttcctgcttttgctcaaaaactgccatatgctgacagatgcactcagggcatgagcagcggcattgtatttgtacataggttcaagtgtaacacctaactaaactcatttttccttttcctttagagttatggtcatgtctcatgtttcattactactttggggctgttctaaatagatgctttatgtgataaacaactgaaaccattatacctattagtttgtgaagtaagcctacagtataataaagacactaacgtatttttaactgatggagcaaaaaagcaaactaatgaatcaggattacttgaggtaatggctgtgtgaatttttgtaacatttattttcacaagatgggacacatatttgtatgctttggcatttacatccacttcaaatgttaaaaaacttatttttaatgttttaggtttaagcagcttgtaatttattgatctacatggcattaattgatttaaccattatacctgaaataattcttcagtgtttgcctttgagcagtgataggttgtgtattttttaattgcctaagagcatatataccaaacaccacgcccagccaccactacgcactttaaaaccaaaaaaaagctcaaagggatggatcattgtccatggctcaggagccccactgtggggtaaagtgtgatgtcgatggattaatttagacagtggtgtattcatcagggcaaaggaaattcttccagaggtgatgatgcggcagatattcccaagtgctctcccaaagcaagctggccctcttgtcatcctctccagtgggcggcaccaagctgcccctccttccacaagtactcaagcctgtttgtaaaatactgaaggaatcgatgggggtgattgaaaggaggtgcatgtgaccagggtcccaaggccacagcttttcagactcctaggaagcaagtggcatttgcttgagttgtggcctcggaaggagaatgtttatctgttttctaactttgctgacgaccaggattctccctgtcattgagaagaaagcattatctaattaccttcaggtggtttacttattctgtaaagaatatgtgtaaatattttgtacagagccctgtatcaaataaacagccatatgtggttactaatcacctcttctgtcattccgtccttggccaccgctcagtgggaatggtctctgatctggatgctcccaccttccatgttcaggcccagaactgttgcaatggtctgtggactcctggtcagccttgactggctaggagaccttgggcagtacctacagtcttgctgtttctgtttcatctgcaagaattatgacccacacactccagctgcagcccagggcactgtgatattttatacgtgtgtagatgtttttgtccacagttcctggttcatcactcccataaccctttgttataatgttgggacactgcaggcctcagaaaacggaatctctgtctgtgaccttctcctgccccatttcacttgctcaacaccagactttaatctgactgtagctcataagaccctcattccagagaggttgcttgccccatacccggaagggaggaacgctgcaacagagaggcccaagaagcattttggacagaccaggccttgcctgggtttaaaccctaatgcttttttgtcccagtttcatctcaacacagctgccatgcttcagcccatgccctatccaattgacggtctcccataaaaaggccccaggaacacggggaagcttctgaaaaagctgaacaatgttgaagggaaggggaaccgagaactttgtccatgttgccaagagggtgggcgcgacgcccactccatgggggacagaagcttccagcatttgcccaggacccgtccagacctcaccctgtgtgtatcttcatctggctggtttacttatttgtatccttttctaataacgtttgtaataaactggtaaacataaaaaaaaaa

SEQ ID NO: 154443 - DNA, 2292 bp, Homo sapiens
tttcgtgcggcttcgggccgggagacccgcgcagccctcggggcatctcagtgcctcactccccaccccctcccccgggtcgggggaggcggcgcgtccggcggagggttgaggggagcggggcaggcctggagcgccatgagcagcccggatgcgggatacgccagtgacgaccagagccagacccagagcgcgctgcccgcggtgatggccgggctgggcccctgcccctgggccgagtcgctgagccccatcggggacatgaaggtgaagggcgaggcgccggcgaacagcggagcaccggccggggccgcgggccgagccaagggcgagtcccgtatccggcggccgatgaacgctttcatggtgtgggctaaggacgagcgcaagcggttggcgcagcagaatccagacctgcacaacgccgagttgagcaagatgctgggcaagtcgtggaatgcgcctgacgctggcggagaagcggcctttagtggaggaggcagagcggctgcgcgtgcagcacatgcaggaccaccccaactacaagtaccggccgcggcggcgcaagcaggtgaagcggctgaagcgggtggagggcggcttcatgcacggcatggatgagccgcaggcggccgcgatgggccccgagggcggccgcgtggccatggacggcctgggcctccagttccccgagcagggcttccccgccggcccgccgctgctgcctccgcacatgggcggccactaccgcgactgccagagtctgggcgcgcctccgctcgacggctacccgttgcccacgcccgacacgtccccgctggacggcgtggaccccgacccggctttcttcgccgccccgatgcccggggactgcccggcggccggcacctacagctacgcgcaggtctcggactacgctggccccccggagcctcccgccggtcccatgcacccccgactcggcccagagcccgcgggtccctcgattccgggcctcctggcgccacccagcgcccttcacgtgtactacggcgcgatgggctcgcccggggcgggcggcgggcgcggcttccagatgcagccgcaacaccagcaccagcaccagcaccagcaccaccccccgggccccggacagccgtcgccccctccggaggcactgccctgccgggacggcacggaccccagttcagcccgccgagctcctcggggaggtggaccgcacggaattttgaacagtatctgcacttcgcgtgcaagcctgagatggggcctcccctaccaggggcatgactccggtgtgaatctccccgacagccacggggccatttcctcggaggtgtccgacgccagctccgcggtatattactgcaactatcctgacgtgtgacaggtccctgatccgccccagcctgcaggccagaagcagtgttacacacttcctggaggagctaaggaaatcctcagactcctgcgtttttgttgttgctgttgatgttttttaaaaggtgtgttggcatataatttatggtaatttattttgtctgccacttgaacagtttgggggggtgaggtttcatttaaaatttgttcagagatttgtttcccatagttggattgtcaaaaccctatttccaagttcaagttaactagctttgaatgtgtcccaaaacagcttcctccatttcctgaaagtttattgatcaaagaaatgttgtcctgggtgtgttttttcaatcttctaaaaaataaaatctggaatcctgcttttttgctctactagtacctctgtcacactagtcttatcaaaaaccagttcttaagatcaatgttaagtttattagttaatgtaaatttctcatcctcgaaaagggtgaacataaatgcctttaaggagtatatctaaaaataaacattaggatatctaagtttgatgtaattgtttcaggaaggaaaaaagaaaagcattctggaatgagcctacttcaagtaatcttagtttctaaaactaacagttaataatttccaattcccaggtatatcactttaagtagaaggggatgtccaagtaattttggttttctaactgttgaatcataagcttgacctgccccaagaggctttttggatgtttttatctgtgttttgccatctctttacactcctcgacattcagtttaccttaatcttcacatttttacaccttgggaagtggcaagcatcgctgggtttaagataaaggagtcacaaaaactaatcaaaataaaatttgcattatgacaacttttaaaaatt

SEQ ID NO: 154444 - DNA, 468 bp, Homo sapiens
  misc_feature (1)...(468): n = a,t,c or g
ttttttacgcctctctcactggtctgggcatnggatgtttctgttgaagccatagcagcactggcttcttggttaagagaagttatggtttccaatatcgacatggcatcattggctacattagcactgggcccaggagtaggaacacctgaggtctgaatgtgtggttgatctttgggtccacaacctgagaaataattcggtcaataccagactccaacattcctgatttgaggacttgttgtctaatgttgtttcttagctggttcttattgagatgcggactccatgtgtgagttgccaagtgatttgcaacaaagttgtcaacacgctgtctcagattctgatacgcaggcttggtgtccacgtcggccaggcagtctctgcggaactggtcgaagagcccctggctcttgaggtggttcacgagttatagatcgcgggcggccgctcgcgatctagaactag

SEQ ID NO: 154445 - DNA, 370 bp, Homo sapiens
gcactaatcctatgtaatatatgaaatcacacatacacacacttatgtgatcatttgaaataagagagataagacttcttcatccaaaatattatatctattccagcacaacttaagaatattaaagccattttggctttaacaatgattagaaaaatcttaatgaaaaattaatattacattgtttgtaaaacttttctgaaatacgttttattgattgcttcttttctaggcaggagtagtgtggacttagaagaatcatcaacaaagagtttggaacctaaagccgccagaattaaagaagtccttaaagaacggaaagttttagaaaaaaagtagccttaagcaaaaaaaaaaaaaaaagtcgacc

SEQ ID NO: 154446 - DNA, 2143 bp, Homo sapiens
atggatggaactagagattattgtgttataagtgttgtcctgggagataatgatgcaccaccaggaacaagtgccagccaagaaggagatggttctgtgaatgatggtacagaaggtgagagtgcagtcaccagcacggggataacagaagatggagaggggccagcaagttgcacaggttcagaagatagcagcgaaggctttgctataagttctgaatcggaagaaaatggagagagtgcaatggacagcacagtggccaaagaaggcactaatgtaccattagttgctgctggtccttgtgatgatgaaggcattgtgactagcacaggcgcaaaagaggaagacgaggaaggggaggatgttgtgactagtactggaagaggaaatgaaattgggcatgcttcaacttgtacagggttaggagaagaaagtgaaggggtcttgatttgtgaaagtgcagaaggggacagtcagattggtactgtggtagagcatgtggaagctgaggctggagctgccatcatgaatgcaaatgaaaataatgttgacagcatgagtggcacagagaaaggaagtaaagacacagatatctgctccagtgcaaaagggattgtagaaagcagtgtgaccagtgcagtctcaggaaaggatgaagcttcagacgatcaaactactccgagctacaggaggaaattcaaaccaatggcaaagaagttaaaagctttgaaaaaaaaattagacgaatggataactagaataaccaatgcagagaagtccttaaaggacctgatggagctgaaaaccaaggcacgagagctacgtgatgaatgcagaagcctcagtagccaatgcgatcaactggaagaaagggtatcactgatggaagaagaaatgaatgaaatgaagcaagaagaggagtttagagaaaaaagaataaaaagaaatgaacaaagcctccaagaaatatgggactatgtgaaaagaccaaatctacgtctgattggtgtaccggaaagtgacggggagaatggaaccaagttggaaaacaatctgcaggacattatccaggagaacttcccaaatctagcaaggcaggccaacattcaaattcaggaaatacagacaatgccacagagacactcctcgagaagagcaactccaagacacataattgtcagattcaccaaagttgaaatgaaggaaaaaatgttaagggcagccagagagaaaggtcgggttaccctcaaagggaagcccatcagactaacagctgagggggtcggcgacaactcaatcgacagctggaaaaacgcgggccgtgtctttaaagacagcgataagttcgacgccaacgatccgatcctgaaagatcagacgcaagaatggtccggttctgcaacctttacatctgacggaaaaatccgtttattctacactgactattccggtaaacattacggcaaacaaagcctgacaacagcgcaggtaaatgtgtcaaaatctgatgacacactcaaaatcaacggagtggaagatcacaaaacgatttttgacggagacggaaaaacatatcagaacgttcagcagtttatcgatgaaggcaattatacatccggcgacaaccatacgctgagagaccctcactacgttgaagacaaaggccataaataccttgtattcgaagccaacacgggaacagaaaacggataccaaggcgaagaatctttatttaacaaagcgtactacggcggcggcacgaacttcttccgtaaagaaagccagaagcttcagcagagcgctaaaaaacgcgatgctgagttagcgaacggcgccctcgtgttgatcctccttatcgtcactatgagaagacggaaaaaagagccccttatttttgacgaagaaagagacatcagagaaaatattgtgagatacgatgacgagggcgggggagaggaggacacggaagcgttccacatggctgcactgagaaacctcaacgtcatccgagacaccaagacccggagggatgtgactccagaaattcaattcctgagtcgaccagcttttaaaagcatcccagataatgtcatctttagggaatttatttgttttagattaaaagcagcggctgttgatcctg

SEQ ID NO: 154447 - DNA, 9438 bp, Homo sapiens
atggcacaactagaagagtctacaatgttacccagcacgctgctggcattgttgtataccaacaagggcctgattcttgccaagagaattaatgtgcgtatcgagcacattaagctcactaagagccgagatagcttcctgaaacacatgaaggaaaatgaccagaaaaagaaaacaaagagaaaggcggcgggaccagtgcagccgccgcctcccaggatcgtccgccggtcagggcccttgccctccccggcacaggccaccatggccaccaacccacagccgcagccgcctcctccggcgccgccgcctcccccgccgcagccgcagccgcagccaccgccgccgccgccgggccccggggctggccccggcgcgggcggggcgggcggcgcgggtgcgggcgccggggacccgcagctcgtggccatgatcgtgaaccacctcaagagccaggggctcttcgaccagttccgcagagactgcctggccgacgtggacaccaagcctgcgtatcagaatctgagacagcgtgttgacaactttgttgcaaatcacttggcaactcacacatggagtccgcatctcaataagaaccagctaagaaacaacattagacaacaagtcctcaaatcaggaatgttggagtctggtattgaccgaattatttctcaggttgtggacccaaagatcaaccacacattcagacctcaggtagagaaagctgtgcatgagtttttggccacgctaaatcacaaagaggaaggaagtggcaacacagctcccgatgatgagaaaccagacacttcccttattacacaaggtgttcctactcctgggcccagtgctaatgtagccaatgatgccatgtcgatattggaaaccataacttctcttaaccaagaagccagtgctgctagggcttcaacagaaacatcaaatgccaagaccagtgagagagcgtcaaaaaaacttccatctcagccaaccactgatactagtactgacaaagaaagaacttcagaggacatggctgataaagaaaaatctacagctgactctggaggtgaaggactggaaacagccccaaagtctgaagagttcagcgacctcccctgtccagtcgaagaaattaaaaattacacaaaagagcataataatttaattctgctaaataaggatgttcaacaggaaagcagtgagcaaaaaaataaatcaacagacaaaggtgaaaagaagccagacagcaatgagaaaggagaaagaaagaaagaaaagaaggaaaaggctgaaaagaaatttgatcactcaaaaaagagtgaagatacacagaaagttaaagatgaaaaacaagcaaaggaaaaagaagtagagagtttaaaaccttccttcagaaaagaacagtaataaagctaaaactgttgaagggacaaaagaagatttctctttgatagattctgatgtggatggacttacagacatcacagttagctctgttcataccagtgacctttcatcttttgaagaagatacctgaggaggaagttgtaacgtctgatagcatggaagaaaggagagattacgtcagatggatgaaggagaagaaccaacagaataaaacaaaaactcaaactagtgattctagtgaagggaaaaacaaaaagtgtacggccatgcgtatgtccacaaacccatatctttactcaaaatactatagtgattctgatgatgagcttactgtagaacaacgacgacagtccattgccaaagaaaaagaagagaggcttttaagaaggcaaatcaatagagaaaaacttgaagaaaaacgaaaacagaaagcagaaaagacaaagtcttcaaaaaccaagggtcaaggcaggagtagtgtggacttagaagaatcatcaacaaagagtttggaacctaaagccgccagaattaaagaagtccttaaagaacggaaagttttagaaaaaaaagtagccttaagcaaaaagagaaaaaaagattcaaggaatgttgaagagaactccaaaaagaaacagcaatatgaagaagattccaaagaaacccttaaaacaagtgagcattgtgaaaaggaaaaaatttcttcttcaaaggagctgaagcatgttcatgcaaaaagtgaaccaagtaaacctgcccggagactttcagagtctttgcatgtagttgacgaaaacaaaaatgaatccaaaatagaaagagaacatataagacggacatctacccctgttatcatggagggggtacaggaagagactgacacaagagatgtaaaaaggcaagtagaacgctcagaaatttgcaccgaagagccccagaaacagaaaagcacacttaaaaacgaaaagcatctaaagaaagatgattctgaaacaccacatttgaaaagcctacttaagaaagaggtgaaatcctccaaggagaagcctgaaagagagaaaactccatcggaagacaaattgtctgtgaaacataaatataaaggtgattgtatgcataaaacaggtgatgagactgagcttcactcttctgagaaaggtttaaaagtagaggaaaatattcaaaagcaaagtcaacaaactttcgttttcttcagatgataaaaccgaacgaaaaagtggacatactaatgaaaggaaattagcagtattaagcaaagatggaaagcccgtttctgaatatattataaaaacagatgagaatgttcgtaaagaaaacaacaaaaaagagagacgcttgtcagctgaaaaaactaaagcagagcacaaatcattgaaggtcaagtgattctaaaattcagaaagattctctgggttccaagcaacatggtatcacattacagagaagaagtgaaagttattcggaagataagtgttaatatggcctccattaacatggatagtaatttgaaaccagaagaggttgttcacaaggagaagcgacgaacaaagagcttgttagaagagaatcttgtgttgaagtctaaatcaaaaactcaaggcaaacaggtaaaagttgtagaaacagaattacaagaaggtgccacaaaacaggcaacctctccaaacccagacaaggagaagaacacagaagaaaatgactcagaaaaacagcgtaagtctaaagttgaagccaaaccttttgaagaaactggtgttgaacctgtattagagactgcttcttcttcagcacatagtacacagaaggattctagtcatagagccaagttaccattagcaaaggagaaatataagagtgataaagactccacttccaccaggcttgagagaaagttgtcagatggccacaaaagcagaagcttaaagcatagtagtaaagacataaaaaagaaggacgaaaataaatcagatgacaaggatggtaaagaagttgacagtagtcatgaaaaggccagaggtaatagttcactcatggaaaagaaattaagtagaaggttgtgcgaaaatcggagaggaagcttgtcacaagaaatggccaaaggagaagaaaaattagcagcaaacactttgagcactcccagcggttcctcccttcagagaccaaaaaagagtggtgatatgacattgatccctgaacaagagccaatggaaattgattctgagccaggtgttgaaaatgtgtttgaagtatctaaaacccaagacaaccgcaataataattctcagcaagacattgactctgaaaatatgaaacaaaaaacttctgccactgttcaaaaggatgaattgagaacttgcacagcagattcaaaagcaacagctccagcttataagccaggccgtggaacaggagttaatagtaattctgaaaagcatgccgatcatagaagcaccttgaccaagaaaatgcatatacaaagtgctgtgtccaaaatgaaccctggggagaaagaacccattcatagaggaactactgaagtgaatatagattctgaaactgttcatagaatgttactgagtgccccatcagaaaatgatagggtacagaagaatttgaaaaacacagctgctgaagaacatgttgctcaaggagatgccactcttgaacattccacaaatttagactcctcaccatccttaagttcagtgactgttgtgcctctgagggaatcgtatgatccagatgtaattcctctgtttgacaaaagaactgttttggaaggtagcacagccagcacctcccctgcggatcactctgctctccctaaccaaagtctgactgttagggaatcagaagtccttaagacaagtgacagcaaagaaggtggtgaaggtttcacagtagatacaccagcaaaagcaagcatcactagcaaaagacacattccagaagctcaccaggctactttattggatggtaaacaaggaaaggtaatcatgcctcttggaagtactgttaacggacgtgattgtggaaaatgagaatattaccaatgaaggtggcttagtggacatggccaagaaagaaaatgacttaaatgcagagcccaatttaaagcagacaattaaagcaacagtagagaatggcatgaaggatggcattgctgttgatcatgttgtatgcctgaatacagaaaaatatgctgaaactgtcaaacttaagcataaaagaagcccaggtaaagtaaaagacatatcaattgatgttgaaagaaggaatgaaaacagtgaggtagacaccagtgctggaagtggctctgcaccctctgttttacaccaaaggaacggacaaactgaggatgtggcaactgggcctaggagagcagaaaagacttctgttgccactagtactgaagggaaggacaaagatgtcaccttaagtccagtgaaggctgggcctgccacaaccacttcttcagaaacaagacaaagtgaggtggctttgccttgcaccagcattgaggcagatgaaggcctcataataggaacacattccagaaataatcctcttcatgttggtgcagaagccagtgaatgcactgtttttgctgcagctgaagaaggtggggctgttgtcacagagggatttgctgaaagtgaaaccttcctcacaagcactaaggaaggggaaagtggggagtgtgctgtggctgaatctgaggacagagcagcagacctactggctgtgcatgcagttaaaatcgaagccaatgtaaatagcgttgtgacagaggaaaaggatgatgctgtaaccagtgcaggctctgaagaaaaatgtgatggttctttaagtagagactcagaaatagttgaaggaactattacttttattagtgaagttgaaagtgatggagcagttacaagtgctggaacagagataagagcaggatctataagcagtgaagaggtggatggctcccagggaaatatgatgagaatgggtcccaaaaaagaaacagagggcactgtgacatgtacaggagcagaaggcagaagtgataactttgtgatctgctcagtaactggagcagggccccgggaggaacgcatggttacaggtgcaggtgttgtcctgggagataatgatgcaccaccaggaacaagtgccagccaagaaggagatggttctgtgaatgatggtacagaaggtgagagtgcagtcaccagcacggggataacagaagatggagaggggccagcaagttgcacaggttcagaagatagcagcgaaggctttgctataagttctgaatcggaagaaaatggagagagtgcaatggacagcacagtggccaaagaaggcactaatgtaccattagttgctgctggtccttgtgatgatgaaggcattgtgactagcacaggcgcaaaagaggaagacgaggaaggggaggatgttgtgactagtactggaagaggaaatgaaattgggcatgcttcaacttgtacagggttaggagaagaaagtgaaggggtcttgatttgtgaaagtgcagaaggggacagtcagattggtactgtggtagagcatgtggaagctgaggctggagctgccatcatgaatgcaaatgaaaataatgttgacagcatgagtggcacagagaaaggaagtaaagacacagatatctgctccagtgcaaaagggattgtagaaagcagtgtgaccagtgcagtctcaggaaaggatgaagtgacaccagttccaggaggttgtgagggtcctatgactagtgctgcatctgatcaaagtgacagtcagctcgaaaaagttgaagataccactatttccactggcctggtcgggggtagttacgatgttcttgtatctggtgaagtcccagaatgtgaagttgctcacacatcaccaagtgaaaaagaagatgaggacatcatcacctctgtagaaaatgaagagtgtgatggtctcatggcaactacagccagtggtgatattaccaaccagaatagcttagcagggggtaaaaatcaaggcaaagttttgattatttccaccagtaccacaaatgattacacccctcaggtaagcgcaattacagatgtggaaggaggtctctcagatgctctgagaactgaagaaaatatggaaggtaccagagtaaccacagaagaatttgaggcccccatgcccagtgcagtctcaggagatgacagccaactcactgccagcagaagtgaagagaaagatgagtgtgccatgatttccacaagcataggggaagaattcgaattgcctatctccagtgcaacaaccatcaagtgtgctgaaagtcttcagccggttgctgcagcagtggaagaaagggctacaggtccagtcttgataagcaccgccgactttgaggggcctatgcccagtgcgcccccagaagctgaaagtcctcttgcctcaaccagcaaggaggagaaggatgaatgtgctctcatttccactagcatagcagaagaatgtgaggcttctgtttccggtgtagttgttgaaagtgaaaatgagcgagctggcacagtcatggaagaaaaagacgggagtggcatcatctctacgagctcggtggaagactgtgagggcccagtgtccagtgctgtccctcaagaggaaggcgacccctcagtcacaccagcggaagagatgggtgacaccgccatgatttccacaagcacctctgaagggtgtgaagcagtcatgattggtgctgtcctccaggatgaagatcggctcaccatcacaagagtagaagacttgagcgatgctgccatcatctccaccagcacagcagaatgtatgccaatttccgccagcattgacagacatgaagagaatcagctgactgcagacaacccagaagggaacggtgacctgtcagccacagaagtgagcaagcacaaggtccccatgcccagcctaattgctgagaataactgtcggtgtcctgggccagtcaggggaggcaaagaaccgggtcccgtgttggcagtgagcaccgaggaggggcacaacgggccatcagtccacaagccctctgcagggcaaggccatccaagtgctgtttgtgcggaaaaagaagagaagcatggcaaggagtgccccgaaataggaccatttgcaggaagaggacagaaagagagcactttacacctcataaatgcagaagagaagaatgtattgttgaactcccttcagaaagaagataagagcccagagacagggacagcagggggcagtagcacagcaagttattcagcaggaaggggcttagaggggaatgctaactcacctggcgcacctgagaggaccagaacagacgtctgggcagacggctaaggattcctctgtcagcagcattcgctatttggcagcagtaaacaccggtgctataaaagctgatgacatgccacctgttcaagggaccgtggctgagcattcctttcttcctgctgagcagcaggggtctgaagacaacttgaaaaccagtaccaccaaatgtattactggccaagaatcaaaaattgctccttcccacacaatgatccctccagctacttacagtgtagctctgttggctcctaaatgtgagcaggacttgactataaagaatgattatagtggcaaatggactgatcaagcatctgctgagaaaacaggagatgataacagcacaaggaaatcattccctgaggaaggagacataatggttactgtgtcttctgaagaaaatgcttatgtgccttcagaggaagagaaaaatggtgaaattctggcaccaccagaaagtctgtgtgggggaaagccaagtggaatagagatatccagtggtagaaaagacaacgcagaagccataagcggtcacagtgttgaagcagatcctaaagaggaagagaactccagagatttggaagaattacctaaaaccagttctgagacaaatagcactacctcaagggtcatggaagaaaaagatgaatatagcagcagtgaaactactggtgaaaagccagagcagaacgatgatgacaccataaaatctcaggaggatgatggtgaagaaaaaatagtaacaagtgtgcgtcggagaggaagaaaacccaaacgttctctcactgtatcagatgatgctgaatcctcagagccagaaagaaaacgccagaaatcagtttctgatccagtggaggacaagaaagagcaggagtctgatgaggaagaggaagaagaggaagaggacgagccttcaggagccaccacaagatccaccaccagattcagaggctcagagaaagcaacataggcaagccttttgcacgttgcaacatccaaacttggcagcccagacacagtttctcctagaaatcgccaaaaattagcaaaagagaagttacctaccagcgaaaaagttagtaactctcccccattaggaagatcaaagacacagctctccccttctatcaagcgcaagagagaagtcagccctcctggggccccgaacaagaggccagcaaagggtggaggaagcccctggggcccgagacaagaggccaggggagggtggaggaagcccctgtgaaaaaagcgaagcgataatcctgaccactgctgccctaggcttatggaggaacacggtggagaggaaagagacatgccttggtggccataggcttctctttaaccaggaaaaagatatgcatgtgctgtaagtccctagggtgcaagctttttcttgttatgttttaaacagctttataaactattgttcatagaagatattatgtacatttatttcagataaaggacaataagtttactttgtatctgaactcaaaacaaagtagttgtatattttaacattcaaaattgggatttcccaatgtgacacatcatgaatgcaaacccctccagcccatcagacgccaggctgcctactggtaatctgtgtatagt

SEQ ID NO: 154448 - DNA, 633 bp, Homo sapiens
tctcccggacatccaaaacaggttaccttgtccacgctctccggaccacgctttggacttgctcacttttatttaagagtccgacgggggaaagaggaaaaaaaaatccagaggagatccaagtcaattggaagaaaaaatttcaaaagggtgtccacagaggcgaaaaaagcccaggctctaccgaccttcaaactacaacagagctttcaggagaatgcggagagacggcttcccacccggacctcaccagaaacccgcacaccccagccacattgctcctcattcagccagaaaggactccaactccaccaccagggaggccccccttcctgggtgctggccagttgcagaggctgttcatgggcatcccacaggtgggcgactgccccccaccctcctcctaggcactttagaggggtccctctgtgggcagacaccatgggttaggtttctcttttccaacttcctgtttgggtctggcaagtgacagatcatcttcactacattaatcagtagtcacccgaacattcctatactgtcccccaattcctttcagcaccagctgcctcccccactggaattattcaatatggaactagattaaattgaagacttgccctttagttttta

SEQ ID NO: 154449 - DNA, 463 bp, Homo sapiens
  misc_feature (1)...(463): n = a,t,c or g
nttgcgaccctagtccgngtggtggaactccctagaggtgacagtctacgcattcagcattgagaacttcaaacgctccaagagtgaggtagacgggcttatggatctggcccggcagaagttcagccgcttgatggaagaaaaggagaaactgcagaagcatggggtgtgtatccgggtcctgggcgatctgcacttgttgcccttggatctccaggagctgattgcacaagctgtacaggccacgaagaactacaacaatgatatctctgagtctctgcttgataagtgcctctataccaaccgctctcctcatcctgacatcttgatacggacttctggagaagtgcggctgagtgacttcttgctatggcagacctctcactcctgcctggtgttccaacccgttctgtggccagagtatacattttggaacctcttcgaggccatcctgcagttccag

SEQ ID NO: 154450 - DNA, 1922 bp, Homo sapiens
gcagcaatacccgtgtcgacgatttcgtctgaactgaaggggtgaactagaggagaagagggtgactgggcttttatcatctgcgggagaagcataggttacgactgagggaataatcaggagaccactgaggcgtgaagtactacgcgtgcgataactgaaggagttagtaactgggagcacagagttggaaacagcttatgggaagatggagaaggaagaaacggggaatgatcaagatgtgggcaccatgatgtggcaggaaaccgacttagatgttcagaagaagtcagtgcagatacggaggaaatgggaatgggaagaagtctgcaaagccaggagaaccgaggaaaggcttttgcctccagaggtcacattgcgttataaaactctgggtggtaaaagattataggcttagaccagtgtctttggattctaatgctggctgctctccatagtccatctgattccccagaagtcagttatagctcttcgcaaaccttggagacttcttattttctttcttggttatccaagattacctggctggtgtttgcttgttctggagtgatcttctgactggaaaagaactatgtcatggatcaaggaaggagagctgtcactttgggagcggttctgtgccaacatcataaaggcaggcccaatgccgaaacacattgcattcataatggacgggaaccgtcgctatgccaagaagtgccaggtggagcggcaggaaggccacttcacaggcttcaaacaagctagctgagactctgcggtggtgtttgaacctgggcatcctagaggtgacagtctacgcattcagcattgagaacttcaaacgctccaagagtgaggtagacgggcttatggatctggcccggcagaagttcagccgcttgatggaagaaaaggagaaactgcagaagcatggggtgtgtatccgggtcctgggcgatctgcacttgttgcccttggatctccaggagctgattgcacaagctgtacaggccacgaagaactacaacaagtgtttcctgaatgtctgttttgcatacacatcccgtcatgagatcagcaatgctgtgagagagatggcctggggggtggagcaaggcctgttggatcccagtgatatctctgagtctctgcttgataagtgcctctataccaaccgctctcctcatcctgacatcttgatacggacttctggagaagtgcggctgagtgacttcttgctatggcagacctctcactcctgcctggtgttccaacccgttctgtggccagagtatacattttggaacctcttcgaggccatcctgcagttccagatgaaccatagcgtgcttcagaaggcccgagacatgtatgcagaggagcggaagaggcagcagctggagagggaccaggctacagtgacagagcagctgctgcgagaggggctccaagccagtggggacgcccagctccgaaggacacgcttgcacaaactctcggccagacgggaagagcgagtccaaggcttcctgcaggccttggaactcaagcgagctgactggctggcccgtttgggcactgcatcagcctgaatgaggctggccacctgccactttgccctgccctttggcttcaggggttcaattcccttcccttttcttggtgaaaaggcacctcctttcctgataatgaatggtgttccctttgcttggctggggagccccccaggccaggtttgctggccataaatacctttgggctgcctgggacaggctccttaggaggattgagggtgaaagtttcccccgagtaccctaaacctaggtttggtccccaatagggtttggaaagcaaagggccccaactcttcaccaaaaaaaaaaaaaaaaaaaaaaaaaaaaaaaaaaaaaaaaaaaaaa

SEQ ID NO: 154451 - DNA, 365 bp, Homo sapiens; identical to SEQ ID NO: 137871

SEQ ID NO: 154452 - DNA, 464 bp, Homo sapiens; identical to SEQ ID NO: 137872

SEQ ID NO: 154453 - DNA, 793 bp, Homo sapiens
aggatttgctcgacttggacgaggagcttcgctacagcttggctacctccgtgaggaccaattcgggggccttgggggccaggatttggcgggtggggaggagcgaccccgccggccccgacttctctgaggcgactcagggcggcaggcctcgcgccgcgccgggtgaggcccagaaggaggcagcctcaccgccccgcccccaggccactgtgggctccgccgctgctggcctggggtttgctttctttaaaatcctcagaaagtagaaaacaccctgtccccgccggcgtctaggaccgtgggaaatttccgagcctttctccgttttctagagccccgagtgcgaacttccccagaacagatcgatcacaggagggccaagatgggtcgccgagctcaacaggagtcagcgcaggccgagaatcacctcaatggcaagaattcctctttgactctgactggagagacttcctctgctaaattacctcgctgccgacagggaggctgggcaggtgattccgtgaaggcttcgaagtttaggaggaaggcttctgaagaaatagaagagtacgtttccagcattcttattcttatggtatcctatgttgatcttgggcaacagggcaggcttggtggtcatgatctgttccacctatgttgaacactgtgttagaagtctggggctagaattattgatgccctgctgaatccaaggtttggttaatcccgcttcctcaactgaaggtctggaccctggcattgatgcccatgtcctatctcccactgtgtg

SEQ ID NO: 154454 - DNA, 571 bp, Homo sapiens; identical to SEQ ID NO: 137874

SEQ ID NO: 154455 - DNA, 952 bp, Homo sapiens
tttcgtggaggatttgctcgacttggacgaggagcttcgctacagcttggctacctccgtgaggaccaattcgggggccttgggggccaggatttggcgggtggggaggagcgaccccgccggccccgacttctctgaggcgactcagggcggcaggcctcgcgccgcgccggagggccaagatgggtcgccgagctcaacaggagtcagcgcaggccgagaatcacctcaatggcaagaattcctctttgactctgactggagagacttcctctgctaaattacctcgctgccgacagggaggctgggcaggtgattccgtgaaggcttcgaagtttaggaggaaggcttctgaagaaatagaaggatttccggcctcagaccacagagcctgaatggttcagaattatggaggagatattcctattcattccggatctggaggaagtacaggaagaagactttgttttgcaggtgggcagcccctcccagcattccagataaagcgggtgatgacctaccgtgacctgggacaatgacctcatggaagtacttcagccattcagacactggatggggaagattcgacctgaaactcctcacccaaaagtgctcgcgccggagcacgaagtccgggagcgaaacccttcttggcaggatgatgtcggctgggacttggacccatctgttcactgaggtgtcctcagaaggtccttcactgagtgggacccactgcagacggagaaggaggaccctggcgggcaaggccaggcacacctgagcccgtcacccatgctctagacatgaagaaatgcaatgagcttaaagctaaagaagcttgtatgcagctccgaatttttacctggaatattttgtaataaaaatatttatattcagtcaaccacattggataattcaattgcaataccccgcttattctgtgccaaaaaaa

SEQ ID NO: 154456 - DNA, 400 bp, Homo sapiens
  misc_feature (1)...(400): n = a,t,c or g
cgccgctgcgaagggagccgccgccatgtctgcgcatctgcaatggatggtcgtgcggaactgctccagtttcctgatcaagaggaataagcagacctacagcactgagcccaataacttgaaggcccgcaattccttccgctacaacaagaatgctcgcgccacgctcagcagcatcagacacatgatccgcaagaacaagtaccgccccgacctgcgcatggcagccatccgcagggccagcgccatcctgcgcagccagaagcctgtgatggtgaagaggaagcggacccgccccaccaagagctcctgagccccctgcccccagagcaataaagtcagctggctttctcaccnnnnnnnnnnnnnnggggcgcccgtttaaaagaatccactttta

SEQ ID NO: 154457 - DNA, 361 bp, Homo sapiens
  misc_feature (1)...(361): n = a,t,c or g
gtcgccgctgcgaagggagccgccgccatgtctgcgcatctgcaatggatggtcgtgcggaactgctccagtttcctgatcaagaggaataagcagccccaccaagagctcctgagccccctgcccccagagcaataaagtcagctggctttctcaccnnnnnnnnnnnnnnnnnnnntttttttttaagggggccgaagctttttccttttaggggggggtaattttaagtggggccggggcggggttttaaaannnnnnnnnnnnnaaaacccggggggtccccaaattaaacgcctttgggcaaannnnnnnnnnnnttnnnttttanangnngggttttttgttattttttgtgtcg

SEQ ID NO: 154458 - DNA, 346 bp, Homo sapiens
  misc_feature (1)...(346): n = a,t,c or g
gcacgagggccagcggaagcctgccacctcctatgtgcggaccaccatcaacaagaatgctcgcgccacgctcagcagcatcagacacatgatccgcaagaacaagtaccgccccgacctgcgcatggacatgctggcatctactgggtcagggctctgctgctcggtgnnnnnnnnnnnnnnnnnnnnnnnnnnnnnnnnnnnnnnnnnnnnnnnnnnnnnnnnnnnnnnncgtgtcgatagaccctactactcagggttgatgagaagattaaatgtgcaaaacctgcttgactgtgcccacaaatcctgattgtaggaataaattaatgactttttataaatn

SEQ ID NO: 154459 - DNA, 418 bp, Homo sapiens
  misc_feature (1)...(418): n = a,t,c or g
ccggaattgccgggacgacccacgcgtacgagggcgcaccctggaaggctgccaagcccaaagatgtgcaaagcgctggggactccatactccccacagcagcagagactcgggactgaggcatcctctgttcacaggacatgctggcatctactgggtcaaggctctgctgctcggtgnnnnnnnnnnnnnnnnnnnnnnnnnnnnnnnnnnnnnnnnnnnnnnnnnnnnnnnnnnnnnnncgtgtcgatagaccctactactcagggttgatgagaagattaaatgtgcaaaacctgcttgactgtgcccacaaatcctgattgtaggaataaattaatgactttttataaatattttgatcagatggactcagatgatcacagatgtcttcacatgcctatgactaatttgtaca

SEQ ID NO: 154460 - DNA, 464 bp, Homo sapiens
ggcaggtcgccgctgcgaagggagccgccgccatgtctgcgcatctgcaatggatggtcgtgcggaactgctccagtttcctgatcaagaggaataagcagacctacagcactgagcccaataacttgaaggcccgcaattccttccgctacaacggactgattcaccgcaagactgtgggcgtggagccggcagccgacggcaaaggtgtcgtggtggtcattaagcggagatccggtgagttttgtctggtttgggccagagagcggcccctttcccgggtctgggagctgtgattttttactgtcaggtaggaagagcggtaactgccatcgcggcgggcatccctggcgccagggtgttggtctgggtaccggcttccctctcggccgacttgtcagctctgtgagccgcgcgcgtctgagcccgtgtcctcacctgtaaagtggagaaatgaaaaagga

SEQ ID NO: 154461 - DNA, 523 bp, Homo sapiens
attgcacacccctaaccccgggtcgacccacgcgtccgcaggtcgccgctgcgaagggagccgccgccatgtctgcgcatctgcaatggatggtcgagcggaactgctccagtttcctgatcaagaggaataagcagacctacagcactgagcccaataacttgaaggcccgcaattccttccgctacaacggactgattcaccgcaagactgtgggcgtggagccggcagccgacggcaaaggtgtcgaggtggtcattaagcggagatccgagtgagcttatctcaggtccttgattggaactgcctcagagccaagggtccttttactcagtggcagcaacaaacgcagtctgttggctagggatcctcctgtctcagggacacgtagtccagggagcagccaattgcttggcacttggggaccccgttctggtgaggcctgaaagctttcacctcttggattgccgaatacatgggtggcccttcctagactaagggactggcctgagtgaggctggct

SEQ ID NO: 154462 - DNA, 930 bp, Homo sapiens
gcaggattcggcacgaggccgctgcgaagggagccgccgccatgtctgcgcatctgcaatggatggtcgtgcggaactgctccagtttcctgatcaagaggaataagcagacctacagcactgagcccaataacttgaaggcccgcaattccttccgctacaacggactgatttcacccgcaagactgtggggcgtggagccggccagcggacggcaaaggtgtcgttggtggtcatttaagcggagatccggccagcgggaagcctgcccacctcctatttgcggaccaccatcaacaagaatgctcgcgccacgctcagcagcatcagacacatgatccgcaaagaacaagtaccgccccgaccttgcgcatggacatgctggcatctaactgggtcaagggctctggttgctccggtggctgtgcaacctttgggcaagttcctcgaacctctctgtgtcttcgtaccctcatctgtaacatgcgtgtcgatagaccctactactcagggttgatgagaagattaaatgtgcaaaacctgcttgactgtgcccacaaatcctgattgtaggaataaattaatgactttttataaatattttgatcagatggactcaggatgatcacagatgtcttcacatgcctatgactaatttgtacacaaactaatgctcgtgtttcccaagcacctggaagaccatgccagatccatgtgcagtaatgcctggtggctccaggtctgccccgccgtcctgtggggctgtgagctttcccagcctcctgcccgtgtttgtgaatatcattctgtcctcagctgcatttccagcccaggctgtttggcgctgcccaggaatggtatcaattcccctgtttctcttgtagccagttactagaataaaatcatctactttaaaatctttcaaaaaaa

SEQ ID NO: 154463 - DNA, 562 bp, Homo sapiens
ggtcgccgctgcgaaagggagccgccgccaatgtctgcggcatctgcaatggatgggtcgtgcggaactgctccagtttcctgatcaagaggaataagcaagaccctacagcactgagccccaataacttgaaggcccagcaattccttccgcttacaacgggactgattcaccgcaaagactgtgggacgtggagccggtcagccgacggcaaaaggtgtcgtggtgggtcattaaggcggagatccgggccagcggaagcttgccacctcctatgttgccggaccaccatcaacaaggaatgctcgcagccacgcttcaggcaggcatcaggacacattgatcccgcaaggaacaagttaccgcccccgacctgccgcatgggcagcccattccgcagggcccagcggccattcctggcgcaggcaggaaggcttgttgattggttgaaggagggaaggcgggacccggccccaccaagaagctccttgaagccccttggcccccagaagcaattaaagtcagctggggttttctcaaaaaaaaaaaaaaaaagtcgacg

SEQ ID NO: 154464 - DNA, 139 bp, Homo sapiens
gatagacgggcgggtgacccgtggccccgtacccacgagtttgggtcccctgaggcatctctccaggcctctgcctggcgagatggaaagaaagtatcaaggagtgagctgaagccactgcccttgagaaccctctcga

SEQ ID NO: 154465 - DNA, 602 bp, Homo sapiens
gttggaatctggtgaccagtaacaaactttggtgtaatttcaggaaccaaagccattgaaatggattaagggacccttatatacacgcactcaccaatggtcttttaaccgtggaagctccacacaaagaagaatcgccctgaaacctggctatggaaaataccttagtataaattcagatgaacttgttgttggcgttcagatgcaattggaccaagagaacaatgggaaccagtctttcaaaatgatggccatccagtaatgagaatgaacagtctccaactaaaggcaacaatatagatgaatctcggaaacatgatattgaccagacagaaaagattccacttacataaacttcaaaagaagataaaactgatctatgacattaatagtcagaatattcattatccttgagggaactaaactgggaagccacatgatagggcatctggaagctagtaatgtcctctttcttgatctgttacattggtgtgtttatttcattagatttattgagctatacatttaccaccgtgtacttgtctctgtatatgttttgcattgaaataaattttaccaataaaatgataaagcaaaataaa

SEQ ID NO: 154466 - DNA, 1001 bp, Homo sapiens
tttaactctgtaaaagcatttcctctgaatattttattcagaaaaaaaaaacacaaaaagataaggcagaaacaaaaatccccagtcacttgcagtatctggtcggcttccaatttgggccctcctgtccagaaagcgtctcatgcaaaaatccatctttccgagcctttttaagaattttactgtcttctttacttattttaagtttgtggtcttggaagctctgaaatttctttacataattgatttcacattgttttacatttcctttgtcttcttctggaatgtcatcttttttcttggtttctctttcagcacaggatctaatcttgatcatttcttcttctcctgctgttttactttttgcttctatgtcccctgcttcattgcatctaataaagcagctatttgaggccaacaaagccattttcccattttgaaagactggttcgcattgttctcttggtccaattgcatctgaacgcccaacaacaagtccatctgaatttataccaagatattttccatagccagatttcagggcgattcttctttgtgtggagctcccagggtaaaaagaccattgtcgagtgcatgtatataggttcccttcctcccattccaaatggctatgggtccctgaaatttcaccaaagttttgttactgttcaccagattccaacgtatcaagctgggtttcttcatcttctctttttctcttcttatctgtgctctttttcttcttactcggttcccttgagcacgagcttgctagacttcacataagagtactaggccatggctccgggagacttctgcgcggacaggctgaagccggctcaggacgagtatgtgacctggagcagcaccagggcagggaggaacagaagtggaggcgaagtaaacactccctgacagcctacgtctgtccagaacccgcctccgtcttcacccaaacggtgaatgcccgagatttcccggagcgcgtgggtcgacacggg

SEQ ID NO: 154467 - DNA, 754 bp, Homo sapiens
cggcacgaggcttatgtgaagtctaccaagcttgtgcataagggaaccaaggcgaagagatttgcctgaggttgactatacatacaaatattgagcatttcctcctggtctccgtgataaacaaaggttttgatattgttcggcgagatggaaagaaaatatcaaggagtgagctgaagccactgcccttgagaaccctctcgaggagtctggcctcatgaagatgccagaataaacggcagtaagaagaaaaagagcaaagagaagaagagaaaaagagaagaagatgaagaaacccagtttgatatgttggaatctggtgaacagtaacaaactttgatgaaatttcaggaaccatagccattgaaatggatgagggaacctatatacatgcactcgacaatggtctttttaccctgggagctccacacaaagaaggggaaaatggctttgttggcctcaaatggctgctttattagatgcaatgaagcaggggacatagaagcaaaaagtaaaacagcaggagaagaagaaatgatcaagattagatcctgtgctgaaagagaaaccaagaaaaaagatgacattccagaagaagacataggaaatgtcaaacaatgtgaaatcaattatgtaaagaaatttcagagcttccaagagcacaaacttaaaataagtaaagaagacagtaaaattcttaaaaaggctcagaaagatggatttttgcatgagacgcttctggacagaggaccaa

SEQ ID NO: 154468 - DNA, 919 bp, Homo sapiens
gggtcgacccacgcgtccgctcgtcctgagccggcttcagcctctccgcgcagaagtctcccggagccgacttctgagagtcgagtactcctatgtgaagactaccaagctcgtgttcaagggaaccaaggcgaagagagctaagaagtgacagaatcaggatttaaaatctggaagtgtggctctacaatctgctttgaactttaacataatatgtacaaagcctgaagcaaattctcagcgctgtatttaagagagcatagcaattaagaagaaaaagaacaaagataagaaaagaaaaagagaagaagatgaagaaacccagcttgatattgttggaatctggtggacagtaacaaactttggtgaaatttcaggaaccatagccattgaaatggataagggaacctatatacatgcactcgacaatggtctttttaccctgggagctccacacaaagaagttgatgagggccctagtcctccagagcagtttacggcctgtcaaattatctgattccagaatcgccctgaagtctggctatggaaaatatcttggtataaattcagatggacttgttgttgggcgttcagatgcaattggaccaagagaacaatgggaaccagtctttaaaattggggaaaatggctttgtcgacctcaaatagctgctttattaggatacagtgaagcagaggacatagaagcaaaaagtaaaacagcaggagaagaagaaatgatccaaggctctccttaatcttctgttcagccctttcaccttttatggacctttgcctttattcttacccaggaacacagatccctcttactaaagattagatcctgtgctgaaagagaaaccaagaaaaaagatgacattccagaagaagacaaaggaaatataaaacaatgtgaaatc

SEQ ID NO: 154469 - DNA, 1631 bp, Homo sapiens
tcagcccgcagctctagcgggaggcggttccacagcgagcccggcagtcccgccaccgtcagcaccggcgccttgggcgagctttccccacttctgggaggcacaaatcctcaggggctcctcgagaggaaacgagggagcagatgcgtgcggacacctttcggccctctgcggccgcggtagctccgctgtcagcggagtgtttacttcgccttctacttctgttcctccccgccctggtgctgctccaggtcacatactcttcctgagccggcttcagcctctccgcgcagaagtctcccggagccatggcctagtattcttatgtgaagtctaccaagcttgtgctcaagggaaccgatggtgaagagctgggtcctgcagctccggtgggagcctcctcggttcttttcggatgcactccacccccgcgaaatccggtggaagccgtgatgcggagagccggcttcgtggccttcccaggtttcgcggcctcccaggtttcgccctgaccctgtctgggctggacggaggctggaccgcggttcctgggcgcctgtgcagagaggggcagcctcctgcgcgggacgaccctgggaaacaggattagacgggcgggtgacccgttgaccccgtaacccacgaattttggggttcctttgaaggcatctctccaggcctctgcctgatttgcctgaggttgactgtacatgcaaatattgagcatttcctcctggcctccgtgataaacagaagttttgatattgttaggcgagatggaaagaaagtatcaaggagtgagctgaagccactgcccttgagaaccctctcgaggagtctcggcctcatgaagatgccagaataaatggcagtaagaagaaaaagagcaaagataagaagagaaaaagagaagaagatgaagaaacccagtttgatatgttggaatctggtggacagtaataaactttggtggaatttcaggaaccatagccattgaaatggatgagggaacctatatacatgcactcgacaatggtctttttaccctgggagctccacacaaagaagaatcgccctgaaacctggctatggaaaatatcttagtataaattcagatgaacttgttgttggcgttcaaaagccattggaccaagagaacaatgggaaccagtctttcaaaatggtgcctgtgcagcaggattcactgtgataggaagtgagaagcagtctgagtgttcattgctgagggaatcaagggcaaaatatcatggatgcactcatggacaaataagcagcagtttgaagcaacaccctagatggatgtacagccatcaagaggatcttaaagtgtggtctttagtggaaaaaaaggttacatttgaacatatttatctgctaaagcgaaataattcccatcattctatagcagaagcaatgtatgggagactgagtaattacatatgagctcacatcactatctcttccgccactgtcatccatcatgactgatctgggagatgaaacagcacagatctaaaggacgtggtaagaatcgagatcaccagagatcagtagatacttgcatacttggaggattaacactgtctggattccaacgatcagctgagtat

SEQ ID NO: 154470 - DNA, 1120 bp, Homo sapiens
  misc_feature (1)...(1120): n = a,t,c or g
ttccccctaaagatctatttaaaganaaccctttccctaaaantttttacctaaatattgggcaaaanccgtatcattcaaagattaaatctgggttatttcctttgaataagaactgaatgtggccgggcgcaagtngtcacgcctgtaatccccagctactcgggaggctgaggcaggagaattgcttaaacctgggaggtggaggctgcagtgagccaagtatcgtgccactgcactccagcctgagtgacagagcaagactccgtcaaaaaaaaaaaaaaaaaaaaaagaaatgatatctggccccccctttaacactggagccccactcccttctcccatccgggcccgagattagggaggattgactgtgtcagggatggcgggtggcctctctcgctgccagggcccttgtcagagcagccaggcttgacagacggcctccctcctctccaatctgaccggcacctgctgctttcgggcttaaggccaacgctcccctgtcccccagaggagataagccccagatggactggaatgttgtgggcaatgagagcgcatgttgtgcgattggccccgctgttggtcccctctctgtccctccatcttgtatgtgttctgtgtcccttgcatgtgtgcggtgttagagtgaagcgcgtatgcatcaactcattgggctcttggctgctcacaaggcaaatttgactttggaaagactttcatctccttggaaccaagacttcctgagtccccctcaccctgggccctgttccaccatggttatctggggaattggggaatggaaacttttggggggagtgactttttgaaaagagacacttataaatttgctaataantgcaatccagtgttaagggggggccagatatcatttctttttctttttttttttttttgacggagcttgctctgtcactcaggctggagtgcagtggccgatacttggctcactgcagcctccacctcccaggtttaagcaattctcctgcctcagcctcccgagtagctggggattacaggcgtgacnacttgcgcccggccacattcagttcttattcaaaggaaataacccagatttaatctttgaatgatacgg

SEQ ID NO: 154471 - DNA, 2218 bp, Homo sapiens
atgctaaatattagtgtctcctcctacaatccttgttgtcaaaagaatggctatgacaacatcaatgcctttatgccatttgcctggaagttcaaagccttcctggatgaagcccaaaaaataaagggactcgtcatcgagtactttgagtcacaaatcagccaagtgtgcatgtggtttttttccaagtacgcacaagagtggaacatttcgttttacgagtgtgagatgtttgaaatacaaatctgccaagagcttcctccacattgggtacagggaagcggcggtctggtgctgccaaaggttagtcccttgtacccggcgaactcaggaaagttcactcgatttcgctacaaacctgcagcactcggcctggagccgcctctgccgccgcggagcttcccgaacctcttcagccgcccggagccgctcccggagcccggccgtagaaggctgcaatcgcagcccgggagccccgcagcccgcgccccgagcccgccgccgcccttcgaggggcgccccaggccgcgccatggtgaaggtggcggttcaactccgctctggcccagaaggaggccaagaaggacgagcccaagagcggcgaggaggcgctcatcatcccccccgacgccgtcgcggttggactgcaaggacccagatgatgtggtaccagttggccaaagaagagcctggtgttggtgcatgtgctttggactagcattttatgcttgcaggtgttattctaaggaggagcatacttgtacaaatattttgcacttcaaccagatgacgtgtactactgtggaataaagtacatcaaggaatgatgtcatcttaaatgaagcccttctgcagatgccccagctgcttctctaccagacaattgaagaaaatattaaaatctttgaagaaagaagaagtttgaattttatcagtgtgcctgttccagagttttgcagatagtgatcctgccaaaattgttcaagactttaaccaggaaacttaccggccctatttagattttaacctgggataagtgttatgtgatcccttttgaacacttccatgtgttatgccaccccgaaaaccttactggagttacttattaacatgaaaggctgggaacctatttgccctcagcccctatctggattccatgaggcacatgggttatttactggatcgcattggaaaacattgatcacccgggtttcctttatttatcgactgtgtcatgacaaggaaacttacaaacttgcaacgcagagaaactattaaaggtattcagaaacgtgaagccagcaattgtttcgcaattcggcattttcgaaaacaaatttgccgtggaaacctttaatttgttcttgaacagtcaagaaaaacattattgaggaaaattaatatcacagcataaccccaccctttacaatttggtgcaggtgattaattttttaaaggcttctttcatgtaagtagcaaatcagggctttactatcttttcatctcattaattcaattaaaaccattaccttaaaatttttttctttcgaagtgtggtgtcttttatatttgaattagtaactgtatgaagtcatagataataggtacatgtcaccttaggtagtaggaagaattacaatttactttaaatccatttatctggatttttatgttttattagcattttcaagaagacggattatctagagaataatcatatatatgcatacgtaaaaatggaccacagtgacttatttgtagttggtaggtgccccggctacctagtttgttagtgcaattgaggcccccattttaattttcctctaattaaaatgtgcagtattttcagtgtcaaatatatttaactatttagagaatgatttccacctttatgttttaatatcctaggcatctgctgtaataatattttagaaaatgtttggaatttaagaaataacttgtgttacctaatttgtataacccatatctgtgcaatggaatataaatatcacaaagttgtttaactagactgcgtgttgtttttcccgtataataaaaccaaagaatagtttggttcttcaaatcttaagagaatccacataaaagaagaaactattttttaaaaattcacttctatatatacaatgagtaaaatcacaagattttttctttaaataaaaataagtcattttaataactaaaaaaaaaaaaaaaaaaa

SEQ ID NO: 154472 - DNA, 1675 bp, Homo sapiens
gggtcgacccggatcgcatctgtgaggtcgccctcagttgacaggcggggaaactgaggccgggggggctcgactcaaggtcacgcagctcatcggcggcagggctggaccgagaccagggcctacatcgggtggccttcctcccgaaaaggaggactggagggacgaggatggacaggtctgctaccgctgccacggccccccctgctgccccggctggggagggtggtccccctgcaccccctccaaacctcaccagtaacaggagactgcagcagacacaggcccaggtggatgatgtggtggacatcatgagggtgaacgtggacaaggtcttggagcgagaccagaagcagtcggagctggacgaccggtgccagatgcactccaggcgggggcctcccagttttgaaacaagcgcagccaagctcaagcgcaaatacttggtggaaaaacctcaagattgatgatcatcttgggagtgatttgcgccatcatcctcatcatcatcatagtttactttcagcacttaaatccccgaggagtctgccctgcctagagaagggcctctcccccaacccttcagccgttcctccacctctcagccatatctttcagcccccctcttcccctgggatccgtgtgtgtgtgtgtccgtgtgtgtgtccccctgttaaatagccagctgttatttatacatatataatattatatatatttggtctgtttgttagttttattactagaggaatttttccggttgtccttaacaccccttcctgaggttcccttcacccctctctcttgccttccttccctttccctttcttcctgactagccccaagtcccttcatttgcatctgctatgcaataagtccctctcctttccttcttcttccctcaagatttaagctgatccttcctcccaccctgggccttcctttcctctttcctccccactccccagctggctgacaccctctcttggactcagtttttccatctacaaagcaaggggctagacaggtaggttctgaggtcccttccgctccatggtatggccttgaagccacagaccctaatcctctgagcctctgagaccgcaagctctcaaataatggggtggttggcttcctggtcatgtctcaagcccctggtcctttcctttctcccactcctcaattccagggttctcagactgggctcttaggcctaaagggtcctcaatggatacaccagctttcctatttccaaatgttaacaagactgccaagaactaggcaaaatgcaggctaaataacatcaaagtttttggctctagatgaatcagaattgccattaagcagcaatatgtgtttttggctgaagagtaaaaactagattaatgaccttcaaaacctagaatccactggggaaacctctccagggaaagggccccggccattctcaccctactcacctatgatgatgatgaggatgatggcgcaaatcactcccaagatgatcatcatcttgaggtttttccaccagtatttgcgcttgagcttggctgcgcttgtttcaaactgggaggcccccgcctggagtgcatctgcacggtcgtccagctccgacagcttctggtctcgctccaggaccttgtccaccgttcaccctcatgatgtccaccacctc

SEQ ID NO: 154473 - DNA, 912 bp, Homo sapiens
  misc_feature (1)...(912): n = a,t,c or g
tgtctgcctcttgaaaatgcccaagtaacaaaacattgctaataccccaatgcggttttaatggttaaggaaggcctatctgaagaagtaattgttgcaatcatatctaaagtgctgggattacaggtatgagccaccgcaccgggcctgttctatttttctagttaagggaactgaagctcagagaggtgtcaccagcaggtgttcattcccatgccagccttgccccccggcttcttcccaggcaggctcctgcgtgcccactggctccagcctggtcctctggtctcttggctgcttcactcctgctctttgtcccgactctggccctgcttacaggggccactacctgctggtgcctccataacaagcgtctggccgttgaagacccctggcatgggcaggggcctttgggggtctggtttccacaaggcttatccatggcagaaccctcgttttattttaactctttgccccctacaaacaaacagcagtacttgcccagaacccattcttgggattcaggaggtcggggcgacctgccttggcctctggccgcacccaggagggtggggttggatctgtgtagttgccaggcccacacctgccagcagggggctgactggatccatgctttactgtgtttaatgggggtaacaggggtccctacagccctcccagctaaacatttggaacaaaacaccagcccttttgtagtggatgcagaataaaattgttaatccaatcacctccnnnnnnnnnnnnnnnnnnnnnnnnnnnnnnnnnnnnnnnnnnnnnnnnnnnnnnnntgannnnnnnnnnnacnnnnnnnnnncnnnnnnnnnnnnnggggggggataatttttttgtggggcgccggcccttttaaaaaagctgaaggggaaaaacccc

SEQ ID NO: 154474 - DNA, 1275 bp, Homo sapiens; identical to SEQ ID NO: 122183

SEQ ID NO: 154475 - DNA, 1611 bp, Homo sapiens
aaagaggtttaattgactcacaattttgcaggctttataggaaacatggcgctgacgtctgttcaccctctcgggaaacctgaggaaggttatatttgatggtgggaggtgaagggcatgtcacatggccagaagaacaaacaagagggaggtgccattcactttcgtgcgtgcgtgtgcgtgatggagtctcactctgtcacccaggctagagtgcagtggcgcgatctcggctcactgcaacctccgcctccagggttcaagcaattctcctgactcagcctctcgagtagctggtactaccagtacccgccacgaagcccagctaatttttgtatttttggcagaaacagggtttcaccatgttggccaggctgctcttgaactcctgacctcaagtgatccgcccacctcagcctcccaaagtgcagatatgctttacaaatgaaatgagggtggcagaagcttcaccagagttcagtcactacttgagagtttatattggaaagaaatcgtataaatgtatgtgctagaggcttccccgaggtgtctgaactcactagacctcagaatatacatctttgacaaatgtaatgtgtgtgctaagactttttacccgaacatccaaatggaaacatcagagtattcatactggagaacagtcttacaaatgtaacgaatgtggtaagcctttttaaaaatcaaatgggctgggtatggtggctcacacctgtaatcccagcactttgggaggccgaggtgggtggatcacctaagagcccttatattttggattcttacgagctaacccgggcttccaccctgactctcatcactaccacacccatgtgtctttcctctctccgtctccctgagacgccagtgaaccacctgggcttggaatccagagccccggaacaccttgcagtacttgcccgaagcaacgcgccaacagcgggagggagacgcagacgcgaagaccggcgagaggatgtgcgctctcgcgcccgacgaggtggatttggctgtccaccgagctccggcgcctgtcgttctaattgggtttggatttgcaccgttaaggaggggggaagagaaggaagaggcgggcgaggaaggcgagtccagctagcggctgttgcggggaccgtagccccagctgcagctccgaagaatcccccgccacggtttcggtggagcgtctgggcacgggatggagtgaaagagcgagtgcctctccaagcgggggtgggagggggtcaggctgtgcagaggagagagacagcgagaagaagccgcggctggctactgcgaatttgggattcgattgggagggaccgctcactcgggggaaatggattctttaccacggctgaccagcgttttgactttgctgttctctggcttgtggcatttaggattaacagcgacaaacttggctcatctctgaatgcagtgcctcggatttgcagtataccaagcaccccacgatacgtggctctgcgttctgccctaggcagaaggctccagttggggtatcttgcaaccaatgggcaccggtttaacaggattgggagttttggcctaagagtcatggaccaatgttgttaa

SEQ ID NO: 154476 - DNA, 1128 bp, Homo sapiens
ccgctatcggtacggaatttccgggtcgacgatttcgttgccgatcgggctggccgccccccgcgagcaccgcgctgcagacgaagcccgcgcgtgatcccggtgccgggggacctcaaagcagaagctctgaattcacctctcatctgacgactgacagctgctgccaccgccagcctctgtcccttgcccaggcctgtcacacggctgcctctcagcaggggcagtaaaatgaaagagggcatgtctaataacagcaccactaggcatctccaagcccaggaaagctgtggagcagctaaagatggaagcctgtatggacagggtcaaggtctcccaggcagctgcggaccctcctggcctactgtgaagctcacgtgcgggaagatcctctcatcattccagtgcctgcatcagaaaacccctttcgcgagaagaagttcttttgtaccattctctaactccgtgtgtgatgaaaacgcctccttttctgaccttcaaagtcccctgtagagaccatgcatgctctaagccttagggagtgagaccaacacccatccctgcccagccaacagtggccggggcttgtcttatgtttccatctgttttcttcgtggcattcaatttcatttttttccttttcattttcatgttattttcattattggcaaagaaaatcaaaatgtttatagccaaataacaaatgtgccatgtaaaagtaagtctggacttaagagtttaaaatttttaaacatcagtttccaagtttatatcatattaatacatttcagtggataatttatttaaaaaaaaaaactatgcctaaatatcccttatttgtaatattcagtatcaaattagagcattttgaccaactgaaacatattaccgttttcatctcctttccctggagaaaagcaactgcaaaaggttctggattttcctgcatttccatcatccctaggaaaaagacaccaccccacaggattgggaatgggttttcttttgtttttttgttgttgttgttgttttgaggtgggagtctcgctctgttcacccggggtgggagtgccatgggcgtggacctcaggctcactggcggacctccacctcccgggggtttcaggc

SEQ ID NO: 154477 - DNA, 447 bp, Homo sapiens
tttccagtgtgctggaattcggaggctgcagcagcggaagaccccagtccagatccaggactgagatcccagaaccatgaacctggccatcagcatcgctctcctgctaacaggtgggtgggaggcccctgtgccgcaagcccctccagtttgaaggaggcactgctggtgccagtcttgcaggtctcccgagggcagaaggtgaccagcctaacggcctgcctagtggaccagagccttcgtctggactgccgccatgagaataccagcagttcacccatccagtacgagttcagcctgacccgtgagacaaagaagcacgtgctctttggcactgtgggggtgcctgagcacacataccgctcccgaaccaacttcaccagcaaatacaacatgaaggtcctctacttatccgccttcactagcaaggacgagggcacctacacg

SEQ ID NO: 154478 - DNA, 1941 bp, Homo sapiens
  misc_feature (1)...(1941): n = a,t,c or g
atgtcccagctctcctccaccctgaagcgctacacagaatcggcccgctacacagatgcccactatgccaagtcgggctatggtgcctacaccccatcctcctatggggccaatctggctgcctccttactggagaaggagaaacttggtttcaagccggtccccaccagcagcttcctcacccgtccccgtacctatggcccctcctccctcctggactatgaccggggccgccccctgctgagacccgacatcactgggggtggtaagcgggcagagagccagacccggggtactgagcggcctttaggcagtggcctcagcgggggcagcggattcccttatggagtgaccaacaactgcctcagctacctgcccatcaatgcctatgaccagggggtgaccctaacccagaagctggacagccaatcagacctggcccgggatttctccagcctccggacctcagatagctaccggatagaccccaggaacctgggccgcagccccatgctggcccggacgcgcaaggagctctgcaccctgcagnngctctaccagacagccagctgccctgaatacctggtcgactacctggagaactatggtcgcaagggcagtgcatctcaggtgccctcccaggcccctccctcacgagtccctgaaatcatcagcccaacctaccgacccattggccgctacacgctgtgggagacgggaaagggtcaggcccctgggcccagccgctccagctccccgggaagagacggcatgcaactcttggcctgtgtgagcctgggtgagaggtctgtcctccctctggccttggtgtcatcctctgagaaacgggctgatgtctgctctgcctgcatcgcaggcctcggcttttccatctgcacactggagatgataacagtacctgtcttagaggatggaacttggctgtgtgcccctaccgccctcaccatcagacaaattcatgtcagtgtcagcattgacgatattctcccaagagggaaagtctttagagaagatgtcatcatcatttacaaggcaaaacatagaggggaggtgagcagcccctaccactacctccagctcagtcccattctaaaggcagccagtgtccactctgcccagaatgtcgtggacaccttactttctgagctccaaaccggcactgatccccgaatcctccctcccggatccccgacaggtggcacgtacctgcctcttcttggaggatggacgagtcgaaccgggcacaagcatggagctgcggtgcacaaaaacactctccacaccaagctgctgctgctgggggatggagggatggcgtcagcgattcaagactgtttttcctacctgttcagcacttctttcagcgatatgaagttaaatccagatccaggactgagatcccagaaccatgaacctggccatcagcatcgctctcctgctaacagtttgaaggaggcactgctggtgccagtcttgcaggtctcccgagggcagaaggtgaccagcctaacggcctgcctagtggaccagagccttcgtctggactgccgccatgagaataccagcagttcacccatccagtacgagttcagcctgacccgtgagacaaagaagcacgtgctctttggcactgtgggggtgcctgagcacacataccgctcccgaaccaacttcaccagcaaatacaacatgaaggtcctctacttatccgccttcactagcaaggacgagggcacctacacgtgtgcactccaccactctggccattccccacccatctcctcccagaacgtcacagtgctcagagacaaactggtcaagtgtgagggcatcagcctgctggctcagaacacctcgtggctgctgctgctcctgctctccctctccctcctccaggccacggatttcatgtccctgtga

SEQ ID NO: 154479 - DNA, 683 bp, Homo sapiens
aaggacgagaagctcactgtgacccaggacctccctgtgaatgatggaaaacctcacatcgtccacttccagtatgaggtcaccgaggtgaaggtctcttcttgggatgcagtcctgtccagccagagcctgtttgtagaaatcccagatggattattagctgatgggagcaaagaaggattgttagcactgctagagtttgctgaagagaagatgaaagtgaactatgtcttcatctgcttcaggaagggccgagaagacagagctccactcctgaagaccttcagcttcttgggctttgagattgtacgtccaggccatccctgtgtcccctctcggccagatgtgatgttcatggtttatcccctggaccagaacttgtccgatgaggactaatagtcatagaggatgctttacccaagagccacagtgggggaagaggggaagttaggcagccctgggacttctgcggggcctgagcaagccatggagtgagacccaggagccggacacttctcaggaaatggcttttcccaacccccagcccccacccggtggttcttcctgttctgtgactgtgtatagtgccaccacagcttatggcatctcattgaggacaaagaaaactgcacaataaaaccaagcctctggaaaaaaaaaaaaaaaaaaaaaaaaaaaaaaaa

SEQ ID NO: 154480 - DNA, 2493 bp, Homo sapiens
cggcgatgagaccgttggacactgataacctcccttggcccgaggagaacaggtcagaagaaagggttaaagccttaaaaggggaacttccattgcggggctcagggaggaggataatggtctttgggctgccggaccctgatccccggggtcccgaacccttccgtccctggccagggctgccaaccacagggggagggcccccttccgccgcaacctggcactctcacaccaatgcgggaccgccttctcttttttcctcacccagcaccccaccctggcgtgctttctcccccaatctccgactttgattggctgagcccccggctccccgctcccccttttctccattcccggtgaaaactgcgggctccgagctgggtgcagcaaccggaggcggcggcgcgtctggaggaggctgcagcagcggaagaccccagtccagatccaggactgagatcccagaaccatgaacctggccatcagcatcgctctcctgctaacagtcttgcaggtctcccgagggcagaaggtgaccagcctaacggcctgcctagtggaccagagccttcgtctggactgccgccatgagaatacccagcagtttcacccatccagtacgagttcagcctgacccgtgagacaaagaagcacgtgctctttggcactgtgggggtgcctgagcacacataccgctcccgaaccaacttcaccagcaaatacaacatgaaggtcctctacttatccgccttcactaggcaaggacgagggcacctacacgtgtgcactccaccactctggccattccccacccattttcctccccagaacgtcccagtgttcagagaccacggggtcaagttgtgagggcatcagcctgctggcttcagaacgcctcgtggctgttggttgctcctgctctccctctccctcctccagggccacggatttcatgtccctgtgactggtggggcccatgggaggagacaggaagcctcaagttccagtgcagagatcctacttctctgagtcagctgaccccctccccgcaatccctcaaaccttgaggagaaattgggaccccaccccttcatcaggaagttccaagtgctgcatgcgattatctaccccacgtccaacgcggcccgcctcaccctctcccgcacacctctggctgttctttttgtacttttttgttccagagctggcttctgtcctggtttatttaggttttatccttcccttttctttgagagttcgtgaagagggaagcccaggattggggacctgatggagagtgagagcatgtgaggggtaagtgggatggtggggtacccagcccactggaggggtcatccttgcccatcgggaccagaaaccctgggagagacttggatgaggagtggttgggctgtgcatgggccatagcacggacatggtctgtcctgacagcactcctcggcaggcatggctggtgcctgaagaccccagatgtgagggcaccaccaagaatttgtggcctaccttgtgagggagagaactgagcatctccagcattctcagccacaaccagaaaaaaataaaaagggcagccctccttaccactgtggaagtccctcagaggccttggggcatgacccagtgaagatgcaggttttgacccaggaaaagcagccctagttggagggtttgagaaggaggtaaagggatgagggttcatcatccctccctgcctaaggaagctaaaagcattggccctgctggcccctccctgccttccacccaacagtggagacgggctacaaaggaaggacaagaccctctccaggctgtccccaagctcccccaaagagctttccaagagctctgaacccaaccagccttccaaagtcaaggtgggggttggagtccccagagcttgcacaggggttttggcccaaagtttcttaagggaggcaatttccttcccctttcgcccatcagttgccagccccttgctggctggtgcctggagccccttcagacagcccccctgccccgcaggcctgccttctcaaaggacttctgcgggggctgaggcaaagccatgggagtgagaccccaggagccggacacttctcaggaaatggcttttcccaacccccagccccccacccggtggttcttcctgtactgtgactgtggatagggccaccacagcttatggcatctcattgaggacaaagaaaactgcacaataaaaccaagcctctggaatctgtcctcgtgtccacctggccttcgctcctccagcagtgcctgcctgcccccgcttcgctggggtctccacgggtgaggctggggaacgccacctcttcctcttccctgacttctccccaaccacttagtagcaacgctaccccaggggctaatggctgcacactgggcttcttttcagaatgaccctaacgagacacatttgcccaaataaacgaacatcccatgtctgctgac

SEQ ID NO: 154481 - DNA, 580 bp, Homo sapiens
cactgatctactctttaatagaagattgtaaaaggttatacaaggcgtatggaaatcttacttcgtggtcaaactgattaaaattagatttgtttataaggttttattagctttaacattaataatacccctaaaacattaataagagatcaaagatttttgtttaccttttaagtaaactacaggaaaaaaaaaggagagagacagacatttagttggtttcctgctgtcttcattggatcttacagttggggaaactgagtctccttcatatcaatgagtaaaggtctttggtgttttggttttttggttttttggaaatctttgaattatcgttttggctaaatgaataactattttataatgaaccgcgatcctattttgtggcatcaaatgttttaaacttttgatattcgactgatgaacttcccaacatcaagatttcaacttctggccggctacagtggctcatgtctataatcccagcactttgggaggctgagaccaggcaggcagatcatttgagttcaggaatttgagattagtctggacaacatagtgagacctcgtctctacaaaa

SEQ ID NO: 154482 - DNA, 1220 bp, Homo sapiens
gtgccaggaaacctcacccagtagctgccaggagcccctgcacccctcatgccttgaggctggtgatgggagagggaggggagtaaaggtaataaaggccttgccagagtccagtggcgcctttacagtctctgccatccccctcccccactttggggctgcctgccccaggtatagggatccaccccaccccagctctatggggaggacaaagggagagtcaaagagagaggccaaaagcccatgttgttgggtgtcagacacatgagccagaagggggatgtcatctccctccttagcagttagatatcccaaaaagcaggagtgtgggcagcagacaaccctagctcctgatactgctctacccgagcccactgcaaggcagggggagggtcctctaggcagctgaggcctgtgtttccctgagcatcttttaccctctcatcagagcccatccctggaccttccagaggcctgagtgggggacttgcaagggctgatgggtaacccctcccacctgctgctactccctgccccaaaaagcagcttggctcacaagcctgggcatgcagggcagcacgaggagctgagcagggagtgtgggggtggagaaagcaccccgcaccatccaggggcagagtagacaagggtagcaccaaacagaaggacccctccccagcacacacaacatccaccctcaattaccagatgcactcctgctccctaaaagaagacacacacacacacacacacacacacacacacacacacacacacacacacacacacggcaacataatattcctgggggtcccagccctgaccaggaagaagctggacaggtggtggagaagaaggctgccaatccctcccacaatcccactctgcaagacagaagggtgagcagcattctttcctgctgcaagaggaagttggaagctccatccccagaacagatctcgatggtaggccctagaggaagtaacttgtggttcccccattggcagaggcggcaggaaccagcaaagtgtagttttggcttgaaggagcaatggggaggggacttcagcaggatgaacagacttatgggtccaggggtaaatccatcgacctctttcccgtggagcaggaagttgctccacgggaaagatgtcagatgttggttgagacatcgtgcaaagtgcttgagtgccaggtgcccaaggatctggcgggtctgg

SEQ ID NO: 154483 - DNA, 1807 bp, Homo sapiens
tttttttttttttttttgagtttataaatatataactatatttattttgaatattaaatagtttttaaattacaagcaatttattgaatcacactatgcatccatatacagtaaaaatcttaccattttagaaaggtacacaatttaaactgaaagttcattgcatattatattgccatgaacctcttctgctctgtgttaaagcacagcagggaggcctgggtgggtgtgacggccccctacgtcctcctctgcagacggaatccgacggtgggatccatacaccagccccatgatcaaaattccggctgggccccacgtagggcctgagtgcttaaccaggcacgtgtccacaccgggtcaaactgattctttcacagggctgttggggtaatttcaacactgttcaatggcatcctttaaggaatttcctttataggtggaaagaggaatggttccttggttaataaagacatgagacaaaccccggtgctctttaggaatattgttttggagatttccatcggaagtcactgcgtatacccattctttttttaagggctacttcccataaggctccatgttttggaagccaactcttaacagaagcccaacctctgggcgtctaaacccttggttcacttctggaattttcaggatgatgggctgagtcaaggaagaggcaggcgctgccttccttccaccggggccctggggacaggcatgcagtaggtccttaactctacaaataccttattttcgggaaacaggaataaaaggaggggtttggaaaggccttttacagcagcaagacaatccaagacttttcttagataaccccttttctatagaaccgcctctaccctgtacattttaaaaatagaacgaacgttgtttgcaattcggcttggtcgagctttctgcacccttacggtgaatggcttctcgtccacacacacaggccaagtctcagaaggatgtggggagcactttttctgggttgccctttctggcttattgacaagggtcattccaaaaagacaaattcgcatcctagctagtaaggaaatgaaaactagattatttttggttatggggtttaaaatggtacaaactcccacccaaaacagggactaattccagattggattcctggggtggctacccccatggaagggccagaaaaatattcctaaccttcccccccacattatcctagagaatgcccactgatttagttcattgtacaacttattagaacaagtacattttgaaaaccccacccactgataaccaacttaattagttaaaaaataacaaaacaaacaacaaaaacctgaactgaacacagcacatgctgacatttcaaaaatgggctgcaatttttattctacttaaatttcctgtgtattgcttggatttcaaaaaaacatgttaacccacgtgttgattataaatataaaatctcgcccctccatgcaacaccacactaagatccactaccccccaactcaatgtataaaatgcttttttggcaattaattatgagtgactcaaaataaataaaaatgggaattatgttatgaaaaaaattgtttttttttttgagacagggtctggctgttacccaggctagagtacagtggcatggtctcagctcactgcaacacccatctcctgggctctagccaatcctcccacctcagcctcccaagcagctgggactacaggtgcacaccactatgtgccccagctagtatatatatatatatatattttgggatttttagtagagacgaggtttcgc

SEQ ID NO: 154484 - DNA, 434 bp, Homo sapiens
  misc_feature (1)...(434): n = a,t,c or g
cacaaactttaaatttataataattatgattcttgcagttttcaagtaatttgttaaatgcctattcaacacagacagatttttattttcagctgtggcttgtaaatgcctacaaactgattcatgttggtggtcgttatgacactttctgtgaattggtgaataaatatgattttagaatttcacnnnnnnnnnnnnnnnnnnnnnggggggggccgttttaaagaacccttggggggcccaaatttacccggggctggcaaggtattatttttttccttatggggggccgattaaaaacctgggcccggcccgtgttttaaaaccgccggaatgggaaaatctgttacttgggaatttttggaaagaacctttcttttgggggggggacatattggcccaacctccctccaaaaattaaaggctttagggaa

SEQ ID NO: 154485 - DNA, 1033 bp, Homo sapiens
  misc_feature (1)...(1033): n = a,t,c or g
ggaggaaagccaccttgacagcccaggtccctccaggtcacccacagccagtttcaggaaggctgcccctctctcccactaagttctggcctgaagggacctgctttcttggcctggcttccacctctccactcctgtgtctacctggccagtggagtggtccatgctaagtctaacactcctgggagctcaggaggcttctgagcttctcctgtactgtgcatcgtgagggccagagacaggaatgtaaggattggcaactgtgttaacctttcaagtttatcttaataacccaggtaatcagggacccattgttctcttcagaaccctatctgggagagaaggcgaaccaccctccgggtttccatcatgtcaaaggtcaacaggcatcccatgtgtgcaaaacccatcctgcccccagctgccctccacagactgctgtctcccttgtccctccctcggccctgccccccacttcaggggctgctgtgagatggaattcccaggaaagaacttcaggtgtctggaccctttctatctagataatatttttagattcttctgctccctagtgacctaccctgggggcaaagaaattgcaaggacttttttttaagggtcagagttttcaaaacaaaagcatctttcccttagaaatttttgtgaattgtttgaacttgtgcctgttttaaattaaattgagtgttcaaagcnnnnnnnnnnnnnggggggcgcccgttttaaagaacccctgggggggcccaaattttacccggggctggcaaggtaaaatttttttccttatggggggccatataaaaacctccctgggaatttttggaaaagaaccttttttttggggggggaacatattggcccaacctccctacagaaatttaagggctctagggaaaataaaaaattttaaaggggtaaagggggtaaaccaacctgcatatcctggcggctggaaagtttgctttccggggttggttttaggaaatttttatccccgggggctggggtttattat

SEQ ID NO: 154486 - DNA, 2196 bp, Homo sapiens
gatatttttacatattcatgtaagacaatgtaaattgtctttctgcaataaattttttggatgcaaatttagatttcaaaagctttttgatgttataaaggagttgaggaacaaaaagctctttgaaatagctcacctagacctgttaatgtaatatattctttctgaattaagcaaaattttttttgtcttttaagactagaactaatccctctagcttttttactggaactttggggaaaaagaacaaatacaaatatacaaatgatatgaacaatatggtaataatcttttgcaacttaatatgttacatagtcatatgacttgggtcttgggaagaaaaaggaattgttttggtgctgaataaatattagaaatcaagtgacagagaagatgaaggtaaaattgtggcacagtttcagagaatgccgttaatgataacgtgttatttgtctcaaattcttagccctgggcttgcctcttcagagtggggttaccggcgagagggcaagcatgtaattaagagacactctagaggcatatggaatatagtttgtataaaacatacctgctgattagaaaaatggtaaaaatgaaaatacctttgtacatcatcttaagagagcttatatataaactaaatgggcaggctccatcgtctacctttctttttcttttcttcacatgtttatgtcttttttgttattagtcagacatttttagccctctgtatgctcattcttgtagttctatttctattgaaacttcctccaaaacttttctctgaattacccttgttgaaactgacctttcttccgtgtgaactcctacacttgcatctcctatttcaggatttggcatactttttctttaatgggctaagaaagtaaatatcttcagctttggggggcatatgatcccaatagcatcaacttaactctgctaactggaaggcaaaagtgtatcatcttactcgtctttataaactccacagcactctgcatagatatgaccatgtttataaggaactcaataaataattttgacacaaacatgaaattctagaagggcagacactgacaactagtaaggaagttgatcatgagtaactttgtattcagtgccaccttaacaagaattgtaaagaggataaacctttctaggaaggttgatgcgtgttgggtgaggaaggagcatctctcaggagggtaaacagtagctgtggttttgctgagagattttggctgtgagtgacaagcctatatcaaaaagaaaagtggcttatcaatctcagtttttattgctcaaagcaattctttactcctattttttccaaattccattgtttttactctttagagctcttatccgtcagagtgtagtctgcatatttctttattatcattgccatgtgactttctttggtgacaagttcagcgatatttcaagcatgatgttttgagtttgagaaatgtatttgtgaggacacatcagtttaattaaaaaagtgtgagtactatggtcattaagttattcagagtgagatttctgagaggagaagagagaatgtagatgggcagttattgagagtggggctataggacaaaaagaagaaaagtatgggttaacattgccaaataaagggtcatacagccttgctttttgctgggagttaggcaaaaatcattctccctatggatagttttaggatgttccccccagctccatttgtattattgagttttcagctgggtatatattataataacagtcaacatgatgtaggggctcagtattacatgggcagggctatactaattggcttcaatatgccttatctcattattctgtgagatagaattgtctcctcattttttagttgaaataactgaagtttaaagcaattgaatcatctgcccaaggataagctgctggtgagagcagagttgggatttgaagtcgagttagaccccagtgatcacagtcttgacgattaaattcttccagctttcatttttcactgagataatggtagtgatagtactgacctctaatgtgtgcatttgtgggtatgtgggccattcagctttaatccccagaagacaaggcttattccttttcttatttttggtcatgttttatttttccattgcttttaacaggattaccaaaggcaccactcagtagtcagcaaag

SEQ ID NO: 154487 - DNA, 551 bp, Homo sapiens
ttgcgaccgctgcgcgtccttgcccgggcttggggcgccgcgctggggaaagccgggggcccggacacattggcgtgagacctcgggagtacgttgtgccaaatcattgccacttgccacatgagtgtaaatgatggcggatgccaagtatgtcctctgccgatgggaaaagcgattatggcctgcgaaggttttggcccgaaccgcgacttcaacaaaaaataagagaagaaaggaatattttctagctgtgcaaatcctctccctagaggaaaagttaagtgttgtgttgttttaatactgttttttcccgtgtagatttctgatacttcaatcccctactcccccaaaacagttgaagcccagcccactcttaatgggcttattcaccatttgtgtaattcattaatgctcataataacctcatgagaaagcaactagtttgattttatggtcagtttggaagctgaagatccaaacgaggcattctgtgagatctatggagagattggtacaaacactgaatacatgtaaattatactcagggtaga

SEQ ID NO: 154488 - DNA, 1940 bp, Homo sapiens
ttgcccgggcttggggcgccgcgctggggaaagccgggggcccggacacattggcgtgagacctgggagtacgttgtgccaaatcattgccacttgccacatgagtgtaaatgatggcggatgccaagtatgtcctctgccgatgggaaaagcgattatggcctgcgaaggttttggcccgaaccgcgacttcaacaaaaaataagagaagaaaggaatattttctagctgtgcaaatcctctccctagaggaaaagaattaaggtgaaaagcactgaagttgagatcctagagaagtctcaaattgaagccattgcttcctcgttagcctcacagaatgaggttcctgcggcgcacccctggaagaactggcctacagacggtcgcttcgcgtggctctggacgttctgagcgagggctcgatttggagtcaagaaagctctgcagggacaggtagagctgaccggtctctgcgagggaagcccatggagcatgtctcctcgccctgtgattcgaactcctcatctcttccccgcggagacgtgttgggcagttccagacctcacaggaggaggccatgtgtgcaacaaagcctgtcaagttcgttcacttgtgaaaaggaccccgagtgcaaagtggaccacaagaaggggctcaggaaaagtgaaaacccaagaggcccgttggtcctcccagctggaggtggtgcccaagatgagagtgggtccagaatccaccacaaaaattggactcttgcaagtaagaggggaagaaactcagcgcagaaggctagcttgtgcctgaatggatcttccctttcagaggacgacacggagagagacatggggagcaaaggaggcagctgggcagccccgtccttgccctccggggtcagggaggacgatccctgtgccaacgctgagggacacgaccccggtctgccgttgggcagcctcactgcgcccccagcccctgagccctcggcctgctcagagcctggagaatgccctgcgaaaaagaggccgcgcctggatggcagccaaaggccgcctgccgtgcagctggagcccatggcagcaggggccgcaccatcccccgggccggggccagggcccagagagtctgtgaccccgcgcagcaccgccaggctgggcccgcctccctcccacgcctctgcggatgcaaccagatgtcttccttgcccggattcccagaagctggagaaagagtgccagtcttccgaagagtccatggggtctaattccatgcgttctatcctggaggaagacgaggaagacgaggagccaccaagagtccttttataccacgaaccacgttcgtttgaagtaggaatgctagtctggcataaacataaaaaataccccttctggccagcagtggtcagaagcgtcaggcagagagataagaaagcaagtgtgctatacatcgaaggacacatgaacccgaaaatgaaaggtttcacagtgtctcttaaaagtttaaagcactttgattgtaaagagaaacagacgcttctgaatcaagccagggaggacttcaaccaggacatcggctggtgtgtctccctcatcaccgactacagggtccggttaggtacgtggggtgctggggaggggtggagctgggcagcaggcgtccagcctctgaagaccccttggacgggctgggccggagctgcctggaggcggggcatatttccgtgggcctggggcattccctgtgggtgggctggggttctggcctggcctgattatttcctaaacagagacgccgggccagcccctggaacacacttcctgggactcctcttaggtctacacagtgctctctcccctccaccccctgcaggctgcgggtcttttgctggctctttcctggaatattacgcggctgatataagtaagtctacaggctgtatt

SEQ ID NO: 154489 - DNA, 3498 bp, Homo sapiens
  misc_feature (1)...(3498): n = a,t,c or g
atggagcgaccgctccggggctcccgccacccgcggctgtttccggtgccccccggggtcttgggaccctcccaaggacacattggcgtgagacctgggagtacgttgtgccaaatcattgccacttgccacatgagtgtaaatgatggcggatgccaagtatgtcctctgccgatgggaaaagcgattatggcctgcgaaggtgacagccattattctgtaacttcaggacttagaaatgactttcgggtgacaaaaacgtctgtgacaggcccatcaattttgaaatatttggtttttgagcctgtcactctaaaccagcgtttaacgttcaaaaggcaaataactgatgaccaggcggcacattgttctgctccaattaaggtgaaaagcactgaagttgagatcctagagaagtctcaaattgaagccattgcttcctcgttagcctcacagaatgaggttcctgcggcacccctggaagaactggcctacagacggtcgcttcgcgtggctctggacgttctgagcgagggctcgatttggagtcaagaaagctctgcagggacaggtagagataataaggtctctgcgagggaagcccatggagcatgtctcctcgccctgtgattcgaactcctcatctcttccccgcggagacgtgttgggcagttccagacctcacaggaggaggccatgtgtgcaacaaagcctgtcaagttcgttcacttgtgaaaaggaccccgagtgcaaagtggaccacaagaaggggctcaggaaaagtgaaaacccaagaggcccgttggtcctcccagctggaggtggtgcccaagatgagagtgggtccagaatccaccacaaaaattggactcttgcaagtaagaggggaggaaactcagcgcagaaggctagcttgtgcctgaatggatcttccctttcagaggacgacacggagagagacatggggagcaaaggaggcagctgggcagccccgtccttgccctccggggtcagggaggacgatccctgtgccaacgctgagggacacgaccccggtctgccgttgggcagcctcactgcgcccccagcccctgagccctcggcctgctcagagcctggagaatgccctgcgaaaaagaggccgcgcctggatggcagccaaaggccgcctgccgtgcagctggagcccatggcagcaggggccgcaccatcccccgggccggggccagggcccagagagtctgtgaccccgcgcagcaccgccaggctgggcccgcctccctcccacgcctctgcggatgcaaccagatgtcttccttgcccggattcccagaagctggagaaagagtgccagtcttccgaagagtccatggggtctaattccatgcgttctatcctggaggaagacgaggaagacgaggagccaccaagagtccttttataccacgaaccacgttcgtttgaagtaggaatgctagtctggcataaacataaaaaataccccttctggccagcagtgtcatgggatgaaagcacacgtggatggatcagccggctgaaagcagcctttagaaccatcgcattgcatatccccaagtcgaacgcgcagaaccggtgtcatctgaccagcccaagccttcgggtccccggtgcccacctgcgttcagaccagcccaagccatcgggtccccggtgcccacctgcgttcagaccagcccaagccatcgggtccccggtgcccacctgcgttcagatcagcccaagccatcgggtccccggtgcccacctgcgttcagatcagcccaagccatcgggtccccggtgcccaccatttgagcagctcagggcccagacctgtgcctggtgcgtttcccatttaccagagggtccctgtgcgaggcgtctgccagagccccctttgtcagggaggaatcaagccagggaggacttcaaccaggacatcggctggtgtgtctccctcatcaccgactacagggtccggttaggctgcgggtcttttgctggctctttcctggaatattacgcggctgatataacatcccgagcctgccctggggccctcatcccatgggccacatccagcgtgtccctgctgtggctggtggctgcacacatcagatgttgtgaagaatgtaggccaggtgcttcttttgcaggctatcctgtccgaaaatccatccagcaggacgtcttggggaccaagcttcctcaactgagcaaggggagccccgaggagcccgtggtggggtgccccctggggcagaggcagccctgccggaaaatgctccccgaccgctcgcgggccgcccgggaccgggccaaccagaagctggtggagtacattgtgaaggccaagggcgcggagagccacctgcgggccatcctaaagagcaggaagccatctcgctggctgcagaccttcctgagctccagccagtacgtgacctgtgtggagacctacctggaggatgaggggcagctggacctggtggtgaagtacctgcagggcgtctaccaggaggtgggggccaaggtgctccagcgcaccaacggcgaccggatccggttcattctggacgtgcttctgcccgaggccatcatctgtgcgatctctgcggtggacgaggtggactacaagacggctgaggagaagtacatcaaggggccttcgctgaagctaccgggaaaaagaaatatttgaacaaccggctccttgaagagcggaaccgggccccgtcggtgagggagccagcccggcctgtgctgttccaacggggcctggcggtgaaaagcgcctccagtgtgccatgagcgtgtctgaaagatggggggctcagggggcacgtttgcgttttggacctgtctgtgccgttctcnctgccgtggcagttccctgatttccatactttctgggagaatccatttcgttaacactgaaagccagttctcttttcctggcagtttttttcattttatttttggcattttttacaagataccgttcgggaaaggcttttgaaaggacggaaagcgtattcactgtgcggccagtactcctggctgtgctgtggtttctcccgacgtgcacatcgatctcgtatgtgtggcatctgatattaaacgggaggttttaagaagcgtctgcccgtgaatcatggagcttcggaagcgggaatggttcttccgggtttgctgttttgtctgtttcccccttgtgtggtttccgcctgcgacagttccagaatttgctctcccactcagtgtgctctgcagctgtgaggaaacagccttcgttagaggcgggagcaggaggacgagccgctgctctgtgtcgtgttttgctgtgggccgcagggagagggagcgggacacgcacctttccagggggcctctgtgtcccgcactgtgtgtgagtggaccgcagcgcgcagccacatgccctgggttgccatgggccaaacccgcttcacctccccc

SEQ ID NO: 154490 - DNA, 488 bp, Homo sapiens
  misc_feature (1)...(488): n = a,t,c or g
gtttaaatgatagcctctgaaaatgagngtcatcgcaannnncnccanncgtncgnccacgcgtccggcaaaaaactgttggattatttattttagaaattcccccctttgtgttggactgcaaattgagtttctttctctttaggcctttcacaactaggactgagaatgtatgtaaaagttctgtgacagtacagaaggaaaacaactttttatgtatagcttctaaaagggnnnnnnnnnnnnnnggagaacccttttgatttccacgggcccatttaaaaactttccactcacaaatttggggttctggattccaggtcgggagttttccaatgttaaggaaaacaaaacgtgcccaccccctttaaaaggagggtatttttttttcctttggctgggcactaccggcgttttctatttctttttcttggggggaattaattnnnnnnnnnnnnnccttttggaccaacttattgcagtttaag

SEQ ID NO: 154491 - DNA, 4016 bp, Homo sapiens
tgcgttaaagattaaacactggagctcttatccaagcttgctcttgcagccaaaagactaattgcaaaggcatcttctcagtgaagggggcggggtgggctagggctgagtggaaatggtgagagagattattgtagaaaatatctcttccgggaacttagggcaaagagttttattttcaggaatcacatccctgtctcccccaacctcagaccaggcccccaatctcctccccacaagaaaaagcaaaggcagtctgaaaacctgttgccaaaggaagggaacacttctgaaggaggaagttgagagtcttaggccaggtcttgaaggagggggtatcaattaagcagagactgattggaaggggacctaacgtagcctatgatagactcctttctgaggtttacctgtttttgtcgcgggcggtggcggggcgggtgcggtaatctagagaggtctgggttgtgtgagatattttgagttgaagaatctatttgactagtaaaaaagttgaactttaaagtggtagctttggggacagaggacatgggggttgcattgcaggagtcagcatggagcagggtgcttgtcacacagtttggatcttgtggtttcttacgcatggggccaaaataaacccaggtgaatggcctatgggagggagagagggaagggagcttgctagagccgaggtagagatgagttctttgagaaagagcgggcgtttgtgattgtgtagggggctgcccatagtggacatcctggtggatgtcctctgtccttaccatccttctcttctctctccagggtaacaagatgctcaactatagtgctcccagtgcagggggttgcctgctggacagaaaggcagtgggcacccctgctggtgggggcttccctcggaggcactcagtcaccctgcccagctccaagttccaccagaaccagctcctcagcagcctcaagggtgagccagcccccgctctgagctcgcgagacagccgcttccgagaccgctccttctcggaagggggcgagcggctgctgcccacccagaagcagcccgggggcggccaggtcaactccagccgctacaagaccggagctgtgccgcccctttgaggaaaacggtgcctgtaagtacggggacaagtgccagttcgcacacggcatccacgagctccgcagcctgacccgccaccccaagtacaagacggagctgtgccgcaccttccacaccatcggcttttgcccctacgggccccgctgccacttcatccacaacgctgaagagcgccgtgccctggccggggcccgggacctctccgctgaccgtccccgcctccagcatagctttagctttgctgggtttcccagtgccgctgccaccgccgctgccaccgggctgctggacagccccacgtccatcaccccaccccctattctgagcgccgatgacctcctgggctcacctaccctgcccgatggcaccaataacccttttgccttctccagccaggagctggcaagcctctttgcccctagcatggggctgcccgggggtggctccccgaccaccttcctcttccggcccatgtccgagtcccctcacatgtttgactctccccccagccctcaggattctctctcggaccaggagggctacctgagcagctccagcagcagccacagtggctcagactccccgaccttggacaactcaagacgcctgcccatcttcagcagactttccatctcagatgactaagccagggtagggagggacctcctgcctactccagcccctaccctgcaccccacatccccataccctcttctccctacccatcccattccccacaggccctacattaacaaggttaagctcaacccctttcccccagcacctcagaatgtgccctccctctccccctcataaccccacctaacataaggacaagtcaatttgtcagtagcttcttctggcttgaaaccccctccctggattttatagcccacttaccagtgcataacagacaagtcccatattttgtcagtagatgcctttttttttccggcttaagccttaagtgccaaatcacaagagaaaaagcagtaacagtttacagaagcaacttagtgccttgtaatctaactttgtcactgtgactacattaccttcttcagcgccagagggcacccgtgggcctccccggagcctctgcccatggcggggtggagacccggaaccagcagccccctccactggcgacacaactgcaccttccctcatttcagtctcccgcacacttattcctcctcccctcttcccggtggcacctctccacctgtaccagcccccccaccccccccacccctgccccttggaagagttgttgccagaccagggttttgggggaaacctgtcttgacattcaaaacctttttcttcccgatctgaacccctgttgactaatcttgcctgggtttgtgtaggtctgcaggaaggaaggctgaaaaagcggacgaagattttgacttaagtgggactttgtgatttaattttttcttttttttaagtggggaggaaggggaagctagatggactaggagagacttgattttggcgctaaagttccccagttcatatgtgacatctttttaaaaaaaataacaacaaaaaaaaaatgagagaaaagctaaaaaaaaaaaaagtaaggggtgagcagttaatggtattcattccacatacaatatctgtgtaaaacgatttcctgtagaagtagctttaatggtttttgctctagaataccgtaggtctatccttagagcactcacgccatgctttcttccctgggttttaaacttcatataactttcaggaaattgggagagcaaaaattttgcttgtcactggcacatccaatattaaaaaagcttatttaacttatcaaaaccgtatttattggcccaaactatgcttttttttggttaattttgttcatatttatccgggatgacaaatcccatggaatatattcttttatgttaaattatgatcttcatattaatccttaaaattttgtgacgtgtccttttcctttttttccacagttttaatatattattccttcaacgacattttttgtaactctacacttttttggttattttattttaaaaaaatgagaaattaatttaaaaaaaatgccaaaaaactgttggattattttattttagaaattcccccctgttgtgttggactgcaaattgagtttctttctctttaggcctttcacaactaggactgagaatgtatgtaaaagttctgtgacagtacagaaggaaaacaactttttatgtatagcttctaaaagggggaaaaaaaaaaaaaaaaaaaaaaaaaaaagagaaacccttttgatttccaggggcccatctcaagacattccactcacagatttgaggttcctggattccaggtctggagttttccaatgttaatgtaaacaggaactgggcacacacacattaagatgaatgtaattattattcctcttggctggtcactaccgtcgctttcatatttctctttcttatgtgtgaaatttatttaaaagcaaaaaaaaacttttgtgtaacgacctatttgcagatttaaaacatcatataaacccccgttttttcaagaaacattgatggtggagctggttttacttggttttggtttgactttgccagtaaggttctccccttgtataccttgcaagtcctggggagggggaggcggagagagagggctgtggctgtgggtggcggcatctctcatccctataagctaagcctatagctcccttccttgatgctggcagtttgctgcacttagaggggacggggtggaggttttctgcaaaggagcctgtacttcctgctgtattacttctgaaaagactgtgcagtgtgttagttgttggctgaatagcagcgggcccagccttgccgacacttgtgtggcc

SEQ ID NO: 154492 - DNA, 1501 bp, Homo sapiens
  misc_feature (1)...(1501): n = a,t,c or g
ctgttttccgggaagaactgnaactgtgggaactgggcccaaagaggnaggggggaaaaaggccacccaactcctagatccattttttaagggagatccaggaggagaggaagaaaaatagaaacgccgtatgtgaaatgggtaatgatatacaacatgggagaaaaaaataaacatccgtggaaccctgcctagcaatttcccacccaatttcccacccaaagcagtgaaccccttaactgacagaaattcagtacaatatacacattaattaacaactccaccattactagggctgctgttgaaagccaaaaaattaactacaatattgaaaaacagaatgcttacaatatctgagaaaaatagagtgaaaaggcaatgttagctaagctcttagctacatccactcttaatggcccccagtatttaaactatcatggattaaagccatgaaaataaaaatttcaatttgaaattttattagcctgttgctaaaatggtcaataaaaacatcaacacgtttgggctttgttggacatagttggaaaactgctctctcatttttaaaactttatttccacttccccagctttgaagatttctatgttaggaaaagccaaactaaatatactggctatggtgtttgtaacaatgctggtttctggaatggtgccatgtcctccccctccctctcctccaactcctttaaaaatatgactatttttgaaatgcagcccgaggagggagcaatcaagggttcagaacaataagcgcccttcacacattcaagttcccagacaccaggtgaacgagcgagctccttgtcgggggcggggccggctgtcctcaccgaattcgcagcgccatcttcctcccgggaccgggccggcttcccttctggccagcgagggagactcccaagcaaaaggcgggtgggggtggcgttcgcttcccacggtggaaagaaccggaggcaaacactgtctggcttagcccgcagcctggaacacaatgtcaggagaccttggggctggagagctggaaaagtcccgggcagcctcaggataacccggaatcccgaagtgctgtcttggggaattattcccaagtgcacaagggacaggctcgatttcttggaaatcctgcgatctggggacgcatccacagaggagctgaactgtgccctgtagagaccagttctcgcctccgaccggtctgtgtgcgcacgctcggggcggtgatggtccttttgagaagagggttgttttcgagtcgggccacagtcactggccatggactcgncgggaagggcatgtcctttctcctctcaagccctttccccgtcccggtttacatctcaaggggaaagcgcaccgggggtctccagccaccgtactaccgctgttgctgtttagatggcgctccgaacgcgtccttttcggcctgggggaatttcctagaattccccgggttgtttggggatgcagaagagagcccctga

SEQ ID NO: 154493 - DNA, 1121 bp, Homo sapiens
gcggccgcctgcgagtgctccaggagctcgccgacctcgtggacgacaaggagtagccgcctaggggctgccggcccctctgcctcccccgcacctcgctcccttcccttccccgcacccggacttcgcagtcagcggttctcaacctctgccccgccccgccacgcgcgtccgccgccggtggcccgggcccgggctgcacccccgcatccccaagccagcggcaggaagtctcaggtttctgcccctttggtcgaaagggcgccgctgcgagcgcctgggctgacagccacagcggtggtgacggtgctgggagaccccgcgtgcgcttttccccttgagatgtaaaccgggaacggggaaggggctgaggggagaaaggacatggccttccccgcgagtccatggccagtgacttgttggcccgacttcgaaaacaaccctcttcttaaaagggaccatcaccgccccgagcgtgcgcacacagaaccggtcggaaggcgagaactggtctctacagggcacaggtcaacttcctctgtggatgcgtccccacatcgcaggattttccaagaaaacgagcctgtcccttgggcacttgggaataatttccccaagacagcacttcgggattccgggttatcctgaggctgcccgggacttttccagctctccagccccaggtctcctgacattgtgatccaggactgcgggctaaaccagacagtgtttgcctccggttctttccaccgtgggaagcgaacgccacccccacccgcctttgcctgcgagactccctcgctggcagaagggaagccggcccggtcccggaaggaagatggcgctgcgaattcgcagaattttagagttggatctttgtctcatggatgctcttaggagacccaccaaccaccaactccttgtattgcaactggaccccctcgacctgggtgaatgtactcttttcagcaaccatatcctccctcctgttgccaggtaaggtgagaagcaattcctctgcctagaagctctgccgggtgaaatatcaggagatcccacccaagctttctcttgcgtgtagcctatatccagcacgggagcataggctaatcctgcagttg

SEQ ID NO: 154494 - DNA, 2048 bp, Homo sapiens
tttttttttttttttttcagttactccttttttaataaatttgaattcattcatcaacaagtttcatattgtatctatcactcaattttgctgttttttcatgtcaaataataccaaaaaattacatcaatgtgcttaagcaaaactgggtttaaatttatctttacaataaaatgaaatcaacatgagaattgattatgacagcaatcgcctattcctactaggattaatcctgtacttaccttaaacacactcactgacttgtgaagtagaaacatgaggacaaacgtgacaaaacatgttcatgggggttgggtcctagggagagggcatacgggagccactctctgggaagggtcattgtttacccaggtgttgggaatttagtatttcaggaaaacatggcgcctttcaatgcagtagaagaggtaatcaatccaaggcacactagctagtgtcctggaaaaatttaattcacctgggcagttctttgccccaagattcgatgttactctaatggctcacactgacagccagagtcaattccaagagtaacaaaatgtttcaccaattgttcagttttgcttacataaaatggccagaaatatgaactggttttcaggtggagagttaaaataagaattaagtgatggtttatactttcaagccaggagattcaaagttggacacattcttgttagaatacaccaatggtgggacaaacaccaatggattatctactagatgctgaaaatgaacacctacaactgcaatgtgccctgtcccccttaaaacccagcccccagactcgtttggcatcacctttgagatgatctcctcagtaaaaatgtcaacgctgtgtttggacaagagagaagtgccctttcagggagtgactgaacatgtcaaagttctgggtgctggcgttaaaaacacaatattgcagatgtacaggtagcttccaaatctaatggaaatattatcatgacatactttctagttcgtttgagaatccaggggaaaatggatgtccgccatggtaatagacagtgaaaccccctcccacagtcccggggttggtgaacaggaataacacttgttttaaggactactcaaagtctatcagtcttcctctgtagggagttatgtagcagggctcttcccattatctcaaggatatctgaatatgggtaataacaaactgtcataacaagattcttctgtagatcttgagcccctgtggcgcattttggaaagacaggactactgaggaaaattaactctttattactttcaattgttaagaaagaaatctcattatatccccaatgataccgttttctgcccttactcaaagaggtctgggtgtgggtaacagccacctcccaacaacgtcagaggtccgggttcagaattcctcaacgcgactcagtcacttgggtctcaaataactactctggagtaacgagaggtcattttaacacaacagagactccaattcaactctcttctgttaacacagtcagagttctcttctcaatgctctcacaagttttaaaaatggagaagctataaaataattttgttagaagaaaagtaattttcttctgaaatggagtaaagcaaacacatacccaaggatcttaaaaagtttttttttgtttttacagaatatatgtatgtatttgtgtgtgtgtgtgtgtgtgtgtgtgtagttacaaacactatttatagtatagctaatatgttaacttcatcgcagtgtctacaaagttgtggatcccagtcttggtgccaaatgcatataaaaagctcaaaagctattatgactataccatgcaaatttatatccagaaaaccttgggaaggagactgcagctctttggagccccatggggtctctgcctttgatatttgggtacctcaactatgcatcaaaaaagttttaaatcacttttctcccagaaagaattaatgtcacagttctgaatagtataaattatacacttaaatagaccattgactgtttttgtccacatccatttaca

SEQ ID NO: 154495 - DNA, 2631 bp, Homo sapiens
  misc_feature (1)...(2631): n = a,t,c or g
tttttttttaattcctgaggggtggttgctgcttttgctacatgacttgccagcgcccgagcctgcgtccaactgcgctgctgccggagcgctcagtgccgccgctgccgcccgccgcccccccgcgccccgttcggcacccaccggtcgccgcgccgcccgcgcgccgctgtcccgctcccgcgccgccgccgccgtttccccccgacgactgggtgatgctggacatgggagataggaaagaggtgaaaatgatccccaagtcctcgttcagcatcaacagcctggtgcccgagggcctccagaacgacaaccaccacgcgagccacggccaccacaacagccaccacccccagcaccaccaccaccaccaccaccatcaccaccacccgccgccgcccgccccgcaaccgccgccgccccgagccgcgcagcagcagcagccgccgccgccgccgctcgccccgcaggccggcggcgccgcgcaatcgaacgacgaaaagggcccccagctgcttctgctcccgccgaccgaccaccaccggccgccgtccggagctaaagccggaggctgctgccggcctggggagctggggcccgtcgggccggacgagaaggagaagggcgccggcgctgggggggaggagaagaagggcgcgggcgagggcggcaaggacggggaggggggcaaggagggcgagaagaagaacggcaagtacgagaagccgccgccgttcagctacaacgcgctcatcatgatggcaatccggcagagccccgagaagcgcctcacgctcaacggcatctacgagttcatcatgaagaacttcccttactaccgcgagaacaagcagggctggcacaactccatccgcgacaatctgtccctcaacaagtgcttcgtgaaggtgccgcgccactacgacgacccgggcaagggcaactactggatgctggacccgtcgagcgacgacgtgttcatcggcggcaccacgggcaagctgcggcgccgctccagccacctcgcgggccaagctggccttcaagcgcggtgccgcgcctcacctccaccggcctcaccttcatggaccgcgccggctccctctactggcccatgtcgcccttcctgtccctgcaccacccgcgcgccagcagcactttgagttacaacggcaccacgtcggcctaccccagccaccccatgccctacagctccgtgttgactcagaactcgctgggcaacaaccactccttctccaccgccaacgggctggaggcgtgggaccggctggtcaaacggggagatcccgtaacggccacgcaccacctcacgggccgccgcgctagccgccttcggtgccctgcggcctgtcggtgccctgctctgggacctactccctcaacccctgctccgtcaacctgctcgcgggccagaccagttactttttcccccacgtcccgcacccgtcaatgacttcgcagagcagcacgttcatgagcgccagggccgcgtcctcctccacgtcgccgcaggccccctcgaccctgccctgtgagtctttaagaccctctttgccaagttttacgacgggactgtctgggggactgtctgattatttcacacatcaaaatcaggggtcttcttccaaccctttaatacattaacatccctgggaccagactgtaagtgaacgttttacacacatttgcattgtaaatgataattaaaaaaataagtccaggtattttttattaagcccccccctcccatttctgtacgtttgttcagtctctagggttgtttattattctaacaaggtgtggagtgtcagcgaggtgcaatgtggggagaatacattgtagaatataaggtttggaagtcaaattatagtagaatgtgtatctaaatagtgactgctttgccatttcattcaaacctgacaagtctatctctaagagccgccagatttccatgtgtgcagtattataagttatcatggaactatatggtggacgcagaccttgagaacaacctaaattatggggagaattttaaaatgttaaactgtaatttgtatttaaaaagcattcgtagtaaaggtgcccaagaaattattttggccatttattgttttctccttttctttaaagaactgtttttttttcttttgtttacttttagaccaaagattgggttctagaaaatgcgccttggtatacccaagtattaaaacaaacaaaaaggaaagttgtttccagttggcaacactgccccantcaattgaatcagaaggggacaaaattaacgattgcccctcagtttgtgttgtgtatattttgatgtatgtggtcactaacaggtcacttttattttttctaaatgtagtgaaatgttaatacctattgtacttataggtaaaccttgcaaatatgtaacctgtgttgcgcaaatgccgcataaatttgagtgattgttaatgttgtcttaaaatttcttgattgtgatactgtggtcatatgcccgtgtttgtcacttacaaaaatgtttactatgaacacacagaaataaaaaataggctaaattcatatataactagatacttttgcctcttttattaggtagggctaatt

SEQ ID NO: 154496 - DNA, 825 bp, Homo sapiens; identical to SEQ ID NO: 137617

SEQ ID NO: 154497 - DNA, 1389 bp, Homo sapiens; identical to SEQ ID NO: 137618

SEQ ID NO: 154498 - DNA, 1224 bp, Homo sapiens; identical to SEQ ID NO: 137619

SEQ ID NO: 154499 - DNA, 510 bp, Homo sapiens
atgtcggcctaccaggtgttctgtaaagagtatcgcgtgaccattgtggctgaccatccagattttggggaacttagtaaaaaactggctgaggtgtggaagcaattaccagaaaaagacaaactgatttggaagcaaaaagctcagtatctgcagcacaaacagaacaaagcagaagccacaactgtgaaaaggaaagcatccagctcagaaggttccatgaaagtcaaaggtagtgaccacatcccgcccctgcttttctctaaagcatgtgaattttgcttccttgctaagaaactgggaaaaaagcttgcagtattagaagtggaccttgattcccagggtatggtggctgtgtctggcagtttgtcagtgcttctggattccattatctgtgcccttggccccttggcatgtctcaccacacaactacctgaattgaatggctgtcccaaacaggtcttgtcaaacacattagacaacattgcttacatcatgccgggactgtga

SEQ ID NO: 154500 - DNA, 1411 bp, Homo sapiens
cgatcggcggcgttgaggcgggatccgggcgagccgagtgaagattgttttgatggtgatcatacctttgaggacataggacttgcagctggccgaagccaacgagagaaaaaacgttcttacaaagattttttaagggaagaggaagaaattgctgctcaggtcaggaattcttccaagaagaagttgaaggatagtgaactttacttcttggggacggacacacacaagaagaagaggaagcactcctctggatgattcctactatggagatatttcgtctttggaatcgtcacagaagaaaaagaaaaagtccagcccacagtctacttgatacagctattggacctgttgaaagctatcactttccccacttggaagcaggctccaagccctccaaaaagacttggggagaaatcctctggctcttcaagccattcggagagtaaaaaggagcaccacaggaagaaagtcagtggaagcagtggggaactacccctagaggatggtgtctcccacaaatcgaaaaaaatgaaacctctctatgtgaacacaggagacactgacccttcgggagcctgatggtttaaaaatgaaacttattctgtcaccaaaggagaagggaagcagctctgttgatgaggagtcttttcaatatcccttcccaacaagcgactgtgaaaaaatcctcaaagaaatcagctcgggatgagcagggtgctttactcctaggacatgagttacagagctttctgaaaacagcccggaaaaagcacaagtcatcctcagacgcacattcatcttcctgggcccttgaaaggcttgttgggtcttgacgccttcccagtttcgcaagagtccccacagtgctaacccttgatctttcagggcttgaaccctattctggtagaatcagactcatcctctggtggggaactagaggctggggagttagtgatagatgattcttccccgagaaatcaagaagaaaaagaagtcaaagaagagcaaaaagaagaaagacaaggagaagcataaagagaagcgacactccaagtccaagagaagtttaggactttctgccgtgccagtgggagaggtcacagtgacatctggccctcctcccagcatcccatacgctggagcagcagcacctcccctgccacttcctggcctccacacagatgggcatagtgaaaaaaaaaagaaaaaagaagagaaggacaaagagagagagagaggagaaaagatgggaccatctagttggaagaaaataagctcagggctcccactgattctacatgatggtccatggaaaaattgttttccacgaaaccggtacccggtgccaaaaaggttgaggaccgctgacctagtgggcttgtatctgggaagccagaaacataaatga

SEQ ID NO: 154501 - DNA, 4270 bp, Homo sapiens
ccaagatggcggcgatcggcggcgttgaggcgggatccgggcgagccgagtgaagacctggtcctgtagacgggaaggagcctggacacagtgaacacattctcaaaggccctgcaggaccaccatgggtttatgatggactccgtgaaggaaaggaggattgttttgatggtgatcatacctttgaggacataggacttgcagctggccgaagccaacgagagaaaaaagcgttcttacaaagattttttaagggtagaggaagatattgttgcttcaggtcaggatttcttccaagaaggaagttgaaggatagtgaactttacttctttggggacggacacacacaagaagaagaggaagcactcctctggatgattactacttatggaggacagtggttcttgttcttgagtgccgataaaccagtgttgaaggaggagagaggtggagggctggtattttggaggattcagccatagaagaacagtctgcatttgtgatacaccagatatttcgtctttggaatcgtcacagaagaaaaagaaaaagtccagcccacagtctactgatacagctatggacctgttgaaagctatcacttccccactggcagcaggctccaagccctccaaaaagactgggggagaaatcctctggctctttcaaagccatttcgggagagttaaaaagggagcaccacaggaagaaagtcagtggaagcagtggggaactacccctagaggatggtggctcccacaaatcgaaaaaaatgaaacctctctatgtgaacacagagacactgacccttcgggagcctgatggtttaaaaatgaaacttattctgtcaccaaaggagaagggaagcagctctgttgatgaggagtcttttcaatatccctcccaacaagcgactgtgaaaaaatcctcaaagaaatcagctcgggatgagcagggtgctttactcctaggacatgagttacagagctttctgaaaacagcccggaaaaagcacaagtcatcctcagacgcacattcatctcctggccctgaaggctgtgggtctgacgcctcccagttcgcagagtcccacagtgctaaccttgatctttcagggcttgaacctattctggtagaatcagactcatcctctggtggggaactagaggctggggagttagtgatagatgattcttaccgagaaatcaagaagaaaaagaagtcaaagaagagcaaaaagaagaaagacaaggagaagcataaagagaagcgacactccaagtccaagagaagtttaggactttctgccgtgccagtgggagaggtcacagtgacatctggccctcctcccagcatcccatacgctggagcagcagcacctcccctgccacttcctggcctccacacagatgggcatagtgaaaaaaaaaagaaaaaagaagagaaggacaaagagagagagagaggagaaaagccaaaaaagaagaacatgtcggcctaccaggtgttctgtaaagagtatcgcgtgaccattgtggctgaccatccaggtatagattttggggaacttagtaaaaaactggctgaggtgtggaagcaattaccagaaaaagacaaactgatttggaagcaaaaagctcagtatctgcagcacaaacagaacaaagcagaagccacaactgtgaaaaggaaagcatccagctcagaaggttccatgaaagtcaaagcctcttctgtaggagtactgtcaccccagaagaagtccccacccaccaccatgctgttaccagcctcaccagccaaagcccctgagacagagcccattgatgttgctgctcatcttcagctgttgggagagtccctaagcctcattggacaccgtctgcaggaaactgagggtatggtggctgtgtctggcagtttgtcagtgcttctggattccattatctgtgcccttggccccttggcatgtctcaccacacaactacctgaattgaatggctgtcccaaacaggtcttgtcaaacacattagacaacattgcttacatcatgccgggactgtgacagcaaagaatcctgggacagaaaccttatcctacaccattgctggtttgtgtatatatgactgttgcagattccttcagtggcctctggctgtaggttttaaatttttatatctatacatacatatatacatatatatataatgtacaatatatacatagactgtaactactttgcttttaataattttatgaaatggcaaaggtttagccaagaggaaattttggcatgaatacaggcttgggattcttttttctcctgtggtggataaatctgccttaaaaatcaatgtaactttgggggctgggggcttgttctgggtgccaagcgcatctctttatggacagctaaaatgtgattattttccaagctcagttggacctccagacccatcactgaccatttgccttacctgtcttagtctgaaatgtaataggaaagataacgggaagatgccagttgactgaaaattcaaagcctttcaatttgaagtgacctaggtgggaggtgataaaatttgttccctttatagttacggaggtggcttaggtgaattgagtagagggttcattccaattcctactgtataggtgtctgtgtctcaaaatttattgtaatcattgggtaccattggtgggcctccaacagaggccaaggggagttctggtgagccctgggcagcaaaaaacaccttggggggtgaagctgtcaatgccaccagttggacctccatacattctgagctaacccagaatctttagtcggcagaattaagtgctggtgtctttcactggcagcatgaagttagccaccaagtcctcacaagccgtgctgcttagttgctcggtggttatggataaactttgcccagcatgatttttgggttcatcttatcagttcccctggtgggcagatacacagtgttctgcattccacatgtaagtgaattgcaaaaacaaaacaaaactcactctcttgtaggtttatttatgtgtgtgtgaatgtgtattttaattatgtgtatttaactctttaaaatctcttagattttaattttatcctgctcatttctggatgtaccatctaacaagagttagcctccaccagcaacagcatgtggaagatacagatttgtcatttctcccttccgccctcccttctttccttccttccttccctgtttccttccctctttccttccttcctcctggtctgttccaaaaactctgaatcatctacattttaaggtattttacctcaaaaatgaatcattgtgttaggattctaattctttataaagaacttcatgggcttcaataatgtctagaaagtaaaataaagaggaatgttaccatccccagctgcccttatttccagagaaccagacgtttgtttcccatgttggaaagaagacagttgagcacttcaggatgggtttttaaatttgggtatgagattctctgccaacaccaagctctggagttaacggtgctttcttctccctggcccctgacagagcactacagcatcaaagtaaaatctttggggacagtgtagcccatctggcatcctatttgaatttcttccccttcctccccaccagtgttgtcacaggggctatgttggcttaaaaggtagtctgggctgctgaatcccttttttcaggttcagaggcagtttttaaggattttaatttggggattacagagaaacagggattgttttgaggaaccaaaattcaagaggaacagaaatcttaacttgatttcatggtgttaggaacattggtacccatgcctcttctgtatctgtgggaagtttccctgtttgaccacagggtatctaggaggggcggggaagacatggatagtataggaagaccattaatcctagcattgtcatttatatacattaatgaaatcctggatggagggacctgctttttgtttgttttcctttgaaacccagccctattgtatttgtatttaaaatttgtacacatttgtataataatctggacccttgtggtatttggtactattagaggaaaaactttggattcagaccttcttgcagtttttatatcattgttttattttgtttttttaaataaattctagtggtttgatccaaatcccattacagttgtataaagaaataaaattttgtacttatattattaaaaatcacatttttaatatttgt

SEQ ID NO: 154502 - DNA, 831 bp, Homo sapiens
ttttgtttccattaacttttgtgaaacataaagaattactgtaacagtctatgtcttggcgtattgccaattcaccactttctactttgtgctggaacagaactggcttttttgacatccctgaggagtggaaatgcaaaacgaatttcaaggtctctaatctttgttctatgacaaatgaaaaaacctaagttatctggtgttttggagatttgagaatacagcaggtgaagagaattagcttaaattccctcctcccttttgataaatccacagggatcccttcactctgtcaggaaatggtgtggtttccaagcattaacccttcatgatctgtctggtgcatttctgtgctcctgggaatcgccccaagtgccaggccacggccatcgccatcccccaggtgtcacccctgtgccccccaggaggggaagatgacacacccccaatttagggtaatgcctgcaccttcctgttataattggttattggaaaatgtgccctttattatccagaacagtggtgtgcgcatttcctgattatggagcctaacttttggatatctgacttagatactaaaaacatttgggtgttgcagttttgcacttgtagatacaactttaaaagcttgaaactggtgatttaattagatgttttctataaaatgcaccttgttacatttctgtgaaagggtcttaccagcgtggaataactggctcaagggttgagagaaacaaccattttctaaacaggttaattgtttaaaggactatacatgtaagtctgcaggcaataaaggctgttgtgaaaagcaaaaaaaaaaaaaaaaaa

SEQ ID NO: 154503 - DNA, 425 bp, Homo sapiens
  misc_feature (1)...(425): n = a,t,c or g
cagaggattcagagccgagtcgctgaggaggaggctccggtccccgcgcgccatccgccaccctactggacacgggcgagagcgtcgccgccgtagcctccggagaagacaagggcatcgccgcctcagccgccgccgccgccgttttcgcctgcagctgctcaccggatcctcagtcttccacaatgaaccctgtttacagccccgtgcagcctggggctccttatggcaaccctaagaacatggcctacacgggttaccccacagcctatccagcagctgcccctgcctacaatcccagcctgtaccccaccaatagtcccagttatgctccagcaactttggttatggaaacaggcctggccacagaactcgtcttcctgtggcactgaaggcaccttccacctcccagtggacaccgggan

SEQ ID NO: 154504 - DNA, 467 bp, Homo sapiens
tggaccgcccacgaattcccgggtcgacgatttcgtggaggctccggtccccgcgcgccatccgccaccctactggacacgggcgagagcgtcgccgccgtagcctccggagaagacaagggcatcgccgcctcagccgccgccgccgccgttttcgcctgcagctgctcaccggatcctcagtcttccacaatgaaccctgtttacagccccgtgcagcctggggctccttatggcaaccctaagaacatggcctacacgggttaccccacagcctatccagcagctgcccctgcctacaatcccagcctgtaccccaccaatagtcccagttatgctcttttcctccacggactccaaaggcgggggttgaagactgggcagaggctacatgggggcggatggcaggaacagaaattgcaaatgaagaaatagcatttggaaattctgtgaagacatctggaact

SEQ ID NO: 154505 - DNA, 291 bp, Homo sapiens
  misc_feature (1)...(291): n = a,t,c or g
ctcgtgncnagctttgttctgtgcccagagggggtgggccccattctgggccctgtgaactttgtcttatctgcccctttcctagaaaactcctcgtttctgaaattaggcattatatggttccaggacccagccttcaaaattcctggcaggccagcttcaacattccatggccagccctgcctaagccagacttgggtcccagtccctcagtctctccagtggatatcttctgtggtgcatgctgttgagtccaacccaaaggccaaccgaggcacacaggagtttggg

SEQ ID NO: 154506 - DNA, 408 bp, Homo sapiens
  misc_feature (1)...(408): n = a,t,c or g
gtaaataccatagttacaaattcttggcttcaatctttcagagtgatcactgtctgatcttcaaaacaaaacaaaaacccaaaagaatccaaaacaacaaaacaaaaccagatttacacttcatacacacaggcaaggccatggggctttccaatctttacactccggactgtgttttgaaaacacctataaattctttgatcaaactacttggaagacactggtcaaaggnnnnnnnnnnnnnnnnnnnnnnnnnnnnnnnnnaattttatttctttttaaaatgtgagttccaataaaatttaaaaattagattccaacctgtagattaaaatgaattaaaaaatacaaaatcatatccaacgctctcttcacagggatgttacatgccatgagaacaggtttctc

SEQ ID NO: 154507 - DNA, 282 bp, Homo sapiens
atggatgcagctggaggttaccccacagcctatccagcagctgcccctgcctacaatcccagcctgtaccccaccaatagtcccagttatgctccaggcttgggctccccccaggtggctcagcagcagttcctaaagcatgcaggaacgtgtctgatggtgcaaaaatcatgggttggagacacacatgaaccgtccctagggcagcagcaaaggatcatggcactaaaaggcgtctctcaacctaacctggctgccgaattcaaacaaacaaatgaataa

SEQ ID NO: 154508 - DNA, 7366 bp, Homo sapiens
  misc_feature (1)...(7366): n = a,t,c or g
tttcgtcgggctcctcggcggctactgcagaggattcagagccgagtcgctgaggaggaggctccggtccccgcgcgccatccgccaccctactggacacgggcgagagcgtcgccgccgtagcctccggagaagacaagggcatcgccgcctcagccgccgccgccgccgttttcgcctgcagctgctcaccggatcctcagtcttccacaatgaaccctgtttacagccccgtgcagcctggggctccttatggcaaccctaagaacatggcctacacgggttaccccacagcctatccagcagctgcccctgcctacaatcccagcctgtaccccaccaatagtcccagttatgctccagagtttcagttcctgcattcagcttatgcaactctgctgatgaaacaggcctggccacagaactcttctttcttgtggcactgaaggcaccttccacctcccagtggacaccgggaccgagaaccgaacttaccaagcatcctctgcggctttcagatatactgcggggacaccatacaaggtcccaccgacccagagtaacactgctccacccccctactccccatcacccaacccctatcagacggccatgtatccaatcagaagtgcctacccccagcagaatctgtatgcccagggagcctactacacacagccggtgtatgctgcccagcctcatgtcatccaccacaccacggtcgtccagcccaacagcattccctctgctatctacccagcacctgttgccgccccgaggaccaacggtgtggccatgggcatggtggcaggcaccaccatggcaatgtcagcaggtaccctgctgactacaccccagcacacggcgattggggcacaccctgtctccatgccaacatatagggcccaaggaacccctgcgtacagctacgtgcccccacactggtaaagcctgcagcccatccaaatctggagtcacacattgtatgcaactactcaagtcttacaccggtgctggagcagttccctagcagcaccacctctatttgcaagaagagacaacggaagtgcaagggtcactttatgcatctttaatggttttgatttttatttttggtttttgtaaaagctgctttttctaatctcctgcctctccccaactgtccccctcttagcccctgcccttccagctctatccccttcctcctacctgaccaggccatgtcctctctgctcttccctaagtgtcctgtccctggggatcccagtctagaggcaagcagagagtagggtttattgcagtggttcatctgaaggctggattccatttgaagagcataaacagatgtggtccagggtaggaactcagagctgttgagcaggctacatctctaggggagtgttctggttgttttttcttaagcaagattagttcaggacattcccatgtcccagacacaaatgaaatgtctcctgagaaccattgcaacagaccaagaacaaaaccacctgagtatgtaggcgtgttattagcagcttaataccccaggctgagaacctggggaaaaaagtctttagaatttgggggagggtggggggagggagggcattgtggggaaggagagggaagaagggaggagcggtgcttgcctcatggctttggtttgaaaggtctctggccaaagcatctggccctggaccttctgatttgcacagtgatgttaactgacctggcacttcctcaaaaggtgattttgtccttagacctgccaagcggctgcagggtggtaggatcccagcatcccgaggccttggaaggccggatgccctgtgtcatccagacttcagcctctgagctgtcatggacccactctgatgaggagcttcctcctgattggagtgggaacctagggcatttctctcccttttcttttgcccttcccagtgccaggactcacctgtctgaccatagagcttgcaggcaggccaagctcttggttacctgtgccattcatggcccaagtgaaggaaccacattccaggtgggtgctggcagctctgaaggtgaggatagtgaaggaaaagcaatagcaataaacatttcatagactcatggaactgaagggaccttagcaatcatctcatccatttccctatttggcagatgaggaaactgaggcccagagaagcggaaaggacttccctagaccttacagtaaattagcattaaatgcagccttcctacctagtgggcaccttgcttacaaaaatttacctagggacggattggcttggttttgtaaaaatttaagtcggcagcgcccatacctggtgagtctggaatggtctctgggctcctgtttctgctcttttcctccacggactccaaaggcgggggttgaagactgggcagaggctacatgggggcggatggcaggaacagaaattgcaaatgaagaaatagcatttggaaattctgtgaagacatctggaacttccgtcctgtacctgactccacctccaggagaaggagcaggtggactggccgaaaaggagaggccatgcttttaggacagtagcccctcatcccgagaggagaggaagaggaggaagacagtgggagtcatcaggagaggagaatgaggatgaggcccaggagacaggctcatctgggagaagagggacccctgggacgaggaggtccctgctagtctcagccaggagcctggattgcccagcagcagcctccggcacccagcgcttggctgggccagcagcccctctgggggtggggcacgaacattttattgtgaaaaatgggatcattgacaacatttgggactttaaaaaactgctttcatttaaaattcatgcaaacttggacatatccttaccccaacctcccatgtctccctaagggagggaaaaatcaggaaacccttgggttggaaggagctcagaagctgtctagccattcccaggagggtaaagcccatcagcctccttggcctagagccaggagtttgggggcccaccttcctgggcttccaaggaactttaggaccagtaagaaaaaattcagctgttctaaattatctgttctgggtgctgatgaggtttcactttaaaacaatagaaagttttccagtgttaattcactttttgcaaatacctccttccaccctctttggttttgtaaaggtgggtgaaggttgttctagattatgtcatacgtgtttgaaaaatgccaaaataataataatgataataataatagaaacctttggatttgtcaggtgcatcacagaggtcaaagcacttcacggcctttcatgtactcgccctgagagggacagggttagagttattacagtcaattgacaaatgaggaaacaggttatggaagggaacaggcccacagtgagcagcatgctggtatccgccaggcttcccagaaccctgctgcctccatgtgggctggggtggaaccacagagaggagaaaggaagaagaggagacctaggaatgaccttgtaacttttgttctttcaacaccagtaagtaaaactaacagctggacctcacagttcacagaacagttgaacataaattatctggtttaacccgatgaaatagaggttatttctcctatttgatccataaggaaatcaaggcttggaaaagtcaagtgacttgctaataagtgacagagccactcgaatcccaggctgtctgctgtctcgttcccctccatctgatccccacacaggctcacgtactgaagcatctgtgctctgtgccctatcttagcacctactatgtaattcaagagcaaaggggggccccaaggtgaaaataaggcactgaaaggctgtggtctggaagagcccaggtccagcacccctttttcagtatgagccccagttcagccggcctcagcctcttgctgtgatggagatccacaagcctagccaagcttggggagtcactgcaaaaggactgagcccaggagagcggggacagtcatgtgcctccggtaggatgggcacagttactggtaaggtcacagagatctagtgggaggtaccataggtagatacctccaaagattctagatggcacggtggtcaagctagacaaaaagtcagagctggaagggccgtctcattgaaggcaggcaagcaagagaggacaagggatgtagccggcctgatncagtgagctacagcatctggcccccaggatgcaaacccctctctcctcctcatgccactgcctctccccaagtgcaacacctatggccaggatcaggggtacagatggctcgttaccagccaacccttttgaattcttctacttctacctgaccccctctcctcactggcctgggggtcaagaagtttgagtctgggagctggattgcctgcaaatagtgaaagcctgaaacataatggtttcccatgttttgaaaaaaaatgcatatttaatttcttcctcatgagataggacagttgctgttctttcttacctgggcaatgaccctaaaatgtatatcctctttcctgaatatttaggcagagacacacacacctgttccagaggcgtttttgggtatggcaaagtactttggacattggttgccaaagtcctccattttatagatgaaaaaactaaggctcaggaggcttgagacttgctaaaaggtcacacagcttggaagtgattcttcaaatcctctgctctttctgctgccacctgctgggtctcttggcaagcatggagggaggggctaactgtactttatagagctgggaagcccagtctctgagctgagcagatttgtatgaactgctttggggccagggacctgtaaatgagccctggggagggacccaggaggcacatcttaactgggcagcacaagggagggatgaggattttggcaacttaaaggcctcacttgggacaaaacactttgggggttcacaatgcccaggaccgaagacatgtttcaagggacagcacgaggcatcttttctattgggagacccatgttccttggtaagcctgcacacctggcttcctaatcccttgagagcctgcccactgtccagatccagtgagttggtacaaaacgtacagattgaagtccctggggtttgtttttccctgggtgagggaccagaaccagactctgagcatccttacccctggccacccgaattgttccaagtttgaggtaccccgttcccagagatctgggggtccttctttggagggcttgctttgttctgatggccttcagaaaggaatcacatgaagtataaaaggacaggccccttggtcaccaagttttggctcctcatacagatagggactcatccagggttcccaggcgaggcactgactaaggcgaggctcagagctttccattattcaaatttccttcagcttttgtttctgtggcccagagggggtgggccccattctgggccctgtgaactttgtcttatatatcaccatctgtatcagaattcctcctcaattgcagttaagtgaaaatacgtggaagtctgcttttccatcctgtacttctcccacatcacttactgggctgtgcggcccccgctggcttgccaagcttggggaattccagagaggggcagttagtattagtggggccagttggggacccacccgcagagctggaagaaacacgccagactaactgatggggattccacaccggagccttcttgaggcgcacaggcagggcatgccaagggggctgcagggtttgtcctttacttatctgcccctttcctagaaaactcctccgtttctgaaattaggcattatatggttccaggacccagccttcaaaattcctggcaggccagcttcaacattccatggccagccctgcctaagccagacttgggtcccagtccctcagtctctccagtggatatcttctgtggtgcatgctgttgagtccaacccaaaggccaaccgaggcacacaggagttgggactggctgccacaaagctaggaaaggggacaaaacagcacttgcttccctatgggccacatgggatagtccctggatattccttgctgtgggtaggaggtcctcttacccatttccagccactggataggcagggggattttccttcctaaaggagaacagatgtaacagctttttcaaagtaccggcccataggaatcaaatgggtgagatcagctttgggcctgaccccagcaagaccagcatctccagaccccagcctttctcctcaggcctaagagagtcaggggaaaagagaggaagacctgtccccagagaccccttctccctcggggtcagcccagaaaagtctgggatcctatggtgtgaactcaagctccctcccttaccccagggggggtaaaggcccaggcctcctagcctacttggagttgtcctgtaataatctgtgcatagagccaagggccctgtcccccatccctgaccttaaaggcatcctgcttcccctgtttcatatcacatgacagagaaacctgttactcatggcatgtaacatccctgtgaagagcagcgttgtatatgattttgtattttttaattcattttaatctacaggttggaatctaatttttaaaattttattggaactcacattttaaaaagaaataaaatttaaaataataataataataataataataataataataaaccctttgacccagtgtccttcccaagtagttttgatcrvgagaatttatagggtgtttttcaaaacacagtcccggagtgtaaagattggaaagccccatggccttgccctgtgtgtatgaagtgtaaatctggttttgttttgttgttttggattcctttggggtttttggttttgttttgaagatccagacagtgatcactcctgaaagattgaagcccaagaatttgtaacccatggtatttaccggtaagcctggtagaacactccataactattaaaaaaaaaaattcccccccaaaaaaaagtccttaggtgaactagactgagtggttccttggggagggaggcacagaggactgtccctgggccagtgagtcccttgggcgtctccccaagttgatgcctaaatttgttctcagtagtcaagaaaaacctatggtacatcttacagctgatctgacaggggtctgccctaagggtctcacagctgctggggagctttaagtggcaacttcagcacccaccctaagtgtgtgatgtgggagcacagtgaggccattcagagttgaaatccattgagccatccgcgcaataaagctgacatctattgtgtgaaaaaa

SEQ ID NO: 154509 - DNA, 581 bp, Homo sapiens
cggcacgagggggggatgtggagagctggcagcatgtcggccgagctgggagtcgggtgcgcattgcgggcggtgaacgagcgcgtgcagcaggcttgtggcgcggcggccgcggggatctccccagcccatcccagccccggctagtggcggtccagccaaaaccaaacctgcagacatggtgatcgaggcctatggacatgggcagcgcacttttggcggagaactacgttcaggaactgctagaaaaagcatcaaatcccaaaattctgtctttgtgtcctgagatcaaatggcacttcattggccacctacagaaacaaaatgtcaacaaattgatgggaaagtctgagttcttaataaaaagagaaaacatcatgccaagaacagaattgaattcaccattttctggggttatatatacttgggaaacctacccaacctccatgtttattattatttggtggtctttcagaaaaattataaagaattgtagcccataaatttttttaactagcaaaagagacatttctgttctttttcctttaaataaaaggctacagtaaataaaatacaataca

SEQ ID NO: 154510 - DNA, 2056 bp, Homo sapiens
gaacttttcagcaacatctaaaacttcctttttgccacacacaaacgaacttggtcgtcccatcctgacctgaatgtgagcttccgttaaaacaaagcaagcatcgtagaacaatttcaggtttcctttcatacttttttttttctattacactttttggtccactttgaattccaattctgatcatgaaacttttatgttgccacaagtcatctggagacccaccatacctgcatcttttcgcaaaatctaagcacagcactttgcctttttccctggggctcggcgtcggtccccgggggatgtggagagctggcagcatgtcggccgagctgggagtcgggtgcgcattgcgggcggtgaacgagcgcgtgcagcaggctgtggcgcggcggccgctggcgatctcccagccatccagccccggctagtcggcggtcagcaaaacgcaaacctgcagacatgggtgatcgaggcctatggacatgggcagcgcacttttggcgagaactacgttcaggaactgcgtagaaaaagcatcaaaatcccaaaattctgtctttgtgtcctgagatcaaatggcacttcattcggccacctacagaaacaaaatgtcaacaaattgatggctgtccccaatctcttcatgctgggaaacagtgggattctgtgaatgtttggcagacaaagtgaacagttcctgggcagaggaaaaggttctcctggaaaggttaaaggttatgggtccaggatttaacaccagccgagaagagatatacctgttttctgtttctcttcttgaaggtaaacatgggccttccaccttcagagaccatagccatcgtggagcacataaacgccaagtgttcctaacctgggagtttgtggggttgattgaccttagggaagctttgggcatgatcttagtcaaggaccaaatccagacttccagctgttattgtcgctcccggaagagactgtggtaaaaagctgaacatccctgctgaacaggttgagctgatcatgggcatgtccgcggatttccagcatgcggttgaagtaggatctacaaatgtccgaataggaagcacgatttttggagagcgggattacgtcaaagaaacccaccccggacaagtgcgcagcagacgtgaaggccccgctggaggtggcacaggagcactgagccagggaatactgagagcactaactatgcactaacctagattttcattcccaccccccacccaacaccactaaagtcctgctctcctgtgttctgtggagagcactaatgatcacgtgtgttgatggaaaccatctgtgcttagtctctgacataggaagcttgcttcaggcaagtggctttggattgagtttgagaaattcaaacatttctgcagaacaagatcccaaatcaatagctaggaatcatgttcaatattgaattctgcccagggagcatgaactgatccatgaatgccttttccaggttaaaatttggtcactgatgcctataatcgtggaagtcagagtggattccccatttttcatcttcattttaatagggaaaattccttaatggttaaacatctcccttacaaactcctaactacgtcggtcttaaattgcctgcctctggaaaataagggtgatttcttgccccccccaagattccttcccctagcggggtagataccgtgaaagatattccccaaactgtgggaatgggcagtgtaggtaagcttcagggaaatggctcaggttaattcttcaaaacacaaaattgttgcttggccaggcatggtgactcatgcctgtaatccccagcaaatttgggagacagaggcggaaggatcacctgagcctaggagttcaagaccgagcctcagcaacagcaggagccccaccccccgtctctacaaaaaaatttaaaaattaactgggcatggtggctgaggtggaagaatggaagaatcacttgagcccaggagtttgaggctgcagtgagctatgattgcaccactgtactcctgccttaaaaaaaaaaaaaaaa

SEQ ID NO: 154511 - DNA, 418 bp, Homo sapiens
  misc_feature (1)...(418): n = a,t,c or g
tacgccacgcttggcacgaggcagcagatcgaggtggccaggcagctcatagatgagaaagttggcgggaccaatctcggagcacctggagccttcggacagagtccattcagccagccacctgccccacctcatcaaaatacctttcctccaaggagctccgggtgcttcccaaacatggctgccaaggtgaatgggaacccccacagcacccctgtgagtggtcctccggcctttctgacccagggctggggcagcacctaccaggcgtggcagcagcccacacagcaggtcccaagtcacgccgccagcgctgctcctcaggccagctccccaccggactacacaatggcctgggcagaatattacagacagcaggtcgctttctacggacagacgttagggcaggcgcaggccn

SEQ ID NO: 154512 - DNA, 2449 bp, Homo sapiens; identical to SEQ ID NO: 133204

SEQ ID NO: 154513 - DNA, 271 bp, Homo sapiens
gctctggggaagcaagttgggtcccacaccctcgatgctggtgtgagccttcacctctgcttgctgtatccatgccaatcaacaggatccctgttgagtagcagggacacatatgtggatggcattcaggtggctttgcctgtttctaattggtatagagttctaattgctgctaaaattgattcaattcctcacttgaataattccacacctctagtggacccctcagtatatggatacggagtacaaaaacggcccttggatgatggag

SEQ ID NO: 154514 - DNA, 3176 bp, Homo sapiens
ggtccccaagcggagcgggaggccggaccggggagccgagcggcggcgtcggcggcgtcggcggcggcggcgacggcggcgggggcggtaatggcggagctggtgcaggggcagagcgctcctgtggggatgaaggccgagggcttcgtggatgccctgcaccgggtccggcagattgctgctaaaattgattcaattcctcacttgaataattccacaccttctagtggacccctcagtatatggatacggagtacaaaaacggcccttggatgatggagtaggtaaccagttaggggccttggatcatcaaaggacggtaataacggaagaattcaaagtgcctgacaaaatggttggatttattatcggcaggggaggtgagcagatttcacggattcaagcagaatctggttgcaaaattcagattgcttcagagagttctgggattccagagaggccctgtgtacttaccggaaccccagaaagtattgaacaagccaaacggctcctgggacagattgtggaccgctgtcgaaatggacctggctttcataatgacatagacagcaacagcacaatccaggagattctcattcccgcatctaaagtgggtctggtcatcgtttagaggaggggaaacaatcaagcagttgcaggagcggacaggggtgaagatggtcatgatccaggatggcccattgcccacgggagcagacaagcctcttcgtatcactggagatgcatttaaagtacagcaagcaagagaaatggtactagagattatccgagaaaaagaccaagctgactttcggggtgtacgcggcgatttcaactctcgaatgggaggaggcagtatagaggtatctgtgcctaggtttgctgtggggattgtaataggaagaaacggggaaatgatcaaaaagatccagaatgatgctggagtgacgactcattatagaccagaggatgcggtcatgtccacaaagagctgcccaggtcatgggccctccggatcggtgtcagcatgcagcgcatactcatcagcgagctgattcttacagcccaggaaagagacggctttggaggcctggcagcagccagaggaagaggtcgtggccgtggcgactggagcgtgggagcccctggtggcgtccaggagataacatacacggtgccagccgataagtgtggcctcgtcataggcaaagggggtgagaacatcaaaagcatcaaccagcagtcaggggcgcacgtggagcttcagaggaacccccctcccaacagcgaccccaacctgcggagattcaccatcaggggggttccccagcagatcgaggtggccaggcagctcatagatgagaaagttggcgggaccaatctcggagcacctggagccttcggacagagtccattcagccagccacctgccccacctcatcaaaatacctttcctccaaggagctccgggtgcttcccaaacatggctgccaaggtgaatgggaacccccacagcacccctgtgagtggtcctccggcctttctgacccagggctggggcagcacctaccaggcgtggcagcagcccacacagcaggtcccaagccagcagagccagccgcagagcagccagcccaactacagcaaggcctgggaagactattacaaaaaacagagtcacgccgccagcgctgctcctcaggccagctccccaccggactacacaatggttttggttttgaatattacagacagcaggtcgctttctacggacagacgttagggcaggcgcaggcccacagccaggagcagtaggacagcgtcctcgtggccaactctcccctcaaaatcattgtcaaagaaaacctatttgtaaaaggagttttttaatttggaaacccttttgatgaaagaactgtggttttggttctgtgaaacactatatttaagattaacggaattttttctaaaaatcaggaaaattagttactaaaaattgctgatcatttttgtttcattatttttgttatttcaaatgtataagctctgggattctctttggagcaatacctacaaagtcaggcaccagaatgtgcctcagagctgtgacatttcaacatggatggttttggtttggtttgggttttgtgtcctttttatttgcagttttttcctggttgcaacagaaagtggcttgggaagtccttaggtgggtatggaacaaattctttttaaaaaattttaaagccagtattttaagtattcttaaatgtgtaaattcatttaatgatttacttctaatttcttgtatcctggctgtctggatgtattgcatttttaaaaaaaactgaactattatgtattgtaatgaatgatgtgaattctgaactgagacagataattgtattgctgtccaacaggggttgggaggggcattttgtagggtttgtataatttctagagttcgaaaggggtaatataaaaatgtgctcgtgtgtttagcctacgtttttctcatgcctccattaccagttgcaattgtgtatctaagacctccaagcttgtttttaaaacaaaacaaaaaacctttctctattatctcagaaatataaatactgttatttttaatattaagaaattcaatataacttttaacacacactgtgggaacattaaaccgtataaaaatgtagttataactatttttaattgccaaggtgttgtttgcttttttcttttaaatattttcttaatattttgtcagattaactagatgaataaataaatctagtattaaccgcattatgaattaaataattttgatttaatgaaagggataatatgatttcccagtgtttactgtagtgtatcttgtacagataacatgtatttttaaaggaaaaaaaaacggaattgaagctattttttcttgcatttctaattgacctgagggacattccgtttgaaatgtactgaagttacagtttctggttttttctccttatttttcttataatgcttgaaatgtctaactattaaaaaagacaattggaaaatgttatgcatggggtttttaagaaaacaaagtgttctttttatttgactgacaattcattttacactctatataataaaatctccacaaggcatcttgtgggcaaagtcaaaaaaaaaaa

SEQ ID NO: 154515 - DNA, 457 bp, Homo sapiens; identical to SEQ ID NO: 137305

SEQ ID NO: 154516 - DNA, 990 bp, Homo sapiens; identical to SEQ ID NO: 137306

SEQ ID NO: 154517 - DNA, 1220 bp, Homo sapiens; identical to SEQ ID NO: 137307

SEQ ID NO: 154518 - DNA, 1522 bp, Homo sapiens
ttcgtggcgcgcctgaaggagcaggaaggggaaggaggcctgggaccccgataagagaaggggagagcgaggggacgagagcggaggaggaagatgcaactgactcgctgctgcttcgtgttcctggtgcagggtagcctctatctggtcatctgtggccaggatgatggtcctcccggctcagaggaccctgagcgtgatgaccacgagggccagccccggccccgggtgcctcggaagcggggccacatctcacctaagtcccgccccatggccaattccactctcctagggctgctggccccgcctggggaggcttggggcattcttgggcagccccccaaccgcccgaaccacagccccccaccctcagccaaggggaagaaaatctttggctggggcgacttctactccaacatcaagacggtggccctgaacctgctcgtcacagggaagattgtggaccatggcaatgggaccttcagcgtccacttccaacacaatgccacaggccagggaaacatctccatcagcctcgtgccccccagtaaagctgtagagttccaccaggaacagcagatcttcatcgaagccaaggcctccaaaatcttcaactgcccggatggagtgggagaaggtagaaccggggccgccggacctcgcttttcacccacgacccagccaagatctgctcccgagaccacgctcagagctcatccaacttggagcttgctcccaggccttttaaagtcgtctgtgtctacatcgccttctacagcacggactatcggctggtccagaaggtgtgcccagattacaactaccatagtgataccccctactacccatctgggtgacccggggcaggccacagaggccaggccagggctggaaggacaggcctgcccatgcaggagaccatctggacaccgggcagggaaggggttgggcctcaggcagggaggggggtggagacgaggagatgccaagtggggccagggccaagtctcaagtggcagagaaagggtcccaagtgctggtcccaacctgaagctgtggagtgactatatcacaggagcactggagggagagtggggctctctgtgcagcctcacagggctttgccacggagccacagagagatgctgggtccccgaggcctgtgggcaggccgatcagtgtggccccagatcaagtcatgggaggaagctaagcccttggttcttgccatcctgaggaaagatagcaacagggagggggagatttcatcagtgtggacagcctgtcaacttaggatggatggctgagagggcttcctaggagccagtcagcagggtggggtggggccagaggagctctccagccctgcctagtgggcgccctgagccccttgtcgtgtgctgagcatggcatgaggctgaagtggcacccctggggtctttgatgtcttgacagattgaccaactgtctccagccaggccacacctgtatgcggccgctcgggggatctccctacggacgc

SEQ ID NO: 154519 - DNA, 669 bp, Homo sapiens
atgagagcaagaaatctcatgacgaaactgacagtcatatccagaaaagaagaactacagcaagaggctgccgcgcaccgagaggtacagagtttaccaccaggtgaaatggaggaaagaagctcatctaaaacttgcccccaggtgtgcgatgggagaattctatcctgcatgatcaaagtccctcctggggaagagaaaaacactgaagaccaaggggcaggagtcactgacatgaagcgggatgtggtcccttcacaccgcccaaagtggatcaccatgaacatctaccgccaagaagagtggaagcgggaagcaggcagcaaaaatccacgacagagccttttccccaagctgctggttggtgacaagctggtgcccagtggtcaagtggattccgacgccccagagaagcacatcaactggaaggcccaggttccaccccaagggtgcacggcccagtctcagaagcccctgcgtgcctctctcaccatgaccccttcagatgtgttcagaaaggaactgcggtggtgttacttgcacgaaagtgaaagaactaatgaattctacgtgctagcacgaaatctcatgacgaaactgacagtcatatccagaaaagaagatctacagcaagaggctgccgttcaccgagaggtatcaagcttgtaa

SEQ ID NO: 154520 - DNA, 1118 bp, Homo sapiens
ttagcaaatgtttatttatatcaaaatacaaaacatttctgaagcagagtaatgttacatgaggagcaattaaatactaaacgtcttttcatcagtttaacttgcaacactcccggggtacctgcactggctgcacatctcatcatttgatgtgtgccttcttttttctcatttgcttatgcacgtgtttgctcattttgatttgtaattcaggatatgaacatgcagtgttactggggatgagttggttagtacttagcaagcctggaaatacctcagtctaaagttccagaatcaagaccatcccatcaagtaccttcctcccagtccctggactctgagactccaccctccaatgccacaggcaaccccctgtggacaggaagtgtgtgtgcaggcttgcctcttcccccacctcctactttcagaccgcccaaagtggatcaccatgaacatctaccgccaagaagagtggaagcgggaagcaggcagcaaaaatccacgacagagccttttccccaagctgctggttgttgacagtgggaaagagggacagggcccaccctgatccatgggagagtgattctcacacatctccctattcccgactcttgctctatatagtagacagaggtagcaagacagaaacaactcctcagatacctccaccttctaccaaagggaaaagcaccaaaattcaatgtccattctgctgtggggaccaaggaacgtgtcccaagcatggggaagagctcaggctcctggcagtggctgtgggccgtaaaagctccatcagagcacactcatccacctgtcgccccaactgatgccacaagcggttcccaggcctcctccttactccacataaagctgatctcaatgacctttgctccaagtgccttaagggctggctcttcagagaagctggaggtcccctctgacacccaaccttacctcatcttgctgagcagtggagcagaaaggtcacaggtaggcactaacatcccctccacactgtacaatttcaaggtaggggctatggccccatcttccctttccctccccaaaatgaagagtcatgttggagactgaggaatagaatggtgcggacgcgtggg

SEQ ID NO: 154521 - DNA, 454 bp, Homo sapiens
  misc_feature (1)...(454): n = a,t,c or g
agctccttctctgctcatgaaatgcggctggacttttcaaaggcggcatgatcccttggctcaccagttcttcccgggtccggcgctgctggagtttcaactgtagcacattcttccgctcactaagtggaggcaaattgggattcctgccagggtggaggcctagggtcagctcgggctgcaaggagagctcctgcagttcattggcaacagcttcactctggggactgggtgccgcagataaggacacgagcactggttcatcatcattttcgccggcccctcctccgtccagcccattcacagcaatgacggaagggggcaggcacaccacactggagaaatccactttggctttcgtgatggcaatcgcctcgcgcggctcaaggccgggttccgcggctcgccccactccggctctagccgcccgcgtgtcctctcgacnaagaatccg

SEQ ID NO: 154522 - DNA, 414 bp, Homo sapiens
tttcgtctttttggtttcctgtcggcagtaattcaaatctgtgtcatcttgactcgcctgaagggtggataaattggtaactgcactgagaaggggatattctcacagtctgatttgagcataaggcatcagattgaatttgtgaaagctttcaagacagcttttctcctgtgactttgactttcttcattatatttgtggatttttgtttctggaagaatccgtcatgactctactggaacctgagatgctaatgatggcagtacagtcagtgctacagttgaaactccagcagcgccggacccgggaagaactggtgagccaagggatcatgccgcctttgaaaagtccagccgcatttcatgagcagagaaggagcttggagcgggccaggacagaggactatctcagacg

SEQ ID NO: 154523 - DNA, 678 bp, Homo sapiens
atggagattgccatcacgaaagccaaagtggatttctccagtgtggtgtgcctgcccccttccgtcattgctgtgaatgggctggacggaggaggggccggcgaaaatgatgatgaaccagtgctcgtgtccttatctgcggcacccagtccccagagtgaagctgttgccaatgaactgcaggagctctccttgcagcccgagctgaccctaggcctccaccctggcaggaatcccaatttgcctccacttagtgagcggaagaatgacttgaaacttttcctccacggatatctacgacttacctttttccggctttttaaactctacctttccagcgactccctttgccattcagagcttttgctatctttctctgcctacctcttaaattttgttactctccagcattcagctctggaggaaagaggctgttttaattacgataactgtaataagccctgttgtatgggagaagttaagggctcaggcccacaagatttccctgaacttcagatgccgatcgatagtggtgggtcctcaggttatccacaacttctgtctgagttggctacaaatcagaggtttccacaagcctctcctcaggttggatcatttgctagaacgactcacagaacttatgaaggccctttacttaaatttgtcaatttattataa

SEQ ID NO: 154524 - DNA, 4457 bp, Homo sapiens
  misc_feature (1)...(4457): n = a,t,c or g
tttcgtgcggcggcgagagcgacggtcccatctttcccaccctcttggttgccgctggccacacgccctccgctggcggcgacttctcagctccgtgcgcccgggctggacagtgagcctcgagaggagatgcgggcggctagagccggagtggggcgagccgcggaacccggccgggagccgcgcgaggcgtgatcggagggtatggttggcatggaattgaatttcatctgtctgtgggaattgtaagcaagattgccatcacgaaagccaaagtggatttctccagtgtggtgtgcctgcccccttccgtcattgctgtgaatgggctggacggaggaggggccggcgaaaatgatgatgaaccagtgctcgtgtccttatctgcggcacccagtccccagagtgaagctgttgccaatgaactgcaggagctctccttgcagcccgagctgaccctaggcctccaccctggcaggaatcccaatttgcctccacttagtgagcggaagaatgtgctacagttgaaactccagcagcgccggacccgggaagaactggtgagccaagggatcatgccgcctttgaaaagtccagccgcatttcatgagcagagaaggagcttggagcgggccaggacagaggactatctcaaacggaagattcgttcccggccggagagatcggagctggtcaggatgcacattttggaagagacctcggctgagccatccctccaggccaagcagctgaagctgaagagagccagactagccgatgacctcaatgagaagattgcacagaggcctggccccatggagctggtggagaagaacatccttcctgttgagtccagcctgaaggaagccatcattgtgggccaggtgaactatcccaaagtagcagacagctcttccttcgatgaggacagcagcgatgccttatcccccgagcagcctgccagccatgagtcccagggttctgtgccgtcacccctggaggcccgagtcagcgaaccactgctcagtgccacctctgcatcccccacccaggttgtgtctcaacttccgatgggccgggattccagagaaatgcttttcctggcagagcagcctcctctgcctcccccacctctgctgcctcccagcctcaccaatggaaccactatccccactgccaagtccacccccacactcattaagcaaagccaacccaagtctgccagtgagaagtcacagcgcagcaagaaggccaaggagctgaagccaaaggtgaagaagctcaagtaccaccagtacatccccccggaccagaagcaggacaggggggcaccccccatggactcatcctacgccaagatcctgcagcagcagcagctcttcctccagctgcagatcctcaaccagcagcagcagcagcaccacaactaccaggccatcctgcctgccccgccaaagtcagcaggcgaggccctgggaagcagcgggacccccccagtacgcagcctctccactaccaatagcagctccagctcgggcgcccctgggccctgtgggctggcacgtcagaacagcacctcactgactggcaagccgggagccctgccggccaacctggacgacatgaaggtggcagagctgaagcaggagctgaagttgcgatcactgcctgtctcgggcaccaaaactgagctgattgagcgccttcgagcctatcaagaccaaatcagccctgtgccaggagcccccaaggcccctgccgccacctctatcctgcacaaggctggcgaggtggtggtagccttcccagcggcccggctgagcacggggccagccctggtggcagcaggcctggctccagctgaggtggtggtggccacggtggccagcagtggggtggtgaagtttggcagcacgggctccacgccccccgtgtctcccaccccctcggagcgctcactgctcagcacgggcgatgaaaactccacccccggggacacctttggtgagatggtgacatcacctctgacgcagctgaccctgcaggcctcgccactgcagatcctcgtgaaggaggagggcccccgggccgggtcctgttgcctgagccctggggggcgggcggagctagaggggcgcgacaaggaccagatgctgcaggagaaagacaagcagatcgaggcgctgacgcgcatgctccggcagaagcagcagctggtggagcggctcaagctgcagctggagcaggagaagcgagcccagcagcccgcccccgcccccgcccccctcggcacccccgtgaagcaggagaacagcttctccagctgccagctgagccagcagcccctgggccccgctcacccattcaaccccagcctggcggccccagccaccaaccacatagacccttgtgctgtggccccggggcccccgtccgtggtggtgaagcaggaagccttgcagcctgagcccgagccggtccccgccccccagttgcttctggggcctcagggccccagcctcatcaagggggttgcacctcccaccctcatcaccgactccacagggacccaccttgtcctcaccgtgaccaataagaatgcagacagccctggcctgtccagtgggagcccccagcagatggacctggagcacccactgcagcccctctttgggacccccacttctctgctgaagaaggaaccacctggctatgaggaagccatgagccagcagcccaaacagcaggaaaatggttcctcaagccagcagatggacgacctgtttgacattctcattcagagcggagaaatttcagcagatttcaaggagccgccatccctgccagggaaggagaagccatccccgaagacagtctgtgggtcccccctgggcagcacagccatcaccttctgctgagctcccccaggctgccccacctcctccaggctcaccctccctccctggacgcctggaggacttcctggagagcagcacggggctgcccctgctgaccagtgggcatgacgggccagagcccctttccctcattgacgacctccatagccagatgctgagcagcactgccatcctggaccaccccccgtcacccatggacacctcggaattgcactttgttcctgagcccagcagcacccatgggcctgggacctgggctaatggccacctgggacagcatggactggctgggagctgtcgtcaggtggtcccgtgctgagcctagcccccctcagcaccacagcccccagcctcttctccacagacttcctcgatggccatgatttgcagctgcacttgggattcctgcttgtagctctctggctcaagacggggtggggaaggggctgggagccagggtactccaatgcgtggctctcctgcgtgattcggcctctccacatggttgtgagtcttgacaatcaacaatgcctgattttttccttccctgggaggctagaacagagaagcccttactcctggttcagtgccacgcagggcagaggagagcagctgtcaagaagcagccctggctctcacgctggggttttggacacacggtcagggtcagggccatttcagcttgacctccttttttgaggtcagggggcactgtctgtctggctacaatttggctaaggtaggtgaagcctggccaggcgggaggcttctcttctgacccagggctgagacaggttaaggggtgaatctccttcctttctctccctgctttgctgtgaagggagaaattagcctgggcctctacccccccattccctgtgtctgtccaaccccaggatcccagggctccctgccatatttagtgtctttgtgtagtgtaaccatttagtggttggtggcaacaattttatgtacaggtgtatatacctctatattatatatcgacatacatatatatttttgggggggggggcggacaggaaatgggggcaactccctcccatcctactttcacaaaagggcctggatgcaaggttacccttgaagctgtgtgcccaaagtctggtgcccaagtctggcatgcaagctaccccaggcccacccatcacgtgtgattgacatgtaggtaccctgccacggcctatgccccacctgccctgcttccctggctccttatcagtgccatgagggcagaggtgctaagctggccttcctgcccaggagctctccacccactcacattccgtcccgcgccgcctccactgcagccagcgtggccctaggacaggaggagcttcgggcccagcttcaccctgcggtggggctgaggggtggccatactncctgccctggggccactggcttcacattctgggctgatctcataggggagtaggggtggagtcaccaaaaccagtgctgggacaaagatggggaagggggtttgaactttttaaaataaacacaaaaacccaaaaa

SEQ ID NO: 154525 - DNA, 1226 bp, Homo sapiens
ggctgcttggtgacaaagatccaggaaccactggctgtcttaatggaagtgcaggagggggcttcctcagggaccccagaaccacccaactggctggagcatcccgtcctccggttctcaccgtgtggcaaacaaaaccagtcgcgttggcgggggctgggcgtggaggcacaggcctgctcaccactgctgctggggtggggtctcctgctcacggacagcccagggaggggccctggagtttcaggcaggagaaatggttccaattgaaaacagcagatcaatgtgggagtggtgaggactctgcaactgggtgaaaaagcagctggagcagatgggcgtttggcactgttaggtccccatgtggccgtcagcaccgggacatcggagccacggataattcgggaaggtctggtcctgcagagcagcggccccaatcgtccccagcagcgcaatgtctgcggccggcggatccaggctcacctttcatcctaggaaccttccaccgcgaacgccaacccaggacagcgctgctcttacttgaagttatcagacagagcggcaggtttactcttcgaggggattaaacccagcgggaaccctggacctacggccggtcatcagacgtcaacaggtaaaatcctcaaaaatacatgatcccttttgtgtctgtctcaggtgtacaatgaagtctgaattccatgtttaaacaaacaaagaaaaacttggggtctgaagtgaaatcggacaccccccgagttaatgccaacactctctatgtcacgttccgggcggagaggctgttaggtggtccgtggctcggcagctcctggcttcccaacaggcatctgtccggtgcccgggcctccccggcagccttggtgtgtgccttgctgcgtttctgtctgtcctcccggacaaaggcggctggccgtgcagcgcggagcggaggggctgtcttgacacattcctcaagatgctgagctccaacctcctccccatgcccgacagggaggcctggggagaggaggtggtgccgagggagaaggaaaggaaagcaaagaattcccagaatcatacaatcagttgtctgaacttgtttatgtgtttttgtcttaaaccacgggaaggcaggcgatcaaatggaaagggctgggtgtgtccaggtgccgccgatgcccacaggccgccgcgggctgttctcctccgtctgtgggtgcggccgc

SEQ ID NO: 154526 - DNA, 357 bp, Homo sapiens
ccatctaccctgtctgtcttctgtgaggtgcgagggactaagagaacgagattcttgaggtcgtacaacttggctcaagagtctgtgtttttcatttttatcatctccactgttgtaggcatcactgtccggagaatgttcacgccggcgcttcggggactgtctagggctgggagatgttcaatacagaattgtacatttgaaagataaatctaagtgggctgaaacaatgtggcagcaactgctgtgatgtttggtctggtcttccctttagtactttcacttaagtaccaggtctatttttttaaggttttggctcttatgaatttctgcagtagtagttaatgtatgtatcgg

SEQ ID NO: 154527 - DNA, 1479 bp, Homo sapiens
atgtatgaacgtgtttacgtctccacggacattgccatcaaactgtgctgcaagcttttgaatcgtcagtttgacaggctttacaagaagcatagcacaggatctgcatccggtgagggcctcaaagcccttccactcatcgtggaaggagaaggggagccagtgtgtgcagagatcacaaggcaagagagagaagagggagcagtgcatttgttcggcctgacttggcagttgcaaccagttgaaggagagctgtatgcaaatggagttagcaaagggaacagggggaccgagtccatggacactacttactctccaattggaggaaaagtttctgataaatcagagaaaaaagtgtttcagaagggacgggcgatagacactggagaagttgacattggtgcacaggtcatgcagaccattccacctggtttattctggcgtttccagattactatccaccatccaatatatctgaagttcaatatttctttagccaaggactctctgctgggaatttatggcagaagaaacattccacctacacatactcagtttgattttgtaaaactaatggatggcaaacagctggtcaagcaggactccaagggctctgatgatacacagcactcccctcggaacctgatcttaacttcgcttcaggagacaggtttcatagagtatatggatcaaggaccttggtatctggcgttttacaatgatggaaaaaagatggagcaagtattcgtgttaactacagcaattgaaataatggatgactgttcaaccaattgcaatggaaatggagagtgtatctctggccattgtcattgtttcccaggattccttggacctgactgtgctagagattcctgccctgtgctgtgtggtgggaatggagaatacgagaaaggacactgtgtctgccggcatggctggaaggggccagagtgtgacgttccggaagaacaatgcattgatccaacatgctttggccacggcacctgcatcatgggagtctgcatctgtgtgccaggatacaaaggagaaatatgcgaggaagaggactgcctagacccaatgtgttccaaccatggcatctgtgtaaaaggagaatgtcactgttctactggctggggaggagttaactgtgaaacaccacttcctagcagtgctcaggacacggaacttttcttctggacgctggagtatgcagctgtgatcccaagtggacaggatctgactgctcaacagagcacaaaggagggagcagtagactatttttgtgagaagaagccttacagtcagctatatgaagtgacaatagatcccaaaaggaagtatttacaaggtgtgtctgtccctgtatatgagagatcctatggagaaagtgtctaccactacagcttgccctgctgccatggaaattctctgacaggggaggataaagtagaaaggctctgtggtggagatggctga

SEQ ID NO: 154528 - DNA, 4512 bp, Homo sapiens
gtgcgattagagtggccaacagaccttgcagtaaatcctatggacaattcattgtatgtcttggataacaacattgtgctgcaaatttctgagaacaggcgtgttcggatcatcgcaggacgccccattcactgccaggtgccaggcatcgatcatttcctggtcagcaaggtagcaattcactccactctagagtcagcgagggccatcagtgtctcccacagcgggctgctcttcatagctgaaacagacgagaggaaagtaaaccgcattcagcaagtaaccaccaatggggagatctacatcatcgctggtgcccccactgactgtgactgcaaaattgatccaaactgtgactgtttttcaggtgatggtggctatgccaaagatgcaaagatgaaagccccttcctccttagcagtgtcgcctgatggaaccctctatgtggcagacctcggaaatgttcgaattcgtaccatcagcaggaaccaagcccacctgaatgacatgaacatttatgagattgcttcacccgctgatcaggaactgtaccagttcactgtaaatggaacccacctacacaccctgaacttgataacaagggactatgtttataacttcacctacaattctgaaggtgacttgggcgcgattaccagcagcaatggcaattcagtgcacattcgccgtgatgcaggcggaatgccgctatggcttgtggtgcctggcggacaagtatactggctgactataagcagcaatggagtcctgaaaagagtgtcagcccaaggctataatctggccttaatgacctatccaggaaacacagggcttctggctaccaaaagtaacgaaaatggatggacaaccgtttatgagtatgaccccgagggacacctgaccaatgcaacgtttcccactggagaggtcagcagcttccacagtgacctggagaagctgacaaaagtggagctagatacttccaaccgtgaaaatgtcctcatgtcaaccaacttgacggcaactagtaccatatatattttaaaacaaggtggtgacaccagacactctaagagtacactaacttttgttagtggtattttgtggagtacggcaactgtgatggtgggcccaggtgaaaatactcaaagtacctatcgggtgaatccagatggttccctgcgtgtcacttttgccagcgggatggagatcggcctcagctcagagccccacatcctggcaggggcagtcaaccctaccctgggcaaatgcaacatctcattgcccggagagcacaatgcaaacctcatcgagtggcggcagaggaaggagcaaaacaaaggcaatgtttcggcttttgaaaggaggctgagggcccacaacagaaacctactctccatagattttgatcatataacccgcacaggaaagatctatgatgaccatcgaaaattcacccttcgaattctttatgaccagactgggcgacccattctgtggtctcctgtaagcagatataatgaagtgaacatcacatattcaccttcgggattggtgacgtttattcaaagaggaacgtggaatgaaaaaatggaatatgaccagagtgggaaaattatttcaagaacttgggctgatgggaaaatttggagctatacctacttagaaaaatctgtgatgcttctcctacacagccagcggcgttacatctttgagtatgaccaaccagattgtctgctctcagtcaccatgcctagcatggtgcgtcacagcttacaaaccatgctttcagtgggctactaccggaacatctacaccccaccggacagtagcacttcttttatccaagactatagtcgagatggccgattgctacagaccctgcatctggggacagggcgcagagtcttatacaagtacaccaagcaagcaaggctttctgaggttctctatgataccactcaggtcacattaacatatgaagagtcttctggagtgattaagacaatacacctgatgcatgacggattcatctgcacaatcagatacaggcaaacaggacctcttattggacgccagattttcagattcagtgaagaaggccttgtgaatgcacggttcgactacagctacaacaatttccgagtcacaagcatgcaagctgtaatcaatgaaacccctttgcctatagatctttaccgatatgttgatgtctctggcagaacagagcagtttggaaaattcagtgtaattaattacgatttaaatcaggtcataactactacagtgatgaaacacaccaaaatcttcagtgccaatggacaagtcattgaagtccaatatgaaatcctaaaggcaattgcctactggatgaccattcaatatgataatgtgggccgcatggtaatatgtgacataagggtaggagtagatgccaatataacaaggtacttctatgaatacgatgctgatgggcaacttcagactgtttctgtaaatgacaaaacccagtggcgttatagttacgatctgaatggaaacatcaacctcttaagccatgggaagagtgctcgtcttactcctctccgatatgacctccgagaccgcatcaccagattaggagaaattcagtataaaatggatgaagatggctttctgaggcagaggggaaatgatatttttgaatataattctaatggcctgctgcagaaagcctacaataaggcttctggctggactgtgcagtattactatgatgggcttgggcgacgtgtcgcgagtaagtccagcctagggcagcaccttcagttcttttatgcagaccttaccaaccccataagagttactcatttgtacaaccacacaagctcggagattacatctctgtattatgatctccaaggtcaccttattgccatggagttaagcagtggtgaagaatattatgtagcctgtgataatacaggtaccccactagctgtgttcagcagccgaggtcaggtcataaaggagatactatacacaccttatggcgatatctatcatgacacttaccctgactttcaggtcattattggttttcatggaggactctatgatttccttactaaattagtgcacctggggcaaagggattatgatgttgttgctggcagatggacaacgcctaatcatcacatatggaaacagttgaacctccttcctaaaccattcaacctctactcctttgaaaataactacccagttggcaaaattcaagatgttgcaaagtataccacagacatcagaagttggttggagctatttggtttccaattacacaatgtactacctggatttcccaaacctgaattagaaaatttagaattaacttacgagcttctacggcttcagacaaaaactcaagagtgggatcctggaaagactatcctgggcattcagtgtgaactccagaaacagctcaggaatttcatttccttggaccaactacctatgactccccgatacaatgatggacggtgccttgaaggagggaagcaaccaaggtttgctgctgtcccttctgtttttgggaaaggtataaaatttgccatcaaggatggcatagtaacagctgatattataggagtagccaatgaagatagcaggcggcttgctgccattctcaataatgcccattacctggaaaacctacattttaccatagaggggagggacactcactacttcattaagcttgggtctctggaggaagacctggtgctcatcggtaacactggggggaggcggattctggagaatggtgtcaatgtcactgtgtcccagatgacttctgtgttgaatgggaggactagacggtttgcagatattcagctccagcatggagccctgtgcttcaacatccggtatgggacaactgtcgaagaggaaaagaatcacgtgttggagattgccagacagcgcgcagtggcccaggcctggactaaggaacaaagaaggctgcaagagggggaagaggggattagggcatggacagaaggggaaaagcagcagcttttgagcactgggcgggtacaaggttacgatgggtattttgttttgtctgttgagcagtatttagaactttctgacagtgccaataatattcactttatgagacagagcgaaataggcaggaggtatttgttacagcaatactcctcctctcagtaccaaaatctgtattggtctgttcaggctgccataacaagataccatagacagggtggcttaaacaacagaaatttatttctcacaattctggagactgggaagtccaagatcaaggtgctgcaaatagctgccatccagcccagtggcaagcaggagcttctcgccggtttccctgctgattttgccatgatacacagccactgcgtccatggcctggtggactcttgggcaggccgaggaggagaactgtgcaagggagatgccgctgctactgcagccaggcacaagtcaaccacctga

SEQ ID NO: 154529 - DNA, 12297 bp, Homo sapiens
tttagagcaccgctgccagcatccggaggagagcaatgcgggggcccgagcggcagctcgaacagtaatgtggatttacagtcgtttcccgcaggagtcggccgagacgccctaagtcccgggcactggcagcgcccggcggagccgagcacctggcgagggggcgggggaacagcacctggggacgccgccgaaacttgcgcttggaataggaattacaagggtgacctttattccgctgtctcctttttgattcccataacttctggacctatcaaggactgcttgcattaaaggacttcctcatcctttttttcatgaaactgagcttgcttaatcagagatggagcaaactgactgcaaaccctaccagcctctaccaaaagtcaagcatgaaatggatctagcttacaccagttcttctgatgagagtgaagatggaagaaaaccaagacagtcatacaactccagggagaccctgcacgagtataaccaggagctgaggatgaattacaatagccagagtagaaagaggaaagaagtagaaaaatctactcaagagatggaattctgtgaaacctctcacactctgtgctctggctaccaaacagacatgcacagcgtttctcggcatggctaccagctagagatgggatctgatgtggacacagagacagaaggtgctgcctcacctgaccatgcactaagaatgtggataaggggaatgaaatcagagcatagttcctgtttgtccagccgggccaactctgcattatccttgactgacactgaccatgaaaggaagtctgatggggaaaatggtttcaaattctctcctgtttgttgtgacatggaggctcaagctgggtctactcaagatgtgcagagcagcccacacaaccagttcaccttcagacccctcccaccgccacctccgcctcctcatgcctgcacctgtgccaggaagccaccccctgcagcggactctcttcagaggagatcaatgactacccgcagccagcccagcccagctgctccagctcccccaaccagcacgcaggattcagtccatctgcataacagctgggtcctgaacagcaacataccattggagaccaggcattccctgttcaaacatggatctggttcctctgcgatcttcagtgcagccagtcagaactaccctctgacatccaataccgtgtactcgccccctcccaggcctcttcctcgaagcaccttttcccgacctgcctttacctttaacaaaccttacaggtgctgcaactggaagtgcacagcattgagcgccactgcaatcacagtgactttggccttgttactagcctatgtgattgcagtgcatttgttcggcctgacttggcagttgcaaccagttgaaggagagctgtatgcaaatggagttagcaaagggaacagggggaccgagtccatggacactacttactctccaattggaggaaaagtttctgataaatcagagaaaaaagtgtttcagaagggacgggcgatagacactggagaagttgacattggtgcacaggtcatgcagaccattccacctggtttattctggcgtttccagattactatccaccatccaatatatctgaagttcaatatttctttagccaaggactctctgctgggaatttatggcagaagaaacattccacctacacatactcagtttgattttgtaaaactaatggatggcaaacagctggtcaagcaggactccaagggctctgatgatacacagcactcccctcggaacctgatcttaacttcgcttcaggagacaggtttcatagagtatatggatcaaggaccttggtatctggcgttttacaatgatggaaaaaagatggagcaagtattcgtgttaactacagcaattgaaataatggatgactgttcaaccaattgcaatggaaatggagagtgtatctctggccattgtcattgtttcccaggattccttggacctgactgtgctagagattcctgccctgtgctgtgtggtgggaatggagaatacgagaaaggacactgtgtctgccggcatggctggaaggggccagagtgtgacgttccggaagaacaatgcattgatccaacatgctttggccacggcacctgcatcatgggagtctgcatctgtgtgccaggatacaaaggagaaatatgcgaggaagaggactgcctagacccaatgtgttccaaccatggcatctgtgtaaaaggagaatgtcactgttctactggctggggaggagttaactgtgaaacaccacttcctgtatgtcaagagcagtgctcaggacacggaacttttcttctggacgctggagtatgcagctgtgatcccaagtggacaggatctgactgctcaacagagctgtgtaccatggagtgtggtagccatggagtctgctcaagaggaatttgccagtgtgaagaaggctgggtaggaccaacatgtgaggaacgctcctgtcattctcattgtactgagcatggccaatgcaaagatggaaaatgtgagtgtagccctggatgggagggcgaccactgcacaattgctcactacttagatgctgtccgagatggctgcccagggctctgctttggaaatggacgatgtaccctggatcaaaatggttggcactgtgtgtgtcaggtgggttggagtgggacaggctgcaatgttgtcatggaaatgctttgtggagataacttggacaatgatggagatggtttaaccgactgtgtggatcctgactgttgtcaacaaagcaactgttatataagtcctctctgccagggctcaccagatcctcttgacctcattcagcaaagccaaactctcttctctcagcacacttcaagacttttttatgatcgaatcaaattcctcattggcaaggacagtactcatgtcattcctcctgaggtgtcatttgacagcaggcgtgcctgtgtgattcgaggccaagtggtggccatagatggaactcctctagtgggagtgaatgtcagtttcttgcaccacagtgattatgggtttaccatcagccggcaagatggaagctttgacctcgtggccatcggtggcatctctgtcatcttaatcttcgaccgatcccctttcctgcctgagaagagaacactctggttgccttggaatcagtttattgtggtagagaaagtcaccatgcagagagttgtatcagacccgccatcctgcgatatctccaactttatcagcccaaaccctattgtgcttccttcaccgctcacatcatttggagggtcctgtccagagaggggaactattgttcctgagctgcaggttgtacaggaggaaattcccattccctccagctttgtgaggctgagttacctgagcagccgcacccctgggtataaaaccctgctacggatccttctgacacattcaacgattcccgtaggcatgataaaagtacacctcacagtagctgtggaagggcgactcacacagaagtggtttcccgccgcaattaatcttgtctacacatttgcttggaacaagaccgatatctatggacagaaggtttggggcctggcagaggctttggtatctgtgggatatgaatatgaaacgtgccctgactttattctctgggagcaaaggacagtcgttttacaaggttttgagatggatgcttctaacctaggagactggtctttgaataagcatcacattttgaatcctcaaagtggaatcatacataaagggaatggagaaaatatgttcatttcccagcagcccccagtcatatcaaccataatgggtaatggacaccaaaggagtgtagcctgcaccaactgcaatggcccagcccacaacaacaaactctttgctcctgtcgccttagcttctggccctgatggcagtgtgtatgttggcgacttcaattttgtaaggagaatatttccctcgggaaactccgttagtattttggaattaagcacaagtcctgctcacaaatactatctggctatggaccctgtgtctgaatcactctatctatcagacaccaatactcgcaaagtctacaagttgaaatctcttgtggagacgaaagatctgtccaagaattttgaagtggtggcaggaactggtgatcagtgccttccctttgaccagagtcattgtggagatggtgggagagcatcggaagcttcactgaatagccctcgaggcatcacagttgataggcatggatttatttactttgtggatgggactatgattcgcaaaattgatgagaatgctgtgatcacaactgtaatcggctcaaatggtctgacttccacacaaccactgagctgtgactcaggaatggacatcactcaggtgcgattagagtggccaacagaccttgcagtaaatcctatggacaattcattgtatgtcttggataacaacattgtgctgcaaatttctgagaacaggcgtgttcggatcatcgcaggacgccccattcactgccaggtgccaggcatcgatcatttcctggtcagcaaggtagcaattcactccactctagagtcagcgagggccatcagtgtctcccacagcgggctgctcttcatagctgaaacagacgagaggaaagtaaaccgcattcagcaagtaaccaccaatggggagatctacatcatcgctggtgcccccactgactgtgactgcaaaattgatccaaactgtgactgtttttcaggtgatggtggctatgccaaagatgcaaagatgaaagccccttcctccttagcagtgtcgcctgatggaaccctctatgtggcagacctcggaaatgttcgaattcgtaccatcagcaggaaccaagcccacctgaatgacatgaacatttatgagattgcttcacccgctgatcaggaactgtaccagttcactgtaaatggaacccacctacacaccctgaacttgataacaagggactatgtttataacttcacctacaattctgaaggtgacttgggcgcgattaccagcagcaatggcaattcagtgcacattcgccgtgatgcaggcggaatgccgctatggcttgtggtgcctggcggacaagtatactggctgactataagcagcaatggagtcctgaaaagagtgtcagcccaaggctataatccggccttaatgacctatccaggaaacacagggcttctggctaccaaaagtaacgaaaatggatggacaaccgtttatgagtatgaccccgagggacacctgaccaatgcaacgtttcccactggagaggtcagcagcttccacagtgacctggagaagctgacaaaagtggagctagatacttccaaccgtgaaaatgtcctcatgtcaaccaacttgacggcaactagtaccatatatattttaaaacaagaaaatactcaaagtacctatcgggtgaatccagatggttccctgcgtgtcacttttgccagcgggatggagatcggcctcagctcagagccccacatcctggcaggggcagtcaaccctaccctgggcaaatgcaacatctcattgcccggagagcacaatgcaaacctcatcgagtggcggcagaggaaggagcaaaacaaaggcaatgtttcggcttttgaaaggaggctgagggcccacaacagaaacctactctccatagattttgatcatataacccgcacaggaaagatctatgatgaccatcgaaaattcacccttcgaattctttatgaccagactgggcgacccattctgtggtctcctgtaagcagatataatgaagtgaacatcacatattcaccttcgggattggtgacgtttattcaaagaggaacgtggaatgaaaaaatggaatatgaccagagtgggaaaattatttcaagaacttgggctgatgggaaaatttggagctatacctacttagaaaaatctgtgatgcttctcctacacagccagcggcgttacatctttgagtatgaccaatcagattgcctgctgtcagttaccatgcctagcatggtgcgccacagcttacaaaccatgctttcagtgggctactaccgtaatatctacaccccaccggacagtagcacttcttttatccaagactatagtcgagatggccgattgctacagaccctgcatctggggacagggcgcagagtcttatacaagtacaccaagcaagcaaggctttctgaggttctctatgataccactcaggtcacattaacatatgaagagtcttctggagtgattaagacaatacacctgatgcatgacggattcatctgcacaatcagatacaggcaaacaggacctcttattggacgccagattttcagattcagtgaagaaggccttgtgaatgcacggttcgactacagctacaacaatttccgagtcacaagcatgcaagctgtaatcaatgaaacccctttgcctatagatctttaccgatatgttgatgtctctggcagaacagagcagtttggaaaattcagtgtaattaattacgatttaaatcaggtcataactactacagtgatgaaacacaccaaaatcttcagtgccaatggacaagtcattgaagtccaatatgaaatcctaaaggcaattgcctactggatgaccattcaatatgataatgtgggccgacatggtaatatgtgacataagggtaggagtagatgccaatataacaaggtacttctatgaatacgatgctgatgggcaacttcagactgtttctgtaaatgacaaaacccagtggcgttatagttacgatctgaatggaaacatcaacctcttaagccatgggaagagtgctcgtcttactcctctccgatatgacctccgagaccgcatcaccagattaggagaaattcagtataaaatggatgaagatggctttctgaggcagaggggaaatgatatttttgaatataattctaatggcctgctgcagaaagcctacaataaggcttctggctggactgtgcagtattactatgatgggcttgggcgacgtgtcgcgagtaagtccagcctagggcagcaccttcagttcttttatgcagaccttaccaaccccataagagttactcatttgtacaaccacacaagctcggagattacatctctgtattatgatctccaaggtcaccttattgccatggagttaagcagtggtgaagaatattatgtagcctgtgataatacaggtaccccactagctgtgttcagcagccgaggtcaggtcataaaggagatactatacacaccttatggcgatatctatcatgacacttaccctgactttcaggtcattattggttttcatggaggactctatgatttccttactaaattagtgcacctggggcaaagggattatgatgttgttgctggcagatggacaacgcctaatcatcacatatggaaacagttgaacctccttcctaaaccattcaacctctactcctttgaaaataactacccagttggcaaaattcaagatgttgcaaagtataccacagacatcagaagttggttggagctatttggtttccaattacacaatgtactacctggatttcccaaacctgaattagaaaatttagaattaacttacgagcttctacggcttcagacaaaaactcaagagtgggatcctggaaagactatcctgggcattcagtgtgaactccagaaacagctcaggaatttcatttccttggaccaactacctatgactccccgatacaatgatggacggtgccttgaaggagggaagcaaccaaggtttgctgctgtcccttctgtttttgggaaaggtataaaatttgccatcaaggatggcatagtaacagctgatattataggagtagccaatgaagatagcaggcggcttgctgccattctcaataatgcccattacctggaaaacctacattttaccatagaggggagggacactcactacttcattaagcttgggtctctggaggaagacctggtgctcatcggtaacactggggggaggcggattctggagaatggtgtcaatgtcactgtgtcccagatgacttctgtgttgaatgggaggactagacggtttgcagatattcagctccagcatggagccctgtgcttcaacatccggtatgggacaactgtcgaagaggaaaagaatcacgtgttggagattgccagacagcgcgcagtggcccaggcctggactaaggaacaaagaaggctgcaagagggggaagaggggattagggcatggacagaaggggaaaagcagcagcttttgagcactgggcgggtacaaggttacgatgggtattttgttttgtctgttgagcagtatttagaactttctgacagtgccaataatattcactttatgagacagagcgaaataggcaggaggtaacaaaaatatctctgcctttgcgtcaccaaagactgcctgtttttaaaacataaaatggtttattgtattggttttctagatcagaactctgtatatgtaaatatggaggaaaaacatatccaactgcctttcaatgtgacggaagatggtattttaatattgtttgtttaaactctttaagaaatgacagagatttttagttcttgtgtggcagtattcaaaataacacaaggtagaactcaaacagctaaaaacagttttcagaaagcaccactttcaatttgccgagccatgcatatgttccaatatccagaaagaacccaaggttctctatctctattgtgagaagcagtttcatccttaactgttggcagaacttacgggctatttgaataggtggtgcaatagtatctgaaacttgcctttcgaaagactgccagccctttgacgttttccagatctgttataggaaacttaaaaacaggtgtaaaatgtcttcagccaccatctcctagagtgaggacccaattgcccttccttcttgattattcctccttgcttgttaaagtaaatgccatattgttgtgctgtgttttggcgtgtggtggctgggttctgtctaccatgcttccctgtgggtgtggtaaccagactgtatagccgctatttgctcgtgtgtacatgataccaaagcagctggccagcgtgacctctctcacacgacctgttttgactcaattttttactaaaagttgttcagctgtattggtatcatgtaaacatagcttttattaacctgggtaggaatttctcatttatatataggatgtgttttggtcatagtttcacattagtgattcagtatctatacactgacccaatggttttgtgcacatgaacggtaatttacttaaaagtatgattctggtacaaaaacaaacaaaggctttagcaggcatacgtgtctgggatgccgatacatacattaactactactgcagaaattcataagagccaaaaccttaaaaaaatagacctgggtacttaagtgaaagtactaaagggaagaccagaccaaacatcacagcagttgctgcccacattgtttcagcccacttaggatttatctttccaaatgttacaattctgtattggaacatctcccagccatcttcagggaaatcggatccagtaaatcctttccaaccgaaaacatttcaactaactatagagaggcagactcatttttactaaaataatttatacagttagttattttcgttctccgtacttacccatttatctttatttaatcgtctctactgcctaggaaaataactattttccaggacgggttatttgttctgcgatcatttaaaatttggagaaaggtcaggattagtgttaatatcagctgcagtttctcaatctctaggaatcctgcagtaaaacaagccccttggtgagctggaagatttgtgcccagtgacaaagagatagtttgtaaaatgctgtgtaattgtaagttaccacaaatgaaaatacatgacagcacaatgtggcccgtagaaaattcccctgagccagcttctgcactttcatcaccgaatctgaacatttgctatgtctgaaggcaaatttatgatggaatgttagtttggattctttccagatgctacctaaatgcagtgtggggtcattgccttgctttgcgatgacagtttctttgaaaatatgcaaagtcataagctcatgttaaggtttttcaagagtctgcctcctactacacaaaggaaagcaagggaaaggaaatgaccctggcaaacagtagggaagggtgtattcaaacatttcattttcaaaaccttcgggttagaataccacttacacatgtattctgagagacagaattcatgaggaactcatctctctttataactggaaacacaccagcttgatatattgctaatccatactaaaatcatattattgggttttttctgaatcaggcctgtattaatggtacagtatttattcagaatggaattctaaaattactaacaaacttgttgaaaatttgaatacctccacaccaacctaaaaatggaccttaagttcctagaacctctgatgttcttttaaattaatggaaaaataatttgtgaactgtatatagagagtgcattcataaatgtgattatgtattttatcacaaatccaaaatgtcaatattagagtctattttgcttatattttaagcaattatacgtttttgcaattcattgatgatgtatcattttcaaactgctttaaatatccattagaaacaaatatttgaagcttttacttaatagtgattaccttgaactgtgcatttctagtttgtaatacgtatttggttggttcgtgcctttagtttgttaaagttacatttgtattatattcaggaaatgcactttttattacttacagctgtggttttaatactgccttgaactattattattctttttacaactcctaaagcttgagggaggaaagaaaaaaaaaacaaaactactaatcagtagtaaatcgaagagaaacattttggcatttcttaagaagaagatggagatattgagtatatcacttcctattcagctgaatagaaagaatgccttcattgacttgcagttctgcagtttaaattattgaaagaacaattcgtttgcatttcctgatgaaagtaaaagcatttttcagagaaacatatgaatttctcatacccagcagacagatggctgacactgcacagccacacaccattcgagtaagttaaagtgagagcatagtagttggactctcctatgaagaacattctgggctggaggcagggaatactccatggttgtttctttttcctacttaagcccattttgtttgtgcttttctgttttgttttgttttcactcttgcactacagtctagagatccaaatgaactgaaaagttcaaagtttaacacatttaaatatgtttacttttagttgtcattctaatcgttattgattagaagcatgactcctgaaggaaagggaaataaatctcaattcatactaacttgcaacaaaacacttttaccatataaataagtatatgatttatttttaacccaaaaaatgtataaaataagtgtgtcctttactgtcaatttatctagaagatctataatatatagactacatatatataatatatacaacatagccaaatgtatgaaaacttgacaatgtataatttggaattcacatgctacctatgtagacaggtatgaaattaagttataattttcatgaggacattttcatcactgttggacacagtttcaaggcattccctccatgttattttggactctttttctttgttttttctttaaaaaatatatttttaactagaccaggccccactataatatcacttaagagagtcagggcaaagtttttgcatttatgaagatgtgttcatgtaagggtgattgtaatggagttcattggtaatagaagcaaaagtacagtaacgaagtattgaaaagaaaattttggagacattggagcatattatatatagctatgtggaaagacataaggctacagatggaatggaacattcctgttttcttgaagaaattcacatacacatagctgacctgactagtacttcagctcttccacagccttctataaaggttctttcttctgcaaagaaaacaaaacaaaacaaaacaaaacaaa

SEQ ID NO: 154530 - DNA, 3188 bp, Homo sapiens
tttatacacccagactcttagtgttgcgtcctgccttgtttccttgttaaggatctatgcagacctcccgctttggcttagctagcgtgacattggctatcatttgacaagactaactttttttttttttttttttgactgagtctccctctgtcacctaggctggagtgcagtggcacaatcttggctcgctgcaaccttcacccttcacctcccaggtcgaagcgattctcctgcctcagtctcccgagtagctgggattacaggcgtgcgccaccaaatctggctatttttttattattattatttttagtagagatggggtttcaccatgttggccagactggtcttgaactcttggcctcaaattatctgcccacctcggcctcccaaagtgctgggattacaggcatgagccaccatgcccagctgacaagactaattttttatccctttggtttattggctacaacatcttcttggaatcagaggtgaattttttcttaccttgggatgcctgagactaggggagtatagaattccaattggtaattaaggcatctttctgctcctgatcagaagggcaggttagttgggagaggtcagatggcacaacagaagtcaccttgtaagtaaggcaaagactttgaaggcattagcgtttctcattacttaggtcaataaccttgagggaatcaatggcttttttgccgctctacctctttgtgtatctctttgacttttctttctctgtctagtttcctctgttctcagtttatattctatgttatcagtctctcctttccacagtacaaacattccatcctttctcctgtgcaattctgtctctccctcttattatctttatttgtactttttccttcctccctgtctaggcattgggcatgtgcctcttcttagcctgtgattttgccttgggactgatgataaattatttccagattcaatcagcccgggtcctaccccagtccaatcagaagtatgttggtggggaatcaacctgatcctgggccctttcttcttctccattttcattcgtaatccccctcagcagatctttacaaggcagttttccttataggcttcatgtatctttaggtctttgccttccaagcactgtacagaatactttgtggttcctttttagtctgacattttgtggagcagtgaagcgtgctcagagacataatcagctgaagagaaaaaatccacccatgggttttatatcagctaaatactaataattgattttgtttgatgtgcccataaatttttaaaagctgcaatataatataatgagggaccacaggtaatttctccctgtcatttgctttttggctgggatgggggtgggggagtaattgcttaaagttttaccctttacacattaaactctctataataatcttggtttggggcttgctaactgttgagctgttttaactaaactggtaggcaatcggagttgatttaaatgaaaagataatttaacaaatctatactataaaaagagacatttgcttaattgacatgtattttttccttctgagtcacctaaacatttactcttgacaccaactgttcatgatactgaatagacagtccatataagagaaattagtggacctaaagaagccagattgtaggtgttaatttattaaacagaattgcaaagcccttggaaatgtcactgcttggcaataccatatggcatgccaaaatttacaatgacttttctttataagttatccaaaagggatttgaacaaagtaagagggttatgccaaaatgtctccaatggtatggtcctgtaatatattgcagcttgaagccaatgatcccttatgacttgtatacaaactaatgcatgttttattggaattttgcatttcccacgggtggtaagttyctttaaaatgtttttgatcacctttttgtgccattaaacttgtacagaaaatgtttttatggccattttcaaagggagaaagtttaaaatggaaacagcccaccctttctgccctatagctgtagttagaattgagtacctgtagcaaaacagctgtaatttggtggttgtagtgttagaggtgttagcttgctagtgactagctttggagagtaaatgcatggtattgtacatcacatttcttaactcgttttaacctctgaaaagaatatattcttctttgtagtcctccytccccacccccttgcccctctcccctactcccctgcctccccagttgtccttacagttgtaaaatatctgatttggaggccccaataactcttgcccaagtaaagtcagcaaacaacaaacaaaccaaaatgtggggaaaaggcatttctcaaccatctctcagcagttattgatcatttcttaaggaacagcattgtgatcaaagactcaactttacgtaaaaatcagtggtaaattggggttgtatttggccatttgattacatttcaggattgaatagttttcagaatcacatgtaatccaaagacagtaggtagtgatgtcccttatccctgcagctgttttaagatagagacctcagaagactctgcttgaccgatgaccaataattatttgaaaaaaaaaaaaaaaaatgagagaaataaaacagatatttaagaactttagccacctatttagaatagttatagccagaaaaaaaaacaagggcatgagttcaaatgcattactatcagtgtcctaggcaatacctaacctactctgaaattgtgattcaaaagaagtatttgcaagaggcattctccttttttggtttgctgacccccacttggactggtaggtttggtgagccccccataaacccagctggagcagacccttttcatctcctgtgcctgtaacaccccctcttcccccaccccctccgcaattcaatgagggctttcttgggtcagaggacttcaaggttgtctagagaagtttgccatgtgggtaaaggtgctgtgaactgtgagtgctgaagattcgcagcattcaataccaggcagccaaagagctgctcttgcaattattttggctctcaagctctgtttttcatcgcattttcatttctgtgtacatttgcaagatgtgtgtaatgtcattttccaaaaataaaatttgatttcaataaaaaaaaaaaaaa

SEQ ID NO: 154531 - DNA, 506 bp, Homo sapiens
  misc_feature (1)...(506): n = a,t,c or g
acgggngtttttactgatatgtctggccttcggcacgagccaaaagccctcaggcgagagctgcctgaggaggcagccgctgaggaggaaaggagaaagattgaagttccaagtgagattgaggtcccgagggaggccctggagcccagtgttccccttatggtgtctttagagatctccctagaggcagctgaagaggagaagtcccgcatcagcctcatcccaccagaagaacggtgggcctggcctgaggtggaggcgccagaagctcctgcattgcccgtggtgcctgaactccctgaggtgcccatggagatgcctttggtgctgcccccagagctcgagctgctctcactggaagcagtgcacagcccccgcaggatggctgcccgggtcttctacctgctcctggtgctctcagcgcaacagattcttcacgtgaaacaagaaaagccatatggtcgcctcctgatccagcccgggcccagattccactgagggtagag

SEQ ID NO: 154532 - DNA, 417 bp, Homo sapiens
ccatcagaggccctgcggagttgttcagaaccccaactctctctggctggctaccccctgaactactgggtctctggacccattgtgcccagccacccccaaaagccctcaggcgagagctgcctgaggaggcagccgctgaggaggaaaggagaaagattgaagttccaagtgagattgaggtaactgcaccacctgtttactgcatcgccccagtgccagggtctgcctgaccagctggctgccctctcctgctatgagagccaacagcacaggctcactggccttgtgccttctgaggcccaagtcccagatgcttggggtcttagttctacttctcccatccccaggtcccgagggaggccctggagcccagtgttccccttatggtgtctttaggtaagcacctagagaaga

SEQ ID NO: 154533 - DNA, 445 bp, Homo sapiens
gctgctctcactggaagcagtgcacaggtaccagggaggtggcaccttgatggggtggacccgggctgaagcctctgctaatggttcttgatccctatagggcagtggcactggagctgcaggctaacagggagcccgacttcagcagcctggtgtcacctctcagcccccgcaggatggctgcccgggtcttctacctgctcctgggtgagtgtatgcatgtgtgtgtgtgtatgtggggcagggacacagagaccagaggcccgtacagggactcccccgacctgccctctcctcgcctcttgaccagtgctctcagcgcaacagattcttcacgtgaaacaagaaaagccatatggtcgcctcctgatccagccggggcccagattccactgaggttagagtccatttacaaagctgccaggaaaccggccacttctagtaa

SEQ ID NO: 154534 - DNA, 508 bp, Homo sapiens
gcgtccgcccaagccagtgcaaggcccaggggcctgacatcgctcccagcgctcgaggaccgaggcctgctgtggaggacaccgtgctccctcgggacctgctctggattccggcccggacgtccccttggagctctgcatctccaacctggaacccaacccagaagtctcaagtttgacgcatcacgtggcgtgcggatccactgagggtccacagagaggggcgcccatctcctgcgtctcagttatcctggtaattgtgtatctgcccattgttcgttgcctcattaacttggctttctaggtgcacccaccttgccaccagagaagaccaaatcctgacttctctccaaggtgttgggaattctgtgccctaaagaaattccgactcaaaatcgaacggggatctggtggaatcgagggtgaaagaccagagggacaatgttctactatcccaacgtgcttcagcgccacaccggctgctttgccaccatctggtaagggcggg

SEQ ID NO: 154535 - DNA, 3135 bp, Homo sapiens
ttgggggaagggcggggtctaacctcaggtcaggcgccgtgcaaggtacatcttggcacccggaagaggcccagtacagttgcccccgaggtgacccgacctcccctaccaattgaggcgcccttgttgccaggcttgcggcgggggagcggcgggagagcgacggggatgcgctcattggtcaaggaaggggcgcctgttactagaggcgagaaccggagcccattggtcggaacacctcacaatggaccccagcggcgcgcaaaatccttatgattggtttgctggctgcctcgggagaccctgttgccaggatacttggcgttcccgacccgacccccgttccccattggctgtcagggcaaaagccgccatctaatgaggagcgaggtgcggtgccccgaagcgctcgcttcccgcggtgcgatctagtcctgcagtaggcggcccggggccacaccgcggccgcccaagccagtgcaaggcccaggggcctgaacatcgctcccagcgctcgaggaccgaggcctgctgtggaggaaacccgtgcctccctcgggacctgctctggattccggcccggacgtccccttggagctctgcatctcccaacctggaacccaacccagaagtctcaagtttgacgccatcaccgtggcgtgcgcatcaacccgagggtccacagagaggggcgcccatctcctgcgtctcacttatccttggtgttgggaattcttgtgccctaaagaattccgactcagatccgaaccggggatctggtggaatcgagggtgaaagaccagagggaacatgttctactatcccaacgtgcttcagcgccaccaacggctgctttgccacaatctggctggcggcgactcgcggcagccggttggtgaagcgcgaatacctgagggtgaatgtggtgaaaacctgcgaggaaatcctcaattacgtgctggtacgagtgcaacccccgcagcccggcctgccgcggccccgcttctccctctatctctcagcccaacttcagatcggtgtgatccgcgtctattctcaacaatgccagtacctcgtggaggacatccagcacattttgttatcgcctccaccgtgcccagctgcagatgcgaatagatatggagactgagctacccagcctgctgcttcctaaccacctggccatgatggagaccctagaagatgctccagatcccttttttgggatgatgtctgtggatcccagacttcctagtcctttcgatatccctcagattcgacacctcttagaggctgcaatcccagagagagttgaagagatccctcctgaagttcctacagagcccagggagccagagaggattccggtcactgtgctgccacctgaggccatcacgatcctgggaggcagagccattacggatgctggagattgagggtgaacgggagctcccagaggtcagccgccgagaactgggacctgcttgatcgcagaggaagaagaagctatcttgttagaaatcccgcggctcccacctccagctcctgcagaggtggaaggaataggagaggcactgggtcctgaggagctgaggctgacaggctgggaacctggggccctactcatggaggtgacccccccggaggagctgcgtctgccagccccacccagcccagagaggaggcccccagtccccccacttcttcgccgccgccgtcgtcgccggttactgttctgggacaaggagactcagatctccccggaagaatttccaaggaacaacttgcaaaccagagcccacttgctgggaatgtcctatggtggcagccgcccgagaggaccatcagaggccctgcggagttgtttcagaaccccaactctctctggctggctaccccctgaactactgggtctctggacccacttgtgcccagccacccccaaaagccctcaggcgagagctgcctgaggaggcagccgctgaggaggaaaggagaaagattgaagttccaagtgagattgaggtcccgagggaggccctggagcccagtgttccccttatggtgtctttagagatctccctagaggcagctgaagaggagaagtcccgcatcagcctcatcccaccagaagaacggtgggcctggcctgaggtggaggcgccagaagctcctgcattgcccgtggtgcctgaaaatccctgaggtgccccatggaaatgcctttggtgctgccccccagagctcgagctgctcctcaactggaaaacagtgcacagggcaagtggcactggagctgcagggctaacagggagcccgacttcagcagccctggtgtcacctcctcagcccccgcaggatggctggcccgggtcttctacctgctccctggtgctctcagcgcaacagattcttcaccgtgaaacaagaaaagcccatatggtcgcctcctgatcccagccgggggcccagattccactgaggttagagtccatttacaaagctgccaggaaaccggccacttctagtaaacccacgtcgtgcctcactgggtcctgcttacctcatttctgaatgtgcatttccagccttcttgctctcagagctattgttcaagcacgaaaacaagctgcttttattacagtatgatgtcatgactcatttgtaacagatccagcctcagggacagccctgtaaggcagcaagtggggctggctccaaatgggtatgagtctcagaatctttggtaaggcagaactgaactgggctgagaggtggtcttaaggcctgggcaggctctattctctctggactggctgcagcctgcagtctaggagaggcccagtacagcctgggagctcctgagccttgtcaacaggcagtgagcccagagctgcttgaaagctgtcggtgtgctgtttggccagggaacgtcaggagcagcaacagtgcggcctttggtgtcttggtgggatcttgttgtccagccagaatgaggctgcagataccgcagaaggctcgggagccacatctataacctggtcagggctgctctggtacaggaagctgaagaggcgcccaatggtgacccactcctccaagtcctccttcagtggcagggcatgcagtagggca

SEQ ID NO: 154536 - DNA, 423 bp, Homo sapiens
  misc_feature (1)...(423): n = a,t,c or g
ccgtagcggnnnnagtgggcgtttcgacgatttcgtgctctggggaggctcatagatgaagccccgaactgctcagaacagcgcgcagacctcttgcctctctactccccaaacctgccggtggttcctcagtaatcccctgagcacccgcagctcccgggttccctgctgcgcccgcctggagcccaaattccatccgagtggcaggtggcggaggccacagcgctggtgcacacgctggacggctggtccgtggtgcagacaatggtcgtgtccaccaaaacgccggacaggaagctcatctttggcaaagggaactttgagcacctgacagaaagaactggaagccgcctggggcgtggaggtgtttgaccgcttcacggtcgtcctgcacatcttacgctgtaacgcccgcacgaagga

SEQ ID NO: 154537 - DNA, 470 bp, Homo sapiens
cggccgcccaggagggttgttcgtggccggcatcaacctcacggagaacctgcagtacgttctggcgcacccgtccgagtccctggagaagatgacgctgcccaaccttccgcggctgagcgcgtgggtccgagagcagtgcccggggccgggttcacggtgcaccaacatcatcgcgggggacttcatcggcgcagacggcttcgtcagtgacgtcatcgcgctcaatcagaagctgctgtggtgctgacggggacccttctgaagttcgggacgcggcggctgcagtttcaccccccgaatttccaagtattgtgactttgtttgggccaaatgttggtgatcataggaccgatgataatacgttttcattttctttaaaatagagatggggtggctgggcgtggtgacttcgcctgtcttcccagagtgctgggatcacaggcgtgagccaccgcacctggcctcaa

SEQ ID NO: 154538 - DNA, 2918 bp, Homo sapiens
  misc_feature (1)...(2918): n = a,t,c or g
gcgggccgccgtacgcccggggctgcggctctcccgcgtgggccgcggccgctcggctccgcgggcagccgcgccgtcctgccccgcgcgcgcgctagccgctgtcggccgcaggagccccgggaatctggaggggccgtggggcggagggaggggcctgcgggcggaaggcggacgaaaacagaacggaagacgacaaggaggagccggaagatgcggacgagaacgccgaggaggagctgctgcggggagagcctctgctgccggcggggacccaagcgcgtgtgtctggttcaccctgacgtcaagtggggcccagggaaatcgcagatgactcgagccgagtggcaggtggcggaggccacagcgctggtgcacacgctggacggctggtccgtggtgcacacaatggtcgtgtccaccaaaacgccggacaggaagctcatctttggcaaagggaactttgagcacctgacagaaaagatccgagggtctccagacatcacgtgcgtcttcctgaacgtggagaggatggctgccccgaccaagaaagaactggaagccgcctggggcgtggagggttgtttgaccgcgttcacggtcggtcctgcaacatcttccagcttgtaacgcccgcacgaagggagggcccggcttcaggtggccctggctggagatgcccgcttgcacaggtcgaacttgaaaagggacgtcgcccacctgtaccgaggagttggcttcgcgcttacatcatggggtcaggagaatcctttcattgcagctgcagcagcgtctcctgagagagaaggaggccaagatcaggaaggccttggacaggcttcgcaagaagaggcacctgcttccgccggcagcggacgaggcgggagttccccgtgatctccgtggtggggtacaccaacttgcggaaagaccacgctgatcaaggcattgacggggcgatgccgccattccagccacgggaccagctgtttgccacgctggacgtcacgtgcccacgcgggcacgctgccctcacgcatgaccgtcctgtacgtggacaccatcggcttcctctcccagctgccgcacggcctcatcgagtcctttttccgccaccctggaagacgtggcccactcgggatctcatcttgcacgtaagggacgttcagccaccccgaggcggagctccagaaatgcagcgttctgtccacgctgcgtggcctgcggctgcccgccccgctcctggactccatggtggaggttcacaacaaggtggacctcgtgcccgggtacagccccacggaaccgaacgtcggtgnccgtgtctgccctgcggggccacggggctccaggagctgaaagttgagctcgatgcggcggttttgaaggcgacggggagacagatcctcactctccgtgtgaggctcgcaggggcgcagctcaactggctgtataaggaggccacagttcaggaggtggacgtgatccctgaggacggggcggccgacgtgagggtcatcatcagcaaacttcccctacggcaaaattccggaagctctttcccaggatgaacggacgcccacagaaggcctgcggggtgggggcatcgcctgccctgggggagctgaggcgttacccgctgtgttgggggcagcttggtgtcaggtgcagcagggtcctccttgtctggttctgcacccgtctcgcctcccagccatttgctgggatgtaccgtgcatgccggtgacacggccgcacctgccccaaagcgggccgcccgagcgtccactccaagcctgagcatccacacaattccagtgggccctcggtgcctgctgtgaactgctttccctcggaatgtttccgtaacaggacattaaacctttgattttacttccgtgagcagcatttccagttcctcctgcacctgccgtgagccgtggccctggtgggcaccgacggcccctccgcccggctgtctgtgttcacagatggtctcggtttcccatggtggtgtcggggaaatgacgaaaaatcaggtttcccggcagcacagagaacccttccacaaaagtagaagggaaagcaaatagttttactaaagaagcagcttcaaaccagaccgtgagccaccgcacccggcctccttgagttaacattttctaaagatgcttctggcgtgcttatccttgaaagctgccagaggtgtcttggctgcattggtggtaataaaattcatactcatatttgactttaatgatgttcatgttatttagacgatctgtatgagttcggtgattttgtgggtacgcccctgacagacatcgattcacagcccacggaagtcagggaaggctccctgcaaattcttcatctccagcgggccatgcctgagccctgatcctgcagagccgtggggctgaggtagccgccggttgtggtccagggagtgcgtctttctggatgcggggcaccttcatttcaccgtagcaaccgggtaccaaaagtagaagcggatttttggaaaatgagtcattaggtcccaaagagaacctattgcaacatgggactccataacgttcttgaggatcatcctgaggaaactgatgttctctcgttagacaaaaatggcacgatttgcttgggaaaggggagtaaaaatggtgctggcatccattggctggctgggaacttgaaccagcagcttctgattgagcgcgatgacgtcactgacgaagtcctctgcgccgatgaagtcccccgcgatgatgttggtgcaccgtgaactccggccccgggcactgctctcggaccctacgcctcagccgcggaaggttgggcagcgtcatcttctccagggactcggacgggtgcgccagaacgtactgcaggttctccgtgaggttgatgccggccac

SEQ ID NO: 154539 - DNA, 465 bp, Homo sapiens; identical to SEQ ID NO: 147217
  misc_feature (1)...(465): n = a,t,c or g

SEQ ID NO: 154540 - DNA, 1787 bp, Homo sapiens; identical to SEQ ID NO: 144180

SEQ ID NO: 154541 - DNA, 1553 bp, Homo sapiens; identical to SEQ ID NO: 144181

SEQ ID NO: 154542 - DNA, 1862 bp, Homo sapiens; identical to SEQ ID NO: 147222

SEQ ID NO: 154543 - DNA, 1131 bp, Homo sapiens; identical to SEQ ID NO: 124786

SEQ ID NO: 154544 - DNA, 813 bp, Homo sapiens; identical to SEQ ID NO: 147221

SEQ ID NO: 154545 - DNA, 1603 bp, Homo sapiens; identical to SEQ ID NO: 147223

SEQ ID NO: 154546 - DNA, 2373 bp, Homo sapiens
gcaccgcgcgagcttggctgcttctggggcctgtgtggccctgtgtgtcggaaagatggagcaagaagccgagcccgaggggcggccgcgacccctctgaccgagatcctgctgctttcgcagccaggagcaccgtccctccccggattagtgcgtacgagcgcccagtgccctggcccggagagtggaatgatccccgaggcccagggcgtcgtgcttccgcagtagtcagtccccgtgaaggaaactggggagtcttgagggacccccgactccaagcgcgaaaaccccggatggtgaggagcaggcaaatgtgcaataccaacatgtctgtacctactgatggtgctgtaaccacctcacaaaattccagcttcggaacaagagaccctggttagaccaaagccattgcttttgaagttattaaagtctgttggtgcacaaaaagacacttatactatgaaagaggttcttttttatcttggccagtatattatgactaaacgattatatgatgagaagcaacaacatattgtatattgttcaaatgatcttctaggagatttgtttggcgtgccaagcttctctgtgaaagagcacaggaaaatatataccatgatctacaggaacttggtagtagtcaatcagcaggaatcatcggactcaggtacatctgtgagtgagaacaggtgtcaccttgaaggtgggagtgatcaaaaggaccttgtacaagagcttcaggaagagaaaccttcatcttcacatttggtttctagaccatctacctcatctagaaggagagcaattagtgagacagaagaaaattcagatgaattatctggtgaacgacaaagaaaacgccacaaatctgatagtatttccctttcctttgatgaaagcctggctctgtgtgtaataagggagatatgttgtgaaagaagcagtagcagtgaatctacagggacgccatcgaatccggatcttgatgctggtgtaagtgaacattcaggtgattggttggatcaggattcagtttcagatcagtttagtgtagaatttgaagttgaatctctcgactcagaagattatagccttagtgaagaaggacaagaactctcagatgaagatgatgaggtatatcaagttactgtgtatcaggcaggggagagtgatacagattcatttgaagaagatcctgaaatttccttagctgactattggaaatgcacttcatgcaatgaaatgaatcccccccttccatcacattgcaacagatgttgggcccttcgtgagaattggcttcctgaagataaagggaaagataaaggggaaatctctgagaaagccaaactggaaaactcaacacaagctgaagagggctttgatgttcctgattgtaaaaaaactatagtgaatgattccagagagtcatgtgttgaggaaaatgatgataaaattacacaagcttcacaatcacaagaaagtgaagactattctcagccatcaacttctagtagcattatttatagcagccaagaagatgtgaaagagtttgaaagggaagaaacccaagacaaagaagagagtgtggaatctagtttgccccttaatgccattgaaccttgtgtgatttgtcaaggtcgacctaaaaatggttgcattgtccatggcaaaacaggacatcttatggcctgctttacatgtgcaaagaagctaaagaaaaggaataagccctgcccagtatgtagacaaccaattcaaatgattgtgctaacttatttcccctagttgacctgtctataagagaattatatatttctaactatataaccctaggaatttagacaacctgaaatttattcacatatatcaaagtgagaaaatgcctcaattcacatagatttcttctctttagtataattgacctactttggtagtggaatagtgaatacttactataatttgacttgaatatgtagctcatcctttacaccaactcctaattttaaataatttctactctgtcttaaatgagaagtacttggttttttttttcttaaatatgtatatgacatttaaatgtaacttattattttttttgagaccgagtcttgctctgttacccaggctggagtgcagtgggtgatcttggctcactgcaagctctgccctccccgggttcgcaccattctcctgcctcagcctcccaattagcttggcctacagtcatctgccaccacacctggctaattttttgtacttttagtagagacagggtttcaccgtgttagccaggatggtctcgatctcctgacctcgtgatccgcccacctcggcctcccaaagtgctgggattacaggcatgagccaccg

SEQ ID NO: 154547 - DNA, 2516 bp, Homo sapiens
  misc_feature (1)...(2516): n = a,t,c or g
gcaccgcgcgagcttggctgcttctggggcctgtgtggccctgtgtgtcggaaagatggagcaagaagccgagcccgaggggcggccgcgacccctctgaccgagatcctgctgctttcgcagccaggagcaccgtccctccccggattagtgcgtacgagcgcccagtgccctggcccggagagtggaatgatccccgaggcccagggcgtcgtgcttccgcagtagtcagtccccgtgaaggaaactggggagtcttgagggacccccgactccaagcgcgaaaaccccggatggtgaggagcaggcaaatgtgcaataccaacatgtctgtacctactgatggtgctgtaaccacctcacagattccagcttcggaacaagagaccctggttagaccaaagccattgcttttgaagttattaaagtctgttggtgcacaaaaagacacttatactatgaaagaggttcttttttatcttggccagtatattatgactaaacgattatatgatgagaagcaacaacatattgtaaatgattgtgctaacttatttcccctagttgacctgtctataagagaattatatatttctaactatataaccctaggaatttagacaacctgaaatttattcacatatatcaaagtgagaaaatgcctcaattcacatagatttcttctctttagtataattgacctactttggtagtggaatagtgaatacttactataatttgacttgaatatgtagctcatcctttacaccaactcctaattttaaataatttctactctgtcttaaatgagaagtacttggttttttttttcttaaatatgtatatgacatttaaatgtaacttattattttttttgagaccgagtcttgctctgttacccaggctggagtgcagtgggtgatcttggctcactgcaagctctgccctccccgggttcgcaccattctcctgcctcagcttcctgattagttgggaccacaggcgcccgccaccatacccggctaatttttttttttttttttttttttttttggatttttagtagagacagggtttcaccgtgttagccaggatagtctcgatctcctgacctcgtgatcctcccgcctcggcctcccaaagtgctgggattacaggcatgagccaccgcgcccagcagaagaaggcatttagaatcagaactcagtgttttgaaacagcactcaaatcttagaaaattaacttcactgattcctggaaaatgcttacgttttaaaacaccaactttattcaaatactaaccccatctgtacattaagaaacaagcaaaatagaagtaaatgttttattcttccaactaaattccagtactacaagggcagtaaaacaatgatacactggaaaaaaaaaaaatgcagcaataaacatttggtaaaaaggacgggtggaataaattaaactcccaaaaaaaaaaaaaatcatacaaacccattctggaaaccccaagaagtcctggaatacagaaatgccctcctccttcactatttccacaggaaagccactgcaggcctatttgcctttaatattgtcctgggggattacattcctaaaattaggtaactgggttacagctcggttgtagtgcacaattaaaatcacactaacttcatctgaagtgtcattctacagttttatttacacaaccagtgaagggcatgttctagaataccagctttaatccttttcaaacattaatataagaagccaaattgtaatgggtaccagcaaaatgnggcccactgggtattaatacagggtagcaaaggtccacatccagggtggtactgacatcaggggaaatttccaaaaccagttgccggctgcctaggagtgggttgcccactgacggaaagctggaaataaccctgtattcaccagaagggggtattggcattgctgcatgtcataattgggacctctggcaaccaactcaaccagggaacaagccagcccacaaatgccaggatacgtgattccatgaaaccatagcctagccagcctgttctcccatatcggtcgcattatttgaatcatgcgtaaacttccacaaaacgccatccatattgttcctgccaagttttgtgttccaatatttccttccatattccttcctcgaactttcctcttcacgttcctttcaacaaacgttccacagatcatccccaacctgcccgtagaggtaaaataggggctgttctttttttaatggtgaggatgctggcagatgaaggtccctgggtgaagctggtccactgaggagaaatgcgatgtggctgtgcatcagaagtacaacacggatctgtctgttggaaactcgtttctaaatgtcttctcttctgcattcgtttatactcttgttttatgttgtacagaatttgttctgtggtgaggcgggaggagacgtcgccgaagggggatggctccattcggagatacttctgcggcgaggcggccgc

SEQ ID NO: 154548 - DNA, 1505 bp, Homo sapiens; identical to SEQ ID NO: 147295

SEQ ID NO: 154549 - DNA, 7648 bp, Homo sapiens; identical to SEQ ID NO: 147298

SEQ ID NO: 154550 - DNA, 950 bp, Homo sapiens
gaattcggccacgagcccaaacccactccaccttactaccagacaaccttagccaaaccatttgacccaaataaaagtataggcgatagaaattgaaacctggcgcaattagatatagtaccgcaagggaaagatgaaaaattataacccaggcataatatagcaagggactaaccccctataccgttctgcataatgaattacactagaaataacttttgcaaggcagagccaaagctaaaggacccccgaaaaccagactgagctaccataaggaacagctaaaagagcacaccctgtctaatgtagcaaaatagtgggaagatttatagggtagaggcgacaaaccctacccgagccctggtgatagctggtttgtccaagattgaatcttagttcaactttaaatttgcccacaggaaccctcttaaatcccctttgtaaatttaaactgttagtcccaaagagggaccagctctttgggacactaggaaaaaacccttgtagagaggagtaaaaaattttaacacccattaggtagggccttaaaaggcaggccacccaatttaagggaaagcgttcaagcctcaacaccccactaccctaaaaaattcccaaaccattttacctggaccccctcacaccccaattggggccaatcctatcaccctattaggagggcctaattgtttagtataagtaaccatgaaaacattctccctccggcataaggcctgcggtcaggttaaaaacactggactggcaatttaacagcccaatatcttcaatccaaccaacaagtcattattaccctcactgtcaacccaacacaggcatgctcataaggaaaggttaaaaaaagtaaaaggaactcggcaaatcttaccccgcctgtttaccaaaaacatcacctctagcatcaccagtattagagcaccgccttcccagtg

SEQ ID NO: 154551 - DNA, 2014 bp, Homo sapiens
gcagagagggcactgggaggaggcagtgggagggcggagggcgggggccttcggggtgggcgcccagggtagggcaggtggccgcggcgtggaggcagggagaatgcgactctccaaaaccctcgtcgacatggacatggccgactacagtgctgcactggacccagcctacaccaccctggaatttgagaatgtgcaggtgttgacgatgggcaatggcccttccagtcctcactgcctcacagtggctctgcttggcgcttggcacagtgacatgatgattttgttgccgctgcgtctcgccagattgaggcatcccctccgacatcactggagcatatctggaggggtggacagttctccacagggagacacgtccccatcagaaggcaccaacctcaacgcgcccaacagcctgggtgtcagcgccctgtgtgccatctgcggggaccgggccacgggcaaacactacggtgcctcgagctgtgacggctgcaagggcttcttccggaggagcgtgcggaagaaccacatgtactcctgcagatttagccggcagtgcgtggtggacaaagacaagaggaaccagtgccgctactgcaggctcaagaaatgcttccgggctggcatgaagaaggaagccgtccagaatgagcgggaccggatcagcactcgaaggtcaagctatgaggacagcagcctgccctccatcaatgcgctcctgcaggcggaggtcctgtcccgacagatcacctcccccgtctccgggatcaacggcgacattcgggcgaagaagattgccagcatcgcagatgtgtgtgagtccatgaaggagcagctgctggttctcgttgagtgggccaagtacatcccagctttctgcgagctccccctggacgaccaggtggccctgctcagagcccatgctggcgagcacctgctgctcggagccaccaagagatccatggtgttcaaggacgtgctgctcctaggcaatgactacattgtccctcggcactgcccggagctggcggagatgagccgggtgtccatacgcatccttgacgagctggtgctgcccttccaggagctgcagatcgatgacaatgagtatgcctacctcaaagccatcatcttctttgacccagatgccaaggggctgagcgatccagggaagatcaagcggctgcgttcccaggtgcaggtgagcttggaggactacatcaacgaccgccagtatgactcgcgtggccgctttggagagctgctgctgctgctgcccaccttgcagagcatcacctggcagatgatcgagcagatccagttcatcaagctcttcggcatggccaagattgacaacctgttgcaggagatgctgctgggagggtcccccagcgatgcaccccatgcccaccaccccctgcaccctcacctgatgcaggaacatatgggaaccaacgtcatcgttgccaacacaatgcccactcacctcagcaacggacagatgtgtgagtggccccgacccaggggacaggcagccacccctgagaccccacagccctcaccgccaggtggctcagggtctgagccctataagctcctgccgggagccgtcgccacaatcgtcaagcccctctctgccatcccccagccgaccatcaccaagcaggaagttatctagcaagccgctggggcttgggggctccactggctccccccagccccctaagagagcacctggtgatcacgtggtcacggcaaaggaagacgtgatgccaggaccagtcccagagcaggaatgggaaggatgaagggcccgagaacatggcctaaggcacatcccactgcaccctgacgccctgctctgataacaagactttgacttggggagaccctctactgccttggacaactttctcatgttgaagccactgccttcaccttcaccttcatccatgtccaacccccgacttcatcccaaaggacagccgcctggagatgacttgagccttac

SEQ ID NO: 154552 - DNA, 2407 bp, Homo sapiens
ggggcggagggcgggggcttcggggtgggcgcccagggtagggcaggtggccgccgcgtggaggcagggagaatgcactctccaaaaccctccgtcgacatggacatggccgactacagtgctgcactggacccagcctacaccaccctggaatttgagaatgtgcaggtgttgacgatgggcaatgacacgtccccatcagaaggcaccaacctcaacgcgcccaacagcctgggtgtcagcgccctgtgtgccatctgcggggaccgggccacgggcaaacactacggtgcctcgagctgtgacggctgcaagggcttcttccggaggagcgtgcggaagaaccacatgtactcctgcagatttagccggcagtgcgtggtggacaaggacaagaggaaccagtgccgctactgcaggctcaagaaatgcttccgggctggcatgaagaaggaagccgtccagaatgagcgggaccggatcagcactcgaaggtcaagctatgaggacagcagcctgccctccatcaatgcgctcctgcaggcggaggtcctgtcccgacagatcacctcccccgtctccgggatcaacggcgacattcgggcgaagaagattgccagcatcgcagatgtgtgtgagtccatgaaggagcagctgctggttctcgttgagtgggccaagtacatcccagctttctgcgagctccccctggacgaccaggtggccctgctcagagcccatgctggcgagcacctgctgctcggagccaccaagagatccatggtgttcaaggacgtgctgctcctaggcaatgactacattgtccctcggcactgcccggagctggcggagatgagccgggtgtccatacgcatccttgacgagctggtgctgcccttccaggagctgcagatcgatgacaatgagtatgcctacctcaaagccatcatcttctttgacccagatgccaaggggctgagcgatccagggaagatcaagcggctgcgttcccaggtgcaggtgagcttggaggactacatcaacgaccgccagtatgactcgcgtggccgctttggagagctgctgctgctgctgcccaccttgcagagcatcacctggcagatgatcgagcagatccagttcatcaagctcttcggcatggccaagattgacaacctgttgcaggagatgctgctgggagggtcccccagcgatgcaccccatgcccaccaccccctgcaccctcacctgatgcaggaacatatgggaaccaacgtcatcgttgccaacacaatgcccactcacctcagcaacggacagatgtccacccctgagaccccacagccctcaccgccaggtggctcagggtctgagtcctataagctcctgccgggagccgtcgccacaatcgtcaagcccctctctgccatcccccagccgaccatcaccaagcaggaagttatctagcaagccgctggggcttgggggctccactggctccccccagtccccctaagagagcacctggtgataccgtggtcacggcaaaggaagacgtgatgccaggaccagtcccagagcaggaatgggaaggatgaagggcccgagaacatggcctaagggcacatcccactgccacccttgacgcccctgctctggataacaagactttgacttggggagacctctactgccttggacaacttttctcatgttgaagccactgccttcaccttcaccttcatccatgtccaacccccgacttcatcccaaaggacagccgcctggagatgacttgaggccttacttaaacccagctccctgtgccctagcctggtgcttctcctctcctagcccctgtcatggtgtcccagacagagccctgtgaggctgggtccaattgtggcacttggggcaccttgctcctccttctgctgctgcccccacctctgctgtcaccttgctcagccatcccgtcttctccaacaccacctctccagaggccaaggaggccttggaaacgattcccccagtcattctgggaatactgttgtaagacctgactgggaccaggcaccaggcagggtctaaaaggctgtggtgagggaagacgcctttctcctccaacccaacctcatcctccttcttcagggacttgggtgggtacttgggtgaggatccctgaaggccttcaacccgagaaaacaaacccaggttggcgactgcaacaggaacttggagtggagaggaaaagcatcagaaagaggcagaccatccaccaggcctttgagaaagggtagaattctggctggtagagcaggtgagatgggacattccaaagaacagcctgagccaaggcctcgtggtagtaagaatctatcaagattgaggaagaatggtgtggaga

SEQ ID NO: 154553 - DNA, 1841 bp, Homo sapiens
acacgtccccatcagaaggcaccaacctcaacgcgcccaacagcctgggtgtcagcgccctgtgtgccatctgcggggaccgggccacgggcaaacactacggtgcctcgagctgtgacggctgcaagggcttcttccggaggagcgtgcggaagaaccacatgtactcctgcagatttagccggcagtgcgtggtggacaaagacaagaggaaccagtgccgctactgcaggctcaagaaatgcttccgggctggcatgaagaaggaagccgtccagaatgagcgggaccggatcagcactcgaaggtcaagctatgaggacagcagcctgccctccatcaatgcgctcctgcaggcggaggtcctgtcccgacagatcacctcccccgtctccgggatcaacggcgacattcgggcgaagaagattgccagcatcgcagatgtgtgtgagtccatgaaggagcagctgctggttctcgttgagtgggccaagtacatcccagctttctgcgagctccccctggacgaccaggtttctagttttatgggtagtagttttatgatgcccatttcacagttcaggcaggtggccctgctcagagcccatgctggcgagcacctgctgctcggagccaccaagagatccatggtgttcaaggacgtgctgctcctaggcaatgactacattgtccctcggcactgcccggagctggcggagatgagccgggtgtccatacgcatccttgacgagctggtgctgcccttccaggagctgcagatcgatgacaatgagtatgcctacctcaaagccatcatcttctttgacccagatgccaaggggctgagcgatccagggaagatcaagcggctgcgttcccaggtgcaggtgagcttggaggactacatcaacgaccgccagtatgactcgcgtggccgctttggagagctgctgctgctgctgcccaccttgcagagcatcacctggcagatgatcgagcagatccagttcatcaagctcttcggcatggccaagattgacaacctgttgcaggagatgctgctgggagggtcccccagcgatgcaccccatgcccaccaccccctgcaccctcacctgatgcaggaacatatgggaaccaacgtcatcgttgccaacacaatgcccactcacctcagcaacggacagatgtgtgagtggccccgacccaggggacaggcaggaaagactatccctgtcacccatcccattgccgctggggacagccaggcctgggccttggtttgggagaagcagtccaagtctgcatatcaaataaatgatggaggagatgggtgcccctgtcatggtgtccagacagagccctgtgaggctgggtccaattgtggcacttggggcaccttgctcctccttctgctgctgcccccacctctgctgcctccctctgctgtcaccttgctcagccatcccgtcttctccaacaccacctctccagaggccaaggaggccttggaaacgattcccccagtcattctgggaacatgttggacttgggtgggtacttgggtgaggatccctgaaggccttcaacccgagaaaacaaacccaggttggcgactgcaacaggaacttggagtggagaggaaaagcatcagaaagaggcagaccatccaccaggcctttgagaaaggacgaagaggtgcaactgtaagctgggagaccaatgaagacacaagtgcactggatcagataatggactatgtggaaaaacagtggaagcagagacgcccacaggtggcctgggcagtggtccaggtgaaagatgatggcagcatggactag

SEQ ID NO: 154554 - DNA, 8550 bp, Homo sapiens
  misc_feature (1)...(8550): n = a,t,c or g
atgcgactctccaaaaccctcgtcgacatggacatggccgactacagtgctgcactggacccagcctacaccaccctggaatttgagaatgtgcaggtgttgacgatgggcaatggtaggtgggggcagatgtgcccaggtgtgccagtgggggcaggtgtgcctgggtccaggagcagatctttggcactcaactttggggtgggaggagaatgatacaaaatggtaggttggtcctacaggccagcacaggtgttgccaagtgaagcccatgtgcccaggcacagtgatcacaggcattctgggtgaagggaggcctgcaagggccaatttccagcaaaagtcgatcccggctattcctcccaggcccttccagtcctcactgcctcacagtggctctgcttggcgcttggcacagtgacatgatggtgagctcccccttggtgcccagctccagcgattcagcccagcacggccccttcgtgaaccccttgggcctaggttcagagagacggcaagggatgttgtatccctggagatggtggttggagacataaccgcatttctcggtgtctttgggactttcctagggaaatgaaattggcacttagggaaaatggagctctcagggaagttttgctaactacgaagccaactcagcactgtgtgtgttgtgtgtgcgttcgtgtgtgatagtgagtttccatgtaggttgtatgggtggggtgatgccttcaggaacccatttgcatatgtgtgttcatttgtctctgtgtgtgagttctgggtctattttcctttgtattcattgagtgggtctgtgtttgtgtcttaggagttgcccgtgttgatcttgcttatgtatgtaagtgtgtatgtgtgtgtacttgtgtctgtggatgtttgtacatgtgtgctgtgtgtgcgggtcatagagcacatgcgtttgtgcatgcggacctgttggagtgccctgttcttcctgcatctttatcctgtatgggcgttttgtcgtgtgcccatatttgtacctgctgtgtatatatgcagttccctgtgctgcgggcgggggtcagcggtctctggtgtgcacgactgcacagacccaaatgcaggactctgttgttgccactcaccaagtgagattcatatcagcaacatgtccgtttgtctctgagcagattttgttgccgctgcgtctcgccagattgaggcatcccctccgacatcactggagcatatctggaggggtggacagttctccacagggaggtaggggaaaagaggaggcccggaaacccctcctggagggaagagccccatcggtcccaggccagcctcagaggagagggggcaggcagctggctgaggtcagcctgccaccctgcttccttctgtgtcttggagccactcagccagtatgaggctgcagctccagctgaggtctggaatcttgtggtcagctcagctagggtgaggaggcagctgctgggcactgcttgttgtcagctcagcaggtgctcacctgcccctgccgtccagtcacgtgtgaccttgggcatgtcacctcccctatcctggcttctgtatcttctacaaaacaggcttcattcccccaggcctgctggctggacggcttttaggcctgtctgaggaccacgccaggagcgcaaggcaaaaacacaccagagatnccccttgcgagttaggaggccggctcccaccccagaaggtggccaggttttcatgccttcctagagaaagctggggctggtggcctccaccacagggagacgcagaccctcagaaacaagtctgtgaagtcacaaccagccccagtttacagatgtgaaactgaagctccaaaaagtcaggaggtcactgagtggggaggtgatggagtgggaacagcccccagatctggctgaggccgaagccctggagagatccccgcaaggctcccttagatgcctgacattctgctcttcctgaagcctcactcccttctctcctggcgcagacacgtccccatcagaaggcaccaacctcaacgcgcccaacagcctgggtgtcagcgccctgtgtgccatctgcggggaccgggccacgggcaaacactacggtgcctcgagctgtgacggctgcaagggcttcttccggaggagcgtgcggaagaaccacatgtactcctgcaggtgaggagcctcaatttcttcagctgggaaatgggcacacttgggctcatggccccaaggtctgtcttctccctgagtgggtaggtcccagagacagctgcccttcagggccttcaaggctcttctggttttgtaaaagactttgtgaatccaagaagagcatctattctaggaaccacatttactgatcatcaagctactggctgccgtttattgagctcttatcatatgccaggcacaatactaagtctttgtgtgtatttacngtactccagaggtcaaggttcccaactcagctctaacaccaaccagcagagcgacccaggaccacatgttgcctctctgagcctcagttttcccatgtttagcaggacaggactgggctcttagagagttcatagcacctttccagctcctggtgggttcaagagagaactcccgggatgaagagatgagagcactgaggttggggggtcaactggatagccagggccctagttctgtcctaagaggaggaagttgtgtcttctccatccaaccatccaaagccctccccagatttagccggcagtgcgtggtggacaaagacaagaggaaccagtgccgctactgcaggctcaagaaatgcttccgggctggcatgaagaaggaaggtgagcctcggccctccccgccccaccaccactgccccacctgcacccacagctccccgacagtcatttacaactgtagccacactttatgactcagtggcaggccccagggtgactggctaatggctgagaagagggagggcctggaaatctgaccatagggagcggctgggcttggtcttgagaaagattcntcccactcctcatcagtcacagacacccccaccccctactccatccctgttctccctcctcacctctctgtgcctcctcacccgtccagaatgagcgggaccggatcagcactcgaaggtcaagctatgaggacagcagcctgccctccatcaatgcgctcctgcaggcggaggtcctgtcccgacaggtaccggggtgatcctgccacccacccagggatcccccacactacagaggagctcacctcctccacctccattctccccagccaggccctggagcagctgacgggaggggcctcagatattacagaagggacactgagtgcggtttcacatggcccagtttgcagcaagggcaggaatcgaacctggcgccctggggcactttctaattcatcctactgcctgcatcccacaggccaagcagagtcttcaccttcactgagggcctgcgatcagctcagctccgagagaacagagcagtggctcagtggagagaggtggcaaagtggggcccagcccttcccttgctgagtgaccttgggcaagtcacagcacctctctgagccatggttgcctcattgtcagaaaaggatgatgattttttgccctgcttctcctctaaggctgacagactccttggggctctaaagctgnttctccctcatccctgcctcctccctccctccgtttttaccctgagcttccttcagagctggagggcacccactatccagccccctccccacatctgattccagggagggggctctgtgcaggggacagagaatgcgggagggcccggacatctccagcattttcttccctgtatctctcgaagatcacctcccccgtctccgggatcaacggcgacattcgggcgaagaagattgccagcatcgcagatgtgtgtgagtccatgaaggagcagctgctggttctcgttgagtgggccaagtacatcccagctttctgcgagctccccctggacgaccaggtgaggatgggcgtggatggtgggcagtagtgggcagtgggcggggcagccagggggctgctggcccacctgggatatagccgtggactggcttgattttattttatttaacaaaatatgtagtgcacacacgtgtctgaaactttaaatcaccttacaaatattaactcagttagctcctccaacaactctatgaggtaggtactaaggtactattattactgccatctcataggtgaggagattggggcacagagaggttaagtaacctgctcaaggtcacatagctactatccagcatagctgggnatttttacaaagcacccttcataattctccatagctggtccatgggtgggaatttgggacccacagttttggaactttttgggatcatagacctttttgagaatctcaaaaaagaaaaaaaaagcacacagaatgttgcttacagtttcatcaggcacacagaagaggcccagcacgaagcagtttcttgcccaaggacacagcagttcaaggacagagtcagcgcgaggtctctcagctctgagcacatgttctttccccttccaggtttctagttttatgggtagtagttttatgatgcccatttcacagttcaggcaggtagaggcagaggggagcattaagctgacttgcccagcgtcactgagttggctacgggcagccttcccaagggtacagatggcaaacactgttccttctctctttcaggtggccctgctcagagcccatgctggcgagcacctgctgctcggagccaccaagagatccatggtgttcaaggacgtgctgctcctaggtgaggcggctgcctgccctggccagggctccagggagggtatgcctagcatggcactcacccaggcaaggagattcacatggtggcatgcaagggtgagggagactagtcaggagtggccctgtcctcaggcttgcattggagggctccaggactcagttttcaactgggtaccccactcagatgcaaggaaatgtggatgcaagtcaccaaattcccagcattgaagtcagagcacgatcagggttatccctggaattacctgtgcatccttttttcttttgacagagtcttgctctgtcactcaggctggagtgcaatgatgtgangcaaacactacctattttaatataacaatgctatgagggagctcgattatttatcctcatcttatagataagaaaactgaggcacagagaggttaagtaacttatccaactataaccagctatcaggggcagagccatttaagcagggcagtgcagttccagaatctggtcctttaaccttgatgctttggtgcctatcaggtgacctttgaatgtcatcgatcttgtgagtcatgttggtaaatggagcttgggtcatgtgaaagaggtcctagaaagccaagttccaagctcagccggatgactcaaggcagcttatcttctgaatctgggcctcagcttccttacctgtgaaatgggagtcaccatccctgcaggtcctcctcccacaggcaccagctatcttgccaacttaaaagccaaaactagaggagaggggtcaacccaaggtgacttcccatcctccctccctcccaacccttccaggcaatgactacattgtccctcggcactgcccggagctggcggagatgagccgggtgtccatacgcatccttgacgagctggtgctgcccttccaggagctgcagatcgatgacaatgagtatgcctacctcaaagccatcatcttctttgacccaggtacagtgcacacctcctaagccatccctgactctctctccagaacgctctgccagacttctcctattgggttctgtacactgagttcacagcctcatctcatgttaacgacagccaggagaggccgttttcatttaacagatgaggcaagtcaagatttgaagagacaatatggccgggcgcagtggctcacacctgtaatcccatcactttgggaggctgaggcgggcggatcacctgaggtcaggggtcaagatgagcctggctaacatggagaaaccccatctctacttaaaangtggctctgccaacaactggctgtgcgacccaggacaagtcctatctttgcactgtgtctgggtttccccgtgtgtaagatgaggcggttgctaggtgcttattggatgcattcctcaagtcccgccctccatctcctattcccctctcttctggtttagtgctttaggaaatgtggcagaaatctttttctgcctgtgtctaggaaatcataattcatgctggcgtaccctggttgttgaggtccctgaatccttgtgcccacactgctgaagactccttgtgtgacacaagtcaggggacatctgggtcttgactccccagatgctccagctggaccctgctgccctcccttgcccaccctcttccattgtagatgccaaggggctgagcgatccagggaagatcaagcggctgcgttcccaggtgcaggtgagcttggaggactacatcaacgaccgccagtatgactcgcgtggccgctttggagagctgctgctgctgctgcccaccttgcagagcatcacctggcagatgatcgagcagatccagttcatcaagctcttcggcatggccaagattgacaacctgttgcaggagatgctgctgggaggtccgtgccaagcccaggaggggcggggttggagtggggactccccaggagacaggcctcacacagtgagctcacccctcagctccttggcttccccactgtgccgctttgggcaagttgcttaacctgtctgtgcctcagtttcctcaccagaaaaatgggaacaaggcaatggtctatttgttcaggcaccgagaacctagcacgtgccagtcactgttctaagtgctggcaattcagcaaagaacaagatctttgccctcggggaggctgtgtgtgtgtgagtatgtatggatgcgtggatatctgtgtatatgcccgtatgtgcgtgcatgtgtatataaagcctcacattttatgattttgaaataaacaggtaatatgangggacacatagatgctataagtaggtcagttggctgcagcagagatgtgggggatgaggctgaaaggtgaggcgggaccaaatggttgaaggacttgcactccaaggagctttgagagccattgattacatccattatgttactatgtgaccaatacattactcattagaacatttacgtgatctcagagcttccttatatgcaccttgttcctttcaactcacttttgttctcttggttttttggggtcctcttaacaccctcatgaagtctatagatgggaatggtacaccctagtttactaacccaggaataggtacccaacaggcactgccaatattggatgggctggttgattggccacgcctgaggaagatggcgtcccaaggcctgaggtctgcatcccagactctccatcctgatcgaccttctctacctgcagggtcccccagcgatgcaccccatgcccaccaccccctgcaccctcacctgatgcaggaacatatgggaaccaacgtcatcgttgccaacacaatgcccactcacctcagcaacggacagatgtgtgagtggccccgacccaggggacaggcaggtgggcaaactctgggattttaccttgcaaagggtgaggatggggcttaagacaggaggcaggagaaagtggagtctagaaggtagaaccaggatgcaacagttttctgggttccagggtagggaataaagggcaagattgtccatttgttgaggctgtttattcagtaaggtgactgacagcctttactgaatgaagccattgttgggatgaggcaatccactggatgaggtaacccattgggtgaagatgtcttgggtgagaattccattagttgacattgtccattaagtaaaagtggtcattgaagtaaggctgcacagttgggtaaggctatccattagacattagatgagactacccattgggtcaggatgtctgctgggctantttgggagaagcagtccaagtctgcatatcaaataaatgatggaggagatgggtggtaggaccttccagacctcataaaacttaggctttatgatctgggactcacagaaggttgagcaataaaagaccttagggattatctggcttaattaattctctcattttatagaggaagaaattaagtcaaggtggggcagggtgggaggggagaactttcccggggctcttcatttactcccacaaaggctggaattttgagcagcccctgtctgtctgtttgtccttccccacccctgagaccccacagccctcaccgccaggtggctcagggtctgagccctataagctcctgccgggagccgtcgccacaatcgtcaagcccctctctgccatcccccagccgaccatcaccaagcaggaagttatctag

SEQ ID NO: 154555 - DNA, 1636 bp, Homo sapiens
ggcttcggggtgggcgcccagggtagggcaggtggccgccgcgtggaggcagggagaatgcgactctccaaaaccctccgtcgacatggacatggccgactacagtgctgcactggacccagcctacaccaccctggaatttgagaatgtgcaggtgttgacgatgggcaatgacacgtccccatcagaaggcaccaacctcaacgcgcccaacagcctgggtgtcagcgccctgtgtgccatctgcggggaccgggccacgggcaaacactacggtgcctcgagctgtgacggctgcaagggcttcttccggaggagcgtgcggaagaaccacatgtactcctgcagatttagccggcagtgcgtggtggacaaggacaagaggaaccagtgccgctactgcaggctcaagaaatgcttccgggctggcatgaagaaggaagccgtccagaatgagcgggaccggatcagcactcgaaggtcaagctatgaggacagcagcctgccctccatcaatgcgctcctgcaggcggaggtcctgtcccgacagatcacctcccccgtctccgggatcaacggcgacattcgggcgaagaagattgccagcatcgcagatgtgtgtgagtccatgaaggagcagctgctggttctcgttgagtgggccaagtacatcccagctttctgcgagctccccctggacgaccaggtggccctgctcagagcccatgctggcgagcacctgctgctcggagccaccaagagatccatggtgttcaaggacgtgctgctcctaggcaatgactacattgtccctcggcactgcccggagctggcggagatgagccgggtgtccatacgcatccttgacgagctggtgctgcccttccaggagctgcagatcgatgacaatgagtatgcctacctcaaagccatcatcttctttgacccagatgccaaggggctgagcgatccagggaagatcaagcggctgcgttcccaggtgcaggtgagcttggaggactacatcaacgaccgccagtatgactcgcgtggccgctttggagagctgctgctgctgctgcccaccttgcagagcatcacctggcagatgatcgagcagatccagttcatcaagctcttcggcatggccaagattgacaacctgttgcaggagatgctgctgggagggtcccccagcgatgcaccccatgcccaccaccccctgcaccctcacctgatgcaggaacatatgggaaccaacgtcatcgttgccaacacaatgcccactcacctcagcaacggacagatgtgtgagtggccccgacccaggggacaggcagccacccctgagaccccacagccctcaccgccaggtggctcagggtctgagtcctataagctcctgccgggagccgtcgccacaatcgtcaagcccctctctgccatcccccagccgaccatcaccaagcaggaagttatctagcaagccgctggggcttgggggctccactggctccccccagtccccctaagagagcacctggtgataccgtggtcacggcaaaggaagacgtgatgccaggaccagtcccagagcaggaatgggaaggatgaagggcccgagaacatggcctaa

SEQ ID NO: 154556 - DNA, 799 bp, Homo sapiens
tgaccagctgatgcggtaggaggaacacacagcatttgtgagaggtgggggcagcctgcatttctcttcttgcctgtagagaagcctaatgattcagaggggaggccacagggaggatcataacattcttgctgccaccggttcttgagactttgtgggagaggttttaggtggacaagtggcccccaggacatggggcatcaagtatagcctgtttgaccccagcagaccccagacatgtctgtagctactggtctcacctagccccaaggcgtccctcacctggccaccctcatcttgcaaataatgtgtctccgagggtgtttggctctggatggagcttgtccttggagggcagagtgtttgctactgtcccaggtgttactgaaggatttgcttcatgcctagcagtaccttccaggcgatgcattgagtgagggaatgataggcatgctagggaccctgaagataattccaaaacagaagtaaaaacaccggaattcatggcagcatggctggaatatgtacatggtccccatagtgaccacttctcactgacaacacccattggatatgtgaggcccagaggatttatgaatgagaaaatccaaaacaacaagaaaacctctggtctcaatactttacacttatatctactatttaaaaaaaaaaaagttggctgtgcatagtggctcacgcctgtgatagcagcactttgggtgactgaggtgggcacattgcttgagcccaggaatttgagaccagtgtaggcaacatagtgaaacccccgtctctatac

SEQ ID NO: 154557 - DNA, 2244 bp, Homo sapiens; identical to SEQ ID NO: 140574
  misc_feature (1)...(2244): n = a,t,c or g

SEQ ID NO: 154558 - DNA, 11119 bp, Homo sapiens
tcccctggctcatccagttccccagcctctagtggggcaggcggcatctccccgcagcacatagctcaagattcctcactggatggacctccaggccccccagatggtgccacagtgcccctggaggggttcagcttatcccaggctgctgacctggctaacaagggcccgaagtgggagaagagccatgccgaaattgcagaacaggccaagcatgaggccgagatcgagactcggattgctgagctgcggaaggagggtttctggtcactgaagaggctgcctaaggtgccagagccccctcgccccaaaggtcactgggactatttgtgcgaagagatgcagtggctctctgctgactttgctcaggagcgccgttggaaacggggtgtggcccggaaggtggtgcgcatggtgatccggcaccacgaggagcagcggcagaaagaggaacgggcccggagggaggagcaggccaagctgcgtcgaattgcttccaccatggccaaggatgtcaggcagttctggagcaatgtggagaaggtggtgcaattcaagcaacagtcccggcttgaggaaaagcgcaaaaaagccctggacctgcatttggacttcattgtggggcaaactgaaaagtactcggaccttctgtctcagagcctcaaccagccattaacctccagcaaagcaggctcttccccttgcctcggctcttcctcagctgcctccagtcctccaccccctgcttctcgcctggatgatgaagatggggactttcaaccccaagaggatgaggaagaggatgatgaggaaacgattgaagttgaagaacaacaggaaggcaatgatgcagaggcccagaggcgtgagattgagctgcttcgccgtgagggagaattgccactggaagagctgctccgttcccttccccctcagctgttggaagggccttccagcccctctcaaaccccctcatctcatgatagtgacacccgagatgggcctgaagaaggtgctgaagaagagccccctcaggtgttggagataaagcccccaccctctgctgtcacacagcgcaacaaacagccttggcatccagatgaagatgatgaagagtttactgccaacgaagaggaagcggaggatgaagaggatactatagcagctgaggaacagttggaaggggaggtggatcatgccatggagctgagcgagttggctcgagaaggtgagctttccatggaggagctattgcagcagtatgcaggagcctatgccccaggctctgggagcagtgaagatgaggatgaagatgaggttgatgctaatagctctgactgtgaaccagaggggcccgtggaagcggaagagcctcctcaggaggatagtagcagtcagtcagactctgtggaggaccggagtgaggatgaggaagatgaacattcagaggaggaagaaacaagtggaagttcagcatcagaggaatctgagtctgaagagtctgaggatgcccaatcacagagccaagcagatgaagaggaggaagatgatgattttggggtggagtacttgcttgccagggatgaagagcagagtgaggcagatgcaggcagtgggcctcctactccagggcccactactctaggtccaaagaaagaaattactgacattgctgcagcagctgaaagtctccagcccaagggttacacgctggccacgacccaggtaaagacgcccattcccctgcttctgcggggccagctccgggagtaccagcacattgggctagactggctggttaccatgtatgagaagaagcttaatggcattcttgctgatgagatggggcttgggaagaccatccagaccatctctctgcttgcccacttggcttgtgagaaaggtaactggggtccccatttaatcattgttcccaccagcgtgatgttgaactgggagatggagttgaaacgttggtgccccagctttaaaatcctcacttactatggagcccagaaagagaggaagctcaagcggcagggctggaccaagcccaatgcctttcatgtgtgtatcacatcttacaagctggtgctgcaggaccaccaggccttccgtcgcaagaactggcgctatctcattctggatgaggcgcagaacatcaagaacttcaagtcacagcgctggcagtcactcctcaacttcaacagccagagacgcctgctcctgacaggaactcccttgcagaacagcctcatggagctgtggtccttgatgcactttttgatgccccatgtcttccagtctcatcgcgagttcaaggagtggttctctaatcccctaactggcatgattgagggcagccaagagtataatgaaggtctagtcaaacgcctccacaaggttttgaggccttttttactgcgccgagttaaggtggatgttgagaagcagatgcccaaaaagtacgagcatgttatccgctgcaggctctccaagcgtcaacgctgtctctatgatgacttcatggcacagaccacaactaaggagacactagccacaggccatttcatgagcgtcatcaacattttgatgcagctgagaaaagtttgcaatcatccaaatctgttcgaccctcgaccggttacctcccctttcatcaccccaggcatctgcttcagcaccgcctctctggtgctaagggccacggatgtccatcccctccagcggatagacatgggtcgatttgaccttattggcctggaaggtcgtgtctctcgatatgagagcagacacatttctgccccggcaccgcctctctcgccgggtactgttagaagtggctactgctcctgaccccccaccccggcccaagccagtcaagatgaaggtcaacaggatgctgcagccagtacctaagcaagaaggccggacagtggtggtggtgaacaacccacgggcgcccctgggccctgtcccagttcgacctcctccaggtcctgagctctcagcccagcccacccctggcccagtcccccaagtgctgccagcatcactgatggtttcagcctcacctgccgggcccccgcttattcctgcatctcggcctcctggccctgtcctcttgcctccactgcagcccaacagtggttctctcccccaggtgttgccatcccccctgggggtcctgagtgggacctcacggcctcccacgccaaccttgtccctaaagccaacaccacctgccccagttcgcctgagcccagccccacctccaggctcctctagcctgttgaagcccctgacagtgccaccaggctacaccttccctcctgctgctgccaccaccacttctaccaccacggcaactgctaccaccacagcagtgccagctccgactcctgcaccacagcgcctcattctatctcccgatatgcaggctcgcctgccctcaggcgaagtggtcagcatcgggcagttagcctcactggcacaacgtccagtggctaatgcagggggaagcaaacctctcaccttccaaatccagggcaacaagctgactttgactggtgcccaggtgcgccagcttgctgtggggcagccccgcccgctgcaaagtagtgccaccaaccatggtgaataatacaggcgtggtgaagattgtagtgagacacgcccctcgggatggactgactcctgttcctccattggccccagcaccccggcctccgagctcttgggcttccagctgtgttgaatccacgccccacgttaacccctggccggctacccacacctactctgggtactgctcgagcccccatgcccacacccactctggtgaggcctcttctcaagctggtccacagtccttcacctgaagtcagtgcttcagcccccggagctgcccccttgaccatcttttctcctctccacgtgccatcctcactccctgggccagcctcttctccaatgccaattcccaactcctctccccttgctagtcctgtgtcctctacagtctcagttccattgtcatcttcactccccatctctgtccccaccacacttcctgccccagcctcggctccactcaccatccccatctcagcccccttgactgtttctgcttcgggcccagctctgttgaccagtgtgactccaccattggcacctgttgtcccagcggctcctggacctccctccttggcaccatctggtgcttccccgtcagcatcagccttgactttaggtttggccacagctccatccctgtcttcatctcagacacctggtcaccctctgttgttggctcccacctcttcacatgttccagggtattgaactcaaccgaggccccagcatgctcacctgtcctggtgccagcttcggctctggccagtccttttccggcagcaccaaatccagctccagctcaggcttcccttctggctccagcatcttctgcatctcaggctctagccacccctctggctcctatggcggctccacagacagcaattctggctccttctccagctcctcctctggctcctcttgcggtcctggcaccatcgccaggggctgctcctgtcctggcttcatcacagactccggatccagctatggctccatcgtctactccaggaacctctttagcctcagcttcaccggtaccagctccaacccctgtggtggctccatcatcaactcaaactatgctaccagccccggttccgtcacctctcccgagcccggcttctacgcagacactggccctagccccagctttagcacccactcttggaggctcatctccatctcagacactctctttgggaacggggaacctccagggaccctttccaactcagacattgtcattaactccagcatcatccctggtaccaactccagcccagacactgtctttggcaccaggaccaccactgggtccaactcagacgctgtctctggctccagcaccccctctggctccagcttctccagtgggcccagccccagctcacacgctgactttggctccagcatcgtcatctgcttcactcctggccccagcttcagtgcagacactgaccttgagccctgccccagttcctaccctgggcccggccgcagctcagaccttggcgctggccccagcctccacacagtccccagcttcccaggcatcttcccttgtggtttcggcatctggtgccgctcccttgcctgtcaccatggtatcccggctgcctgtttccaaggatgagcctgacacactgacattgcgctctggtccccccagccctccctccactgctacctcgtttgggggcccccggcctcgacgccagccccccccaccacctcggtcccctttttatctggactccctggaggaaaagcggaagcggcagcggtctgaacgcctggaacggattttccaacttagtgaggctcatggggccctggcacctgtgtatgggactgaagtcctggatttctgtaccctgccccaacctgttgccagccccatcggccctcgttctcctggccccagccaccccaccttttggacttataccgaggctgcccaccgggctgtactgtttccccagcagcgactagaccagctgtcagaaatcattgagaggttcatctttgtcatgcctcctgtggaggcacctcccccttccctgcatgcctgccacccacctccttggctggccccacgtcaggcagccttccaggagcaattggcctctgagctctggccccgggctcgtcctttgcaccgtattgtgtgtaacatgcgcacccagttccctgacttaagactcatccagtatgattgcggaaagttgcagacgttggcagtgctgttgcggcagctcaaggcagagggccaccgagtgctcatcttcacccagatgacccgaatgctggatgtattggagcagtttctcacctaccatggccatctctacctgcgcctggatggatctactagagttgaacagagacaggctcttgatgtgtcggttcaatgcagacaaacgcatattctgcttcatcctttcaactcggagtgggggtgtgggcgtgaacctgacaggagcagacactgttgttttttatgacagcgactggaatcccaccatggatgctcaggcccaggaccgctgtcaccgaattggccagacccgggatgtccacatatataggcttatcagtgaacggacagtggaggagaacatcctaaaaaaggcaaatcagaagagaatgttgggggacatggccattgagggaggcaacttcaccacagcctatttcaaacagcagaccatccgagagctgtttgatatgcccctggaggaaccttctagctcattctgtgccctctgcccctgaagaggaggaagagactgtggccagcaagcagactcatattctggagcaggcattgtgtcgggcagaagatgaagaggatatccgtgcagccacccaggccaaggctgaacaggtggctgagcttgcagaatttaatgagaacgatgggtttcctgctggtgagggagaggaagctggcctgcctggggctgaggatgaggagatgtcccgggctgagcaggaaattgctgccctcgtagaacagctgacccccattgagcgctatgccatgaaattcctggaggcctcactggaggaggtgagccgagaggagctcaaacaggcagaagagcaagtgggagcttggccgcaaagacctggaccaagccaaggaggaggtggtccgcctaccccaagaggaggaggaggggccgggggctggggatgagagttcctgtgggactggtggaggcacccaccggcgcagtaaaaaggccaaagcccctgagaggccggggactcgtgtcagtgagcgtcttcgtggagcccgggctgagactcaaggggcaaaccacactcctgtcatatccgcccatcaaactcgcagcaccaccacaccaccccgctgcagtcctgccagggagcgagttcccaggccagcacctaggcctcgacccactccagcttcagctccggctgcaattcctgcccttgttcctgtcccagtttctgccccagtacccatttcagccccaaatccaataaccattctccctgtccatatcttgccttctcctccccctccttcacagattcctccttgttcttctcctgcctgcacccctcctcctgcctgtacccctccaccagctcatacaccgcctccagcccaaacctgtcttgtaactccttcctctcctctcttgcttggtccaccttctgtgcccatctctgcctcagtcactaatctccccttggggcttggagggctgagggaggagctgtgtgcccagggattgggcatcttccagagtccctggagctggcttctgtggccagttcagaaacctcctcactttctcttgtgccccctaaagatctgttgccagttgctgtggagatcctgcctgtgtcagagaagaacctttctctcaccccttctgcacccagcctgaccttggaggctggcagcatccccaatggtcaagagcaggaggcaccagattctgctgaggggaccacccttacagtgctgcctgaaggtgaggagttgcccctgtgtgtgagtgagagcaatggcctggagctcccacccttagcagcatctgatgagccacttcaggacccactggaggctgacaggacctcggaagagctgacagaggccaagaccccaacctccagcccagagaagccacaggaactcgttacagctgaggttgcagctccatccacctcatcttcagccacttcctcgcctgagggtccttcacctgcccgacctcctcggcgtcgcaccagtgctgatgtggaaattaggggtcaagggactggtcggccaggacaaccaccaggccccaaagtgcttcgaaagcttccccagacggctggtaactgtggtagaggaaaaggaactggtgcggcggcggcggcagcagcggggagctgccagcaccctagtgccctggggtctctgagactagtgccagcccgggaagcccgtctgtccgcagcatgtcagggccagaatcctcccctcccattggtgggccctgtgaagctgctccttcatcctcactgcccactccaccccagcagcccttcattgctcgccgtcacattgagctgggggtgactggtggtggcagccccgagaatggagacggagcactgctcgccatcaccccacctgctgtgaaacgtcggagggggaggccccccaagaagaacaggtctccagcagatgctgggagaggtgtggatgaggcaccctcatccaccttgaagggaaaaaccaatggggctgacccagtccctgggcctgagaccctaattgttgcagatcctgtcctgggaaccacagcttattcctggggccccagccttcttgggaccccagccagttcacagacccaattcccctcctgttcacctgtggagaaaagaaggcgaggacgacccccttaaagcacgagatttgcccatccctggggaccatttcctctgcaggggatggcaactccgaaagtcggacacagccacccccacacccatcacccctaaccccactcccaccactgctagtttgtcccactggctactgttgccaacactgtcaccactgtcaccatttcaacgtccccacccaaacgggaagagggggccgacctcccaaggaatcctccatcacctcgggcccagccaggttccccgtcttgggaccgtggacaggcatttcttgtttttcgaggagttgttgggattggggaggcgacggcaaccccagggccaagcgcgagagtgagggtagttcctctgatgaggatggaagccgccccctcacccgcctggcccgccttcggcttgaagcagaaggaatgcgaggacggaagagtggagggtccatggtggtggctgtaattcaggatgacctggacttagcagatagcgggccaggcgggttggaattgacaccacctgtggtctcactaaccccaaaactgcgctcgacccggctgcgtccagggtctctagtccccccactagagactgagaagttgcctcgcaaacgagcaggggccccagttggtgggagtcctgggctggcaaagcggggccgcctacagccccccaagtcccctgggggcctgagggttcagtagaggagtctgaggctgaagcctcaggttgaggaggaggaaggggatgggaccccacgccgacgtcctgggccccccgccggcttgttgggaccaccaaccaagggggaccagggcatcctgcgcagcagcgcccctccttccctggctggccctgctgttagtcacagaggccgcaaggccaagacgtgagtggggctgcccctccacctaggctttccaccgtggccactccctccatgaccaggcctgactctgttaaccactacttgaagtcttgagggggaaagcctccagggagacataggggccttctcccttcttcccaccaaagtagggggtaggcaactggttgtcatggaaatggggatcatcacagtccccttccccttcaccccacgtggctgggcagtgttaagggtggcaagatagtctctgtccccacccccttgtacttgattccccagctgtctttcacacagccccccacccttaggggaagggggaggggcttctctacaatgaggtttttttcttttttttttttttttaagaagaaaaaataataaacttagtttctgtatgagcatccgcgtaaggaggcttctgattttctggtggtggtggagggttgggtgggaacttgggcatcgtttttctcctccctcttgttcttgcaaagatcctagcacctgatctctagcccaggactatatgttccaggcagaaatctacccaagaagagggaagattggtgaatttgatgtggtagggtgcctttccccagtcagtttgaagtcacagatatccttttcctctcatttcttttccctcggttcctaaacgttcctcggagctctttgatgcctcagacctttcccttttatccctcttgctcaggagcttcctttcacaactttttccagagggcaggcgtcctatctccagttgctccatcccttgggccctcccctggctcttcatctagccaaactggtttgagtcagccacaccccttcccagctccctgggctcttcacgtggtggctggccactcaaccccacccctgggcttggcttggagccctgagtcagctccatcaccacccaagccaaaccaaagctgaggtatggagccgaaactcacagtccttcaaggcctatagccaggtgatggaggacgaggagaaggcagtggagatcttgggcaacacggaagctgctcatcctccatcccccatccgctgctgctggctccgcctccgctgcttggcagctactagcattatctgtggctgctcttgcctgggagtcatggctctggtgtttgccatcaaggcggaagagcggcataaagcaggccggtccgaggaggcagtgcgcctgtggggcccgggccggtaaactcatcctggccagctttgctgttctggcttgctgtccctcattctgggtccccttgctgctgtggttgctctcctacgccatcgctcaggctgagtgacccctggatggccctctgctaagagccaagccaaaaccccctggatcctgcaatgcggcattgcctaaggtcctgtgacagcagtggttggaaggatccctggttggaaggatggggacctctctcaaggggctttggaagagctcttctagccctttataaaaggagggcagcagctgagactgatgagaggagggcagcctgctctgttctttcagggccccccccacccccatctcccctaccctagcccaccctagggcctctacccagcgggaggggttgaagaccaggcctggttttattagaattcattttgtaataaaagccttttttagtggtg

SEQ ID NO: 154559 - DNA, 390 bp, Homo sapiens
ggacttcaccatgtcacatcactatcactcagcacacgggacccttgtcctggctcccagggcccttggcaatccgctttcactctacccatctaactacaccttccctttccagcattcgccctctgatccatgcactcagtcctactctctgcctccagaatatgccacacacggttcctcttgctttgacaccactgatggagggcttaatgcatccagggcgcttgctgggagctgtgcgcctgtgtctgggtctttgccctgctgccccactcttggaattccatccccaccactcccccacatgcacaaaagccttcctacctaccctccaactccgaccatctccatgaagcctccttgacctacgtggcacccacgcgtccg

SEQ ID NO: 154560 - DNA, 1989 bp, Homo sapiens
  misc_feature (1)...(1989): n = a,t,c or g
gttacatcgtgtgtattatttaatgtcactattggttagtggccatttttcagaactgaagatggaatggcctgaccagctattaagaatgtggggagacgcagaaattgtgggaaaattccttaatgtttaagggaaagtaactttaagagatttttggaaaagctttatatacattcttttcaaatttcagtacaaatgaaaaagtggttttaatcagtgatttagtagactttgagcaactgtgcacgcttcagtttaatagcatggtttggccagtgtattactctcaagtccttttctcaatcaacttctatcatcaaagcaattgtttcattatagataaataaggacattttttaatttaaaaattcatgtctgagttgactttcataagggatttcattttttcctcaacattcttaaagccttttagtatttgacggttcttttttcccaggacatttgctaggaataacaacgtttcaaatgttttttaatctacttgagcaacactatcgtgtcttacaaaagttgttcatatgtaaatgatcatccacatttcgtggaattgaggccatgttcaggtgctaagggaagttcgccttttacacaggaagattgaggaaaatttcctagatataaatacagataaatcagacgttacagtggtgacgtagtaaccatcatggcaatggaaaggagtccaattcatagcctaaaacttcaaatgtattcttaggagtcagattttactgaatattttacccacaatagctgcctattttgttataataaaatatatataaatatatatataaaactttctttaaactgtaactatgggaattattttctttacatagttgcggcacacacacaaacatatatatatatttaaaatatattttgtttcttttgccacctactcctaactttttgtttgggtttttaaattaaatattaattggaatggacttatctttaatcatgtggaactggaaatggggggcatgggtggtcatgagggagggaaacctttaggggaaattaggattataaggtaaaaagtgtgggcatattctccctcttttctaccaaagggttttcaaatgggttcctgagggtttttttgttggttggtcccgtgttgttactgttgttcttgtcaatcaggtttgattttgggcccttgcccctttccttcctagctctccttttattaataggaaggccaggcaaaagccccattttatgtgtgtgttttcccctcagacagccttccatccccacctgctctgcacctagaattggcacaaatcttcatgggtgaggcaattttaaggaaatgttagtggaaaggtaggaaattattttcacaaatcagttttctctggtccttcatattaataataatatttggcttccccattgctctttggagttgtttattaaatatgtgtttttgacaacctcctcattagtttcttaaatgagtactggtttgtaaagaattatcaacattatccattccatttatgaagaagaggagaacagctaataaactgtattgtaaaaaccccccactgttaaagtgtgtcctggaattttggaaagaaaaaaaaatatattttgccaagcctaacattttccctgaaaacaatttggnggccatccatgtaaccttataaccgaatccccaagagcccgttaggccagccagcagtgtgttacccacattgaaatacacagtgctgcctgttagactaaatgtccgtaggttgttaacccacatagaaacacactagtatgaagaaaactgttgtaaaatctcaagagcttcagaaactgccttacaagaccgcagcataagctattttggaagtatttaccaaatagtcacatgttgtaaaatatccaagtggttataaaaggatgcccatttatatattaaaatttacataacattgttttctggaaaaaaaaaaa

SEQ ID NO: 154561 - DNA, 1423 bp, Homo sapiens
tgactctggttgccaaatccactgggcacttcttaaccttctatttgacctctgcgcatttggccctgttgagcactcttcttgaagctctccctgggcttctctctcttctagttctattctagtctttttttattgagtcctcctctttgctgatcccttccaagggttcaatatatatacatgtatatactgtacatatgtatatgtaactaatatacatacatacaggtatgtatatgtaatggttatatgtactcatgttcctggtgtagcaacgtgtggtatggctacacagagaacatgagaacataaagccatttttgtgcttactactaaaggctgtccactgtagagttgctgtatgtagcaatgtgtatccactctacggtggtcagcttttagtagagagcataaaaatgataaaatacttcttgaaaacttagtttactatacatcttgccctattaatatgttctcttaacgtgtgccattgttctctttgaccattttcctataatgatgttgatgttcaacacctggactgaatgtctgttctcagatcccttggatgttacagatgaggcagtctgactgtcctttctacttgaaagattagaatatgtatccaaatggcattccacgtgtcacttagcaaggtttgctgatgcttcaaagagcttagtttggcggtttcctggacgtggaaacaagtatctgagttccctgggagatcaacgggatgaggtgttacagctgcctcccttttcaagccaatctggtgagcagtggtgcaggcggggagccagagaaacttgccagttatataacttgttctttggcttttcttcgatctgtaaaacaaggataatactgaactggtaagggttagtggagagtttttaattaaaagaatgtgtgaaaagtacatgacacagtagttgcttgataatagttactagtagtagtattcttactaagacccaaatacaaatggaattaatttaacccaagtttatgagttggctttttttttcattttccaatttggattttaattaagagtgtcttttcttatgtgattttttttaattgctatttgatatggtttggctatatgtccccacccaaatctcatcttgaattataatccccatgtgtcaagggagggacctgatgggaggtgattggatcacgggggcagttgtccccatgctgttcttgggatagtgagttagttctcatgagatctgatggttttataagtgtttgacaattcctcctttacacacactctctctctcatctgctgccatgtaagacttgcctgcttccccttctgccatgattgtaagtttcctgaggcctcctcagccatgtggaactgtgaatctattaaacctcttttctttataaatgaaaa

SEQ ID NO: 154562 - DNA, 426 bp, Homo sapiens
caatctgaccggtacactgtctaaccgcactccgcctgtgccaccgtaatctgccgtgtacctgtctaaccccacaccgcatgtgccaccgtaatctgaccggtacctgtctaacccctcgccgcctgtgccaccgtaatctaaccggtacctgtctaaccccacgacgcctgtgccacggtaatctgaccggtacatgtataacaacacgccgcctgtgccaccgtaatctgaacggtacctgtctaaccccacgccgcctgtaccaccgtaatatgaccggtacctgtctaaccgcacgccgcatgtgtcaccgtagtatgaccggtacctgtctaaccccacgccgcctgtgtcaccgtaggacagagcacaaaggagcacccaggatgcacacctgacacacttcgcggccgagccgcaagc

SEQ ID NO: 154563 - DNA, 1323 bp, Homo sapiens
cccacgcgtccgatgttattggcatttttaagtgtttagagttttttggggtttggggtggttttttttccttggtttccttttttccttttaattggatgcactgacctggcccaggaaatgaagagattctcttttgatgctattaccaatgttatcataaagtgacagtcacctgtaacaaaaaggtgccaccacacatgatcactgatgttttatttgctcatcaatatttttatttttgtattctggctcagctgcttctctgagtggagttaaggaatgagccacaaagatttttgtagtaagtatattggcattgcattttatattcctctatatttaattttgaaaacctaaaaagaaggattgtgcatcttgagagaaagttgagcaaattgtgatctaagcggaatgttaatttgtgctgcttcttgtgcacgatagcagcagtagtatctctcttgggaaataaacatcccatattatgatgtctatggaatataggtttccttttcttccttccctccctccttcccccacctttctcttttttttttctctctcagcttctcttttcctccttccctcttcccttcctctttctttactttttttggaaatcacttattgtaaataagttgtaatccaaacctcatgtatcaatggggaattttcaaatataaatattaccaatgcattttctggttgttgtctgatttttgattgaagtataatgagaatgacatgtctgttgcttttggtttgaggacttcgctttagcttcataaatcttttggtattttagtatttcattgttttagcaggagagggcagcaaaagttcattttccctgttagtaatgctgtggttcatgatcggttttaaatttagctgtgtgtgtgtttttttaaacagcatctctttgtgagtagaggtaaaaatgaaacatttttgatatgaaaagttgcatatgaaaattataggactgggttcaaccagagcagtgaaggacttctgatcccacatcaaactttaaaatgcccacaaaacaatcttccccctctgggcctaaaacatgctacttcccttttcaaacaccacaaaatacaagctgagtcttaaacacttggaatttaaaatgtttttctttggaaatgatttgctttcttcaaagtggtaacagaaacaaaaatgaaggtgctccccaaaaagaraatgtaaccttcccctttcacagatgtgtgagaggttctgtactgtgggtgcatcataataaagaagcagtgaagagttaaaaaaaaaaaaagaaaaaagtcgagc

SEQ ID NO: 154564 - DNA, 329 bp, Homo sapiens
acagaacctacctaggaataaaaacggggataagataggctgaaaagaaaaaataaacagagtcttagttacctgtgggagtataataaaaaatctaacatttgtgttacccaatccttagaaagagaggaggatgatagagctgaaaaagtagtggaataaataatggcttcaaactttccatatttatcaagagatgtaaacctaaagattcaagatagttaacgaatcttaaattggataaaactaaagaaatctatatcaaaatatattattgatcttctggaaactaaagacataataagaaatcttgaaagtagtcagagaag

SEQ ID NO: 154565 - DNA, 891 bp, Homo sapiens
cctctccatctttctgccgagtcccatttttcagccaaaaagtggtaactaggagctctaggacctaaacacaaagaaagccctccctggatcttccccctttagctagcaagttcttgttccctcgatccctctttttctcccctcctaatgcagtagagaccaatggaaaagtgtgggatgtgttggaggtcagagggaggttcatcttggccaagtcttaaaggtgacacacgcaagagttactgacccaggcgttctgctcaacgctttatagacactatctccgtagccatcaaaagaggcacctgtggtagatgaatcattatctccagtttgcagatgagtagctggaggcttggatagctaagtaacttgtacgaggtacagaagtgctcagtggcacatctacctgagccccagccgtgtcttgaaggcccatgtgaaaaagcaggcagcattgagaaccggtgaggaactcatactcataatctaggctggggctctttacttatttggtcagtctgatgaatgctctgcatctccaggcttgaaagtacatctccacacagtatttgtgaatgtgtcaaagggttcagacccccaaaagcccatctaatccatatgtccactcaaacatttgtacacaactgttcattgcaccattatccataattgccaaaaggtggaaacagcccaaatgtccatcagctgaggaatgaataaacgaaatgtagtacatccattcaatggaatatgattcagcaataaaaagaaatgaagtattgatacatgttacgacatggaagaattttgaaaacattaggttaatgaaagacgccagccacaaaggactgtatgttgcatgattcgatgtacatgaaatgtccg

SEQ ID NO: 154566 - DNA, 372 bp, Homo sapiens
gacacattgtgctcacagagcctagaagagtgtgacagtagttgagggccacgctgttgtcttagagtgaagtgaggagaacctacattggtttggtagtcatgggagtggaaggagggatgaaatgtgaaagctcattggaggcaaaatcaaaatggcttgctcttcatagtcaactattaagtgaggaggaggaattatttgctgacttgggaagaagtaaaagcttgccatctcaatcagggtaaagcttaagcattgtgtgattctagatagattattgagcagttttgttctatgtatttcatatcccatatcttctagttatgaccctacttctttatttcttgccatagccaaacattttttaag

SEQ ID NO: 154567 - DNA, 700 bp, Homo sapiens
aaggctgataattttatagggttccgttgcatggatagaccacatttattcattcatttatttatttatttatttatttatttatttatttattgagacaatctcactctgttgcccaggctggagtgcggtggcatgatcatggctcactgcagtctgaatctcacattctcaagcgatcctgccgcctcagcctcctgagtagctgggactacaggcacatgacaccatgcctggatattcgtctttctgtgtaactggttgagaaacaggggagtaacagtgaagaaacggtcttagaataaatctggtgacagcagaagagaatatgagacagattgtgctcacacagccttgaagagtgtgacagtatttgagggccacgctgttgtcttagagtgaagtgaggagaacctgcactggtttggtagtcatgggaatggaaggaggaaagaaaatgtgaagctcatcggtggcagagtcaaaatggcttggtctttgtagtcaacgattaagtgagaaggaggaattactggctgacttagaagaagtaaaaaacgtgaaataccgataaaacacaaatctcgtgattttagtcagcgtaaagactaagcattgtgtgattctagatatattattaagcagctttgttccagtattttatatcccatatcttctagctatgaccctatttctttgt

SEQ ID NO: 154568 - DNA, 992 bp, Homo sapiens
  misc_feature (1)...(992): n = a,t,c or g
aatataataattcctttccctttggttagatacccaatagtggaattgctggatcaaatggtaattctatttttagttctttgaaaaattgccatagagtttacactaacttccattctgaaatgggcatttttgaatgaaaaatttaaagactggtttagaagagcacttcaggtgaaagaatataaacttcagcttaatatatcacatatatagtatagataaaataatttgttgtgtagtataatgaggaatgtggttataaatatactattttaagtggatttatacgttgtatttgttctgcttataatgggaaaaaaagtctttacatataaaaatagtggcaaattccatttgtattttttaatctctgaaatttgggaagcagaaaatatcaaacgaagaaagaaaccagagtctcaacctgctggacactattggaagtccatcatttaacatgtttttagtatatacttttagcaggagacatctctgagtcaactgtgttgaggtgccaccacagcgagtttaggcactcagatccctgcatactcatcacattgggccataatggcaaatagaannnnnnnnnnnnnnnnnnnnnnnnnnnnnnnctttcacatagaaatagtaagtgtaggagtgtgggtcagaaagaaaaggtggccctacctctgatggttggcaatgataggatacaatgggagataagctatctacaaatggagtggagaaggatatatatttcaaaggcctaatttgtagtgaaagactagagacaaaggtaatgtgtgtgtcaggagagagtacagatggaatcttgttttgcaaacgtagaatatgtatgtgtttgtaattattgcaaatggaatggtaatctataatggaatggaaaacattgtagatattttcagttatcaaaaagaaaactaaaaaagtatataataattgtatgtatgatatatatatgtgtgcgtgtgtgtatatat

SEQ ID NO: 154569 - DNA, 817 bp, Homo sapiens
tctgcactacaaaagcaaattttccagtctttattccactcataaccactgctttccccaccaggctaaagtgcttcttagtcttaaatagggtttttaacttcataaggtacaccattgtttatgttttagggtgcaggtccatatagtcgtaatacttaaaacactgctacactgatgcttttgtggctcatggtttcctggttctttgatttaacacctggcttcctggtatctatggctggttaaatatctaaacctgcattattagtgctttacaataataattcccttgactgaagtccagaaatactaaagcacttcttttttattgctgtgaatgccttagacttatcttccaaaataggatacttcgtttctattgcatatataactgaaatattttataaactcactgtaatcaaatcttataaaatctgaatcaacatgaaaagttgtcaatgcttgaatgaatactaaaatcataccccaagatactagataacataaatgaccatgaagtgtcccactgctcaaagggcaacaactttaagaacagaagcaaagagtggtggtgtggaacccaagattcttggcgactagggaatttaaaggttggggaggaggaattcaatgatttgacaagaaatactttataaaaatttgctccatgtattggctaagaaaaatataataaaattttggtagtgaaaattgtatcactaatgtttaccaatattactagtatgaataatacacataaggtagtgacttggaagctgctcaatactttgttgctataacaaaatgcaatatt

SEQ ID NO: 154570 - DNA, 628 bp, Homo sapiens; identical to SEQ ID NO: 140867

SEQ ID NO: 154571 - DNA, 1852 bp, Homo sapiens
  misc_feature (1)...(1852): n = a,t,c or g
agatgggccatgcgggatccctgccacacgggtgtgggggcagcgcgctcctccctgcctcggctgctgtgtgtcttagtcttcatgtttccccttggcgtctcctctggtccctgtccatcttgtgcaccatgtgtccctgagggcgagtcacacctgtgtcttgagtctgctgtaaggtgttcagtctacctcaaggggtcatcatggtaagctctatcccacggcatcctccgtccatcaccacacacactggaatgtatcccccccgccctgccccttcgataacctcctgaccttgtctttcctataatcaccacaaactcctagtgcaaattggatgctgctttaaatgtgaaaacaattgttcaaaagctataaaacctgaatcgaaagctgaagctgaatttataagccttgttgcatatgagccaaaagtgcaaaaagctctatataatgaactaacctgccactcgtataaatataaatatatataaatatattaaattccagactgttctacaaaattgtgtatttgtatttttgtgtacgtacaattttctgctaagcagaagggagggtgtagtataggatgctgtgaggaagagatttgggtttaatcctatttctttggttaacttattttttgttaacatcaggatgcctgtctttgtcttattatgtgtatggacactgtttggggaaaggctggcagtatctctcttcctgaggtcccagagggccattaaaaggaattaaacagggggcttaggagggtgttcttgggcccaccaaacacagggtaaggcccaacagagttcgggctcccgtacgtgggtgtggtgggacctggggcctggagccacttgtactcctggggtgggactgagggagggaaagggctcccccacttcaggctggtcactgtatgttgacttccctctgggaagcaaaattccacttgtaaaaatcagcttccaagacaaaagatgatccgattgtcacttctgggtcaccaggaagggacacaggatctctctgaactttgggaacagaccctcatattctgggggccagaattttgcccagaaagcagcaggtggctctgcctggctgtagagcccagctcattggctgtccctgggcttcgtctccctcttccgagtagttgctgcctttcttcagatcaggttaccacaatgcctccccgctgctgacgcttcatcccccacacctccagcccccagttacctgggagcttctcagaaccccactttngcccggtgcttaaaaccaccaagagggggtgaaaagtgggctgccagtaatggcccagaaaccaacccacccggaggccatggctgaaagacaagcttccgggtgttccaggggggttgacggggcccaacccatgtgggcagggtcccccaggccccccacccccactgcgcccatccgccctctggagctcccacagtggtcccccacctaatggggaacccctccctcntaggggagagtgatacctgcacccttcaccccgtaggacctcatatttataacaatgtgttaatggctgtagcaaaaagccccttgtttcctagatgtaaatggtcaaagaaacaagcgctctattgttttgaataaaatagttcaaatgagtccctgtatcgattgtatctcctattctggattagtgccttttggacagtagactgttctgtaattaaaaatgtagtatactgcttttttgtacagttttgttttaataaaacttttttttaatttgtgttctcttttagtattgtacctattagagaatattattgtataactgaaaaaaaaaaaaaaa

SEQ ID NO: 154572 - DNA, 784 bp, Homo sapiens
  misc_feature (1)...(784): n = a,t,c or g
atttcggcactagggcgtcccaacctccgggcttccggtgccgtttcccggttcgctcggccgcggtcgctatggaggagccggagatgcagctcaaggggaagaaaggtgtcacggacaagttcactgagagcgtctacgtcctggccaacgagccatccgtggcccatgtaccggctgcaggagcatgtgcgttcgctccctccccagagctggcccagcacaaggcagacatgcagcgttgggaggagcagagccagggagccatcttacactgtgggagtacgcctgcagcgccgttgaagaacctggtggacagcagcgtcttacttccgcagcgtgggagggtctgcttcaaacaggccattcagcattccgggaccatatgaattccagttgcccaggggccacagccggaagggaaccaccgaggagcagagccagggagccatctacactgtggagtacgcctgcagcgccgtgaagaacctggtggacagcagcgtctacttccgcagcgtggagggtctgctcaaacaggccatcagcatccgggaccatatgaatgccagtgcccagggccacaggtagctcctgggaccgcccgcccccactgccactcccagctgcaaggaccgtctctcagctgcgctgggaaccgctgcttctcgcttattagaaaactgtctctttccttttgtcctggngtctggtgacctcctcttgtcctgtggcatctataacctgagttcagtcacttaataccgaggtcctgcgctctgct

SEQ ID NO: 154573 - DNA, 1418 bp, Homo sapiens
agatgggttttagcatgttggcctggctggtcttgaattcctgacctcaggtgatctgcccacctcagcctccaaagtgctaggattataggcgtgacgaccgcacccggtctcattaatgtcctcttgagtgagccctgctgtgaccacttcctccagcctgtcatgggccaggagtgacctagctgcggagggacacgccagatgccccctttgctctggctgggctcaacacttgagcaatgaggaggctgacgctttgtctccccacacccgccccatccctaccacctgtatctagtcacggacaagttcactgagagcgtctacgtcctggccaacgagccatccgtggccctgtaccggctgcaggagcatgtgcgtccgctccctccccgagctggcccagcacaaggcagacaatgcagcgttggggaggagcagagccagggagccatctacactgtggagtacgcctgcagcgccgtgaagaacctggtggacagcagcgtctacttccgcagcgtggagggtctgctcaaacaggccatcagcatccgggaccatattgaatgccagttgcccagggccacaggtagctcctggggaccgcccgcccccattgccatttcccagcttgcaaggaccgtctctcagctgcgctggggaaccgctgcttctcgcttattagaaaactgtctctttccttttgtcctggtgtctggtgacctcctcttggtcctgttggcatctataacctgagtttagtcacttaataccgaaggtcctgcgctctgctgtgtgcctggcccctgggctgggcactggggaccatagcagtgaccgagacagacaggcttcaccaaggagacatacgaccaaccaggtaaacatggccagacaagagccatgtcagatgcgctgtgaagaacactgcggggccccctccctaggaggtggccatgagttaacatgccagacagagacgatcccgggggcagacggagttcccatgtggggcagtggtgagggcagacgctctggggctgggatccctgggagtgttcgagaagcaccgagaaggcttctgtggctggagccggccagctgggggagatggggccagggagatggtctggggctgggatccctgggagtgttcgagaagcaccgagaaggcttaccatggctggagccggccagctgggggagatggggccagggagatggcaggggcctctccctgtcccaggacccagagccaagggaggctttaagcccaggaccaggggtctgaaaacgaaaagcactcacagtccttgaacattggaaagagaatttttgaagagtagcccttctttttgtttttgttggcattctaagttaataaacacgcttatgaacacacaaaaaaaaaa

SEQ ID NO: 154574 - DNA, 429 bp, Homo sapiens; identical to SEQ ID NO: 130586

SEQ ID NO: 154575 - DNA, 935 bp, Homo sapiens
ggggaaaaaagcaagttttggaggtccatccacatcagcacatacagccctgccttgttcttttggactgctgcatagtatttcatagtttatttaaagcattcctctactaatgggcatttaggttgctttcagttttttttctactgtgagcagtgctgcaatgaatatctttgtataaatttccttgtgcacatgagggaacctcttgggagttattttggaaaaagtacagtgcgagaagttgatagcgaagggttaccttagtaactggagattcgtcacacacacaagatgagccagcctcaagaaccacttgctgaagttgcagaatcagaactcccaccagtcctgcaggagggctccatctggagctgaaattaggccaaacacagtgctgatctgactggttggtaccagtttgcctggcttttgtgagcattgatgtagatctttctaccaggaaacctgcatctagatcctcaaaggctgggttcttcaactgaaactcatagtgaatgcgcccctgtgagtggggctcatgagcagcagaatgtgaggttgaaaggtggccaggtcttgaattggcccccagtgaaacccttcacagatggcgagggagtgggtcctgaagaattggccaggcaaaattgagagtacagttggattaatcttgctatttaaaaagttggtggggcaaagccgagtctaggatatttgagattgggattgcggcttcctgtcttctgtcttcatatctcataagcaggagacttccccaggggagtttaattgctaccaagaagagggtcgggcgtggtggctcacacctgtaatcccagcactttgggaggccaaggcaggcagatcacttgaggccaggagttcaagaccggcccagtcaacatggtgaaaccccatctctactaaaatgg

SEQ ID NO: 154576 - DNA, 962 bp, Homo sapiens
agagacaggatttggagtacttgctactttcagaaaaagacttcttttgtgggaaaagactctctgaaacttcagtttctcaagtatttgacctccagcccattaagttttacaagacaaggcatggtggatagcagcaaaggattttgatagggaaatctggggcttcttccacttggaagaagctgaccggcgccctctaaacctttgccctatctgtttgcacaagttgcagtgtgctgttattggcttcagcattgtagaaagatataaagtaagttgagggatggatagtgtaaagagggggaagtggttatctgagtagcaaactgatgtatctattatatccttctctagagttataatttatcagaggaaattagtgtaaagataagcaggaagctgtggtttaaaaacatgcgaagaaatgcccttcttaaaaacttcagcttgccttagagtgatttatgcttacagttcaatgagaaatagtggaagaaattttctgcttctcttccatttagggcaagagagcttgactttgcaaaactgaataaatattgatatgtgtggcaaagttcattttttaaaccctataagtgtgaggacaggatttatctttccaaatatgggacagaggtatgatgttcattaggaggaaaaaagtgattttctttaaaaaggaagaaggaaagtacctaatctcagtatgtgtgtgtgtgcccacacttgcccacaaacatcaatatacattcatgtgtttactcatgggtatgactgcattcaggtgactgcacagaaatgtctacacatgtgttttcacatacatatgtctacccatgcctgtgtggacacttatatatgtatatacatacatgtcaaattaatataatgccttgtagaatattcagcaagttgagaaaaaatatcctatcatgctagaaacaaagtataagaatgag

SEQ ID NO: 154577 - DNA, 424 bp, Homo sapiens
atttcagaaattcttttctaatcagaaattctaatcaaacataagtttccaactatgtgttctcttggtcctcagaagtgtttgaatagaaaagtaacaactaacttcccatctttctggtggaagagttaattctgcctggagggttctgcctgggagacatgacagcatgtgtgtgactcctgtgtctgtttctgtggggtcatccctttcgtttcattttgccagggcctggctcaggattttttatggcagtgcctgtgaagacaagcctggccctccatccagtcacacaggaaatccacagagagcatgctgagagcagccagcggctgggctgccatcaggcctggtttatgatgccacaagtgaatggcacgtttgttcctctttatctctgagcattgaaggacttttggttaaa

SEQ ID NO: 154578 - DNA, 1771 bp, Homo sapiens
attagttatgagtaataaatatattttgctttattttcaatttgatatatggaaatttcatcagaagacttgactgcagtgttacttacaacttagaatgacaaaaaattcagctctctggtttttcaaaggtaataaagattatactaactcaatggcttaaataagagcttgttaaccaaacacaaatattttactgacaaactaggaatttaggtattatgaaggagaaaacaattttcacagacacccactctcttagtctaagggatgaggaatttatttcaaagttatacaagtgcaaagaaataagatctagaagcagcaggggtttcaaatgagccaaaaatggaagaaatagaaagttaatgtttactgacatagggaaatcctcataagaggaatgaaaaaaatccgatttccaaagctaggaaaacatgtgggtcctacaagacttgcacgaaaaataattagatgtaaatgttcttaagaagaaaccgaagggagcggttaggatatttcaaatgtaagaaatttaacaaatgtaataagatacctagagaccatggtcccttttttaattaaaccactcaggattttaaggaaagatgatgccttgggagctctgtgcctttggccccgttggtcaaggtaattcgtccaagtgcaggcacacaaactggcctgcaagcacgttcagggggcttattttgtttttaaagagcaacaaccagaaggaaatgtctttaggtgccagggcgtgagcacctcctaagaacacggggcatcttcagagccatggcatggcccagcaggagcaggggtcaccaccagcttttcttctcctttctcaggtggagacagacataagttcgaggtttctggaagacggctgcccacagagggcttgccttctaactcctcatttgaatcttttccatcatcaataccctggccattccttttcccacaggtacagctcagtacaatctggggcttaaaatttcaattctttggtgacctgaagattcttccatgaaaaggattactctgaacttaatttttttttttaaccaaaagtccttcaatgctcagagataaagaggaacaaacgtgccattcacttgtggcatcataaaccaggcctgatggccagcccagccgctggctgctctcagcatgctctctgtggatttcctgtgtgactggatggagggccaggcagaattaactcttccaccagaaagatgggaagttagttgttacttttctattcaaacacttctgaggaccaagagaacacatagttggaaacttatgtttgattagaatttctgattagaaaagaatttctgaaatatccccagcttcactttctgtggtttcggttactcatggtcaactgaagtctgaaaattaaattaaatgggaaatccgttttaacttgctcgccattgtgaatagtgtgatgaaaccttgtgcctcccgctctgtcatgcccaggacatgaatcagcccctcatccagcttctctgaccattagtcacttagtggtcttcttggttttcagatagcaagaagggtgattacagcacgatattttgacagagaccacattcacatagcttttattagttattggttgctgttaatctctcactgttctttgttaagctttatcatggtatgtacgtagagggaaaaagccacggtatagatatgtagggttccatactatccagtctcagggcatccactgaggggtcttggg

SEQ ID NO: 154579 - DNA, 1504 bp, Homo sapiens
  misc_feature (1)...(1504): n = a,t,c or g
gacccncttaaagtcctaaactctgcnccctaggctggtgtcctccaacccattacttattaccctaaagccgtcactgcacagccctactccccctggcctatcacagcaggancctatctggagagttccacactattcctagggcgaatcagtgagcctaaaaatccccagagaaaacactgtaggaatagaaattccccaagtttaattcccccaagagttttaaaaattatgagcccttttcctagcccccccaccttcccccaacccctcagagaaggacagtaaagaaatccagtgaatcccaggtatttaccctgttgttgaattgtgaggttgtgaggtagacgtgtaacaaggacaaggaagtttggggatctgcttggagaaatgaaggtttattcaaaacaagtggacaggtcaggggtaacggggtgatgagggccacctggcttttgtaatcatgtggggactgtcccctgggaggtgcagcaaaaatccagaacggagacagaagctcacagtctggttttagctgccaactcctatggaagtccatagcgtgactcctatgggaaggcctaccaaatgaggaaatttcaggaatttgctaatgcttgggaggattgaaaatgtaggcagcacagaaatagagtagttggtttaaaacgggaatccaggaaggattggtaataacaaggccacaagatttgggaatttacccttttacagactgggcttttattaacaccccaccctcggtctctgaaacctgcctgattccagggcctaaccagaaccctaagggccaaatttgggcccagatcaccccaccccagtttaattgcccttgggcctaagaaatgcaaagccccctccatgaagcgcaatgcctgcccacttgcccccagaaaggtggggccatgtgcacaaggcagccagcaatagttccttttcctagaaagactaaatagcccactgcctaactagggattccctaggacattcccagcaaggcctcctcacagcatcatatgacgcaaagtaacagccccacgggttgacattggagtgacaggcctcaactcccaatgggttgacattggagtgacaggagtaggcactggaggcactaagggagggtgagtgaagctgattgtccaagttaggaaaggaaaacgaatggagtggagctgaaagtggcccaacccagcgcatggcctgtgaagcagcaaagtctggtcttcatcttcaatatgagtaatgtcctcttaccactccttatctgttactgacaaggtctattaccctttacgagccaccaggcttccctggcctgggcaactctacaaattctttagttaaaaacactacaaagggccgggtgcagtgctcacgcctgtaatcccagcactttgggaggccaaggcaggtggatcatttgagcccaggagttcaacaccagcctgggcaatgtggcaaaaccctgtctctactaaaa

SEQ ID NO: 154580 - DNA, 691 bp, Homo sapiens
cagaaggccagccacctccttagtttttgtttttggttttggttttaaccttggtttattccactgctattttaattcctcagtcattgtgccttcaacagaatgccttagcattcgtggcttcctccctgtatggattcccaatcattcaactaccctgcaaatgcttcctgtccatcttctgtgtgcctagcactgcgtgtaagtccatgggaaataccaggaagctgaagacccctgttaaaactcccccgggagccctgtaattggagagatatgatatatgaatcagtatcacaattaaaaattaaatattccctttttgcctggaccttatcatcccatagaaatttcatataacaattcatgagttatataaaaagtgcagtaaaataatactctaaaagctgccacaaggcatataggatgaagtgccagttgaatgtaggcctatcctgtaagtgctgtgaatgtacagaatggagagatccttgtgaactggagggtcaagaaagcctttggggccaggtacagttggctcatgcctgtaatcccaacactttgggaggccaacgtgggaggattgcttgaggccagaaattcaagaacagtctgaacaacatagctagaccccatctcttcaaaaaaagaaaaaaaattagtctgatgaggtggctgaagtgagctgtga

SEQ ID NO: 154581 - DNA, 684 bp, Homo sapiens
aatttatatctctatctagacacctcctcattcatagaattgcgtaccaacctcttcatctggatgtctcaccatcctctgaggctaacatgaataactacaacagcagctactgccttctttcttccaccgtatgccactccttccatattttgttagaactaatctggtcagtatctgcaagatcaagcagcaaaatctcatgctttacttagcatttaaaattggtaacttcccctctgtctgaaaactttctgtagttccaatgctgaaatgttgggatactctttttgctgttctaaacacttgctttcagtgatcttggttctatcttcatctgctgcttaagcataaaagctcggtcaacattccttttccatactttttttctatgttcctcttcaaatgtgtacatccaacataaaacatttaactgtatatacttctgtttttctacaatatggtgactgcgttgactgtatttatgtagtgctttaaaaaaaaatcagtaagagccaggcatggtaactcatgcctggaatcctagcactttgggaggcaaaggcaggaggactgcttgagcccaggagtttcagaccagtctgagcaatgtaggaagagcctgtctctacaaaatatatatttttaaaattagccaggcatggtggcatgcatttgtgatcc

SEQ ID NO: 154582 - DNA, 1014 bp, Homo sapiens
  misc_feature (1)...(1014): n = a,t,c or g
ggcaggaggaatacattcgaaanggagaaatcggtgcaggactaggggccagggaagaaaatgcagaaattctttgtaccgccaggtgatggnngttacgcctgtaatcccacactttgggaggccaacacgggcggatcatgaggtcaggagttcgagaccagcctggccaacatggtgaaaccccgtctctactaaaaatacaaaaaaaaaaaaaattacctgggcgtgntggtaggcacctgtaatcccagctactcaggaggctcaggctggagaatcgcttgaacctgggaggtggaggtggcagtgaaacggagattgaaccactgccacctcagcccgggtgaacacagtgaagactcccatctcaaaaacaaaacaaaaatcttgaaactgtctcaaaaaaaaaatcttgaaagaagacatagcggggttcttgaaagaagacacagagaaggctcaaggcttctctctgccttgcctcaggagacctggtaccttagctggggctgcaggtgtggagctgagaatagcttggggggtggctgtttttgaaaggagggtgtctgtgcaaatatcacacccagaatttttctcatgttgcgccttgcatcaagagtcccaaagtcctccccagccacccaaactcgtttttctcacttttggtgattattctgtgccccaaatagtgcaactgagcaatgaggtctgagaatgaggaatggacctcagccgccatcccctccccacctccagccgtggtttccgggcctcagagagacggggagaagtcgtcaagtggcagctgatgaaatttggggaagctgtggatttgggctctggatggtcagagaggaggcctctagctccctccaggacagtggttctgtagtcgcgcgaagttgcccaaagaaggtggcaggaggactttcattcgaaaaggagaaatcggtgcaggactaggggccagggaagaaaatgcagaaattctttgtaccgccaggtgaggtg

SEQ ID NO: 154583 - DNA, 360 bp, Homo sapiens
ggcacgaggtaccactgggtagcttaaagagtatttatacactatctcatttgattctcacaacagtcctggaaaatggatgttttaggtatttctacttccctctgttctccctatttctctctctacaccctcttttctttccccttccctttcttatttacctcaatataggacaaagtacgtgtaagccaagtacgtttaacatcacgccatctgataactctcaggtctgccagtcagtgttccttctttttccttctttcttgtactctttcttctcttctattgtcttttcttcttcttctttcactctcgttctcccttctctttcttctccttaatttattctctttcccc

SEQ ID NO: 154584 - DNA, 1056 bp, Homo sapiens
ggccctactgcaagtagtaacagtaaccccgtcgaacagggttctgcaataggtgaactctctcacatgtatatttcatttattcgacccgaatagttaacaaagtctctggcagcattgcttagcgcatcttttttattggtggaatttcccatcccacattttccaagtccatgcacatcaccttcaggcatgaatctatgcccgttggggctccccactgctctaatttcataggatggggtcatcttccttttgccacaccaggcatacagaaaatttttagcgtcacccatgattcaagtgtcttcttcagatcagccttcgcttcctggtgcccagctcttaggaccgtgtgtgactctggccttctaccgagacaattgagaaacgcacagcaactcgcatggaggaatcggcgaaatggctccgaccgcggcgctagggggcggggccagcgagcgtacgcatgcgcagagcgcgtgccagggcgggggatggcgagggcgcgccaatggagggggcggggctcagcaacctcgcggcgcggaagggtttcgttgctagggagatgggctgagccgggcgggcatcgcgccagacctgctactctggataatccactctcctggataatccactaccctggataatcggctgcccgcttttgcgcatgttagggagttgacggcctgtagcattctgatgcagcaaaatatttcgcagggtctgtcatagggatctccggtgagaggaggttcccttcgaaggcagaactggaaaccttgctgctaacttggtagggttgttgagataattacatgagatggcatatgaagggcggcttagttcaatacctggcatgtagtaggtgttcagtgggcgtagttaccggattgattcagatagtctgaacgccagtgtctcttgaaagaaataaactggccgggcgtggtgactgtaatcccagcactttgggaggccgaggtgggcgaatcacttggggtcaggagtttgagaccagcctggccagcgtggtgaaaccccgtttctact

SEQ ID NO: 154585 - DNA, 441 bp, Homo sapiens
acacaactgtgtatgctaacgccctcaaacatacaccatggtgcacctgactcctgaggagaagtgtgccgttactgccctgtggggcaaggcgaacgtggatgaagtaggtggagaggccctgggcaggctgctggtggtatacccttggacccatagggtgtttgagacctttggagatgtgtccactcctgatgctgttatgggcatccctaatgggaacgctgatgggatgaacgtgctttgggcctctatcgatgggctggctcacctggacaacctcaggggcacctttgccacactgactgagcatgactgagactagctgcacgtggatcctgagatacttatgctcctgggcaacgtgctgatctgtgtgctggcccatcactgtgtcggagaattcagcccatcatggcaggctgcctagtacatagtggg

SEQ ID NO: 154586 - DNA, 492 bp, Homo sapiens
aaaggcttagtgtcgccattgaataaatagcagagaatcttacagagtcgtccctttgaaggcagggttaaacagggtgtaacttggctccttcagttggttggtctggtctcagaatcacacattggtccagaattacacttgccctgctctgaagaagaatgccacctgcttgtcagctttggagtcaacagccctgaggactcaagtccccttttgacagagtggctctggacaagtcacttgcctttccttctccattgtttgtttggggcgtctggacgagggctacaaacagttcctccctttgtttccacggccttgcagaatgtgtgcttccctcaaaagggcataaaggccccctttcttctgctctcatgcgccacggggggttgttctgcagggctaagggtgtacaagctgaggtcagcgccaagctgtgactgagcaggtcgtacgcgtggatcaagcggggagtccgcacccatgctt

SEQ ID NO: 154587 - DNA, 433 bp, Homo sapiens
cgcgccggaatttccgggtcgacgattccgtggtgacaaagctaatcgaggtggcaattggggaaggggttctgggctgccgcaggcacacaggccagagcttcgtggatacctgcagggcccaaaggtccctccctgttttgaagagtgagtgatggctatgaggtagcggccaggctgatcacccctgcgttggctggaggcagaattctgtaaatcctcgccaagtctttctccaggccactggttagctcatctcagcctcctctgggagcatcaacaccaacatggcacaggggactgcagtggtgtgctttggacctgtgtacccacccaaggctaaaggcagagccaggagccaagttacaccctgtttaaccctgccttcaaagggacgactctgtaagattctctgctacttattcaagttgag

SEQ ID NO: 154588 - DNA, 450 bp, Homo sapiens
gcctcctggccaaggagcccagcaccagccttttggagaagactctgcagctcccgaggaatggaaagctgttagggaagggaagggggacgttccaggccaagggaggggcacagggaagtttgcgttaggaatttctcatcagaaaaggagatgtgacgggggagaatggattccaaacaatgcccaccacaaggcaggcccaggaacagggccaggaaagggtaggatgtgatgtggtatgtgaagctatgtgaggctgaatctgctgccttcagggggccacactttctaatttgttccctttccttccctcacccagattctctgctacttattcaagttgacacgatgcccttcacactccacctgaggtcccgccttccctctgccataaggagtttgattctacaaaagaaaccaaacatcagaaatacatccagcatggct

SEQ ID NO: 154589 - DNA, 459 bp, Homo sapiens
ccagcttttgaaagattctgccaggtcaacactggtcctctacccctgctgggccagagtgagccagaaaagtggatgctgccccctcaaggtgctatctcagagaccaggtaaaaagcttgggttactgtgggttgaagcttgggagtgtccaggtgctgtagccaggtgtctctgtcatccgggacctctctgtccagcctcagggaccttcacagtgcctggcacagaacctcactcatgactgttgctcaggaacgagctgccctccccactgttctgactccttcccctatcacctggcgcctgtcctggctgagatctttgagatcatggagaaagtccagccctggagaaatcccactggctctgccatctgtccactccatcgcccaagccagaaacccgcctgtacaggattaagaagaaaataaaaaacacttgcattaccaacaaaaa

SEQ ID NO: 154590 - DNA, 2463 bp, Homo sapiens; identical to SEQ ID NO: 122091

SEQ ID NO: 154591 - DNA, 832 bp, Homo sapiens
tcccgggtcgacgatttcgtagcggatggagctgctacagtcagtgtttggggttggcctcagcttgcagacccgagccctgcagaacaaccccccgtggcgcaggagagcagaagaaagggggcctttatgcccttttgagggaagcacacattctgcaaggccgtggaaacaaagggaggaactgtttgtagcccttgtccagacgccccaaacaaacagagccaagttacaccctgtttaaccctgccttcaaagggacgactctgtaagattctctgctacttattcaagttgacacgatgcccttcacactccacctgaggtcccgccttccctctgccataaggagtttgattctacaaaagaaaccagacatcagaaatacattcagcatggctggaggagctccgaccagccagcctggtggtcctgcccaggtcccttgctccagcttttgaaagattctgccaggtcaacactggtcctctacccctgctgggccagagtgagccagaaaagtggatgctgccccctcaaggtgctatctcagagaccagcctaagggacctttcaaagtgcctggcacagaacctcactcatgactgttgctcaggaacgagctgccctccccactgttctgactccttcccctatcacctggcgcctgtcctggctgagatctttgagatcatggagaaagtccagccctggagaaatcccactggctctgccatctgtccactccatcgcccaagccagaaacccgcctgtacaggattaagaagaaaataaaaaacacttgcattaccaacaaaaaaaaaaaaaaaaa

SEQ ID NO: 154592 - DNA, 4444 bp, Homo sapiens
acatcatacgccaagcttggcacgaggcctcgtgccaagcttggcacgaggatggagtcacaaaggtacacgtcttagacagagaaatcaaagttaacatctttgatatggctggacatcccttcttctatgaggttcgaaatgagttttacaaggacacacagggtgtgattactggtctatgatgttgggcagaaagactcctttgacgcccttgatgcgtggctggcagaaatgaagcaagagcttgggacctcatgggaaacatgggaaaatattatatttgtagtttgtgccaacaagattgattgtaccaaacatcgctgtgtaggatggaaagtggaaggacgtctttggggctggaagcaaaagggttcctgttacttttgaaactttcaggcacaaactgggaggagggctttattgaggtgtttccagaccttttatatatccatagttgatttatgtgaaaatggcgggaaacgccctaccaccaatagcagtgctagtttcaccaaagaacaagcagatgccattcgcagaattcgaaatagtaaagacagttgggacatgctgggagtcaaacctggggcctcaagggatgaagtcaataaagcgtatcggaaacttgctgtgcttcttcaccctgacaaatgtgtagcacctggcagtgaagatgccttcaaagcagttgtgaatgctcggacagccctcctgaaaaacatcaagtagaaagtacagaaaaaagccacatgtgggactcaaatgcaaacagactttccctagaggtgaaataaccaacggggaggttttcttcccaaaaatctcactgctcttttcattcatgtgttggcatttgtatatcagtaattcaggtacccatttcatagacattttactgagaaatgacctgcatttgtatgaagtgaactgagcgtcacaccctgtacttcatttcatatttctagataattctgaatttttttctcattcgtcagctctgtaattatagtatcacttagacatttcacttggggaaatccacaaggttcctggagggagggaagagaggacaaaaggaccctttcactttttcttttttacggaattcatcatcagagaagaaaataacaaaaatggaagcaaacaacatcagaacccctgtaagtttggtgtgaccttacagacaagttgctgcttttacaatgagttccttaggtggtattttaacccatcgatctaataatgatgaactcctgggccaacccctttgggaagttttgtaaaaaatgaaggtgaataacagttcctgaaattgagcaatccccttttatgaatattcactctgttccctcttctgcagcccacccagtgggagagacaagcccagtccctaagagaaaaggtggtggcagccacaaattctaggtacactggctgctgccctatcctgtcccctggatctgaggcctttcccttgccatagaaatggttgctggtagcagtagagagcactgtgcacctgggaatgaggaatcaggccccaagacagaagtacttggaggagccagctgcagtagtatccgcctgtagtcccagctactcaggaggctgagacaggaggattgcttaagcccaggagctcaagtcccacctgggcaacatagtaagatcttgtctcttaaagaaaaaaaaaaaaggtacttagaggtcgcacttaaagattatgcacatcagcagaggaaaggccagccaagcttggggcaagcttgatgcagtaggagagactccttatgaggcttagcccttgtcttactgccagcctttgccacaggcaggtgagaaaggcagggccactcctcagcaaagttggcctcttctacacttcctcaccagtgttgtttcttccttttttcccctcttccccttcccgtcttgtgttttttctgaaccccacatctgccatcatttctctcctctagagtccctggcttctggccactgcctcctccctcttctaagccttggcctgaatctggttgatcagaggcaagtgtggatcctttgggtggcagtcaggggagatctcagggcctctgttgggaggaatctctgtaattcctgcttgggctccaaatttctgaagagtaatatttttaaactatagcttacaaaatacattctctgaccacagtctcctccttgatatacaagggatggatgaagttcatgtattaggactggcactccttacggtgcttatagaactagtctcaccacttgactcattacgtcgtcattcttgttacatcactcatacttttagctgcaaccacactaattcacatttttatatactttcaattagctgtactaattggggcttgaaagtatataaaatcttcctgtcctgtgaattttaaaaagctatcccatatcgattgccaaagagcatctaccttacctcctaagaagaaaagccactttcttccaatccaagcccactgcagccttgtggattttccacacagcagcttttcactgtatgcctgtacttgggctgcactgagcttgtcttcaggaaaccagagcgttgctttatcatcgcacttttcatcttggtaatatcaaaacaactttttaaatgaactgattgatatatgttatttcttgcgaggttttcctctggcctttaactggcttctgaggctacagaactccaacccagagttcttcgggacctaaattttgcttaaggaaggcctttatcatgctgaaagcactcagacatgtctgtcctcacagcagaatgtagaagtcatatgaatgagggatcgtgcacggtagcgtcagcccgaattgacacgacaactctgaatgtgtggcccactatgaaagctggtgccagttttcatcactgttattaaatactagattgggaacctcattcagccgtattgcacagatgagcaattacagcagagaaaattcattagtgctcccactcatatccttatgtgtgagttggtgaaatttagcctgagcttgattcttaggtcttgagactcagtttccaacaccttcattattaatgttaagaatggccatataccacttcatttacgtaaaaggaataaaataagcaagttaagcttcagggtcctagaatttttctgatttctataatccttcagcagaatattaagaaataaagcatgatctgcaatggaaaggtttttttggcactaacttcatgcagaatttcacagacatctatgcattaatttaaattcttggtgcaaatgtgtgctttgtagttcaaccttattaaaaattcttcagccagttaggatttcaaaatacattagtgagagtaacagctagcagaataattacaatggctaaaacgtttttatagagaatcttgtttttcaaaaaagaataaaaagtttgaatagctattattaaagaaaagccatgtcttcaacatctgagtcaccaagaagtaacactttttaaacttgttagaaatccctggaggcatttccaaattccatcttctaacctaccttaggcacttttaaaatacagcctccttcgggtccctctggttcccccttcaggcctccttttggaaatggatatctcagctgtccaatatttctttggacttccagccattgttattttatttctctatatcaatgtgtccttagttttcttagcctgttaatttaaaaatcccagacttgggggtcattgtgttgcttacccaagagaaaaatgttacagttttatagattgcacatcattctttaaggcatacttttacctcaggaaacttactctagtatgttctcatatattgaattctcaactaagtaactatttctttatacctataaactagtacctaattcactgttagttaaatgagctatagataaggcagctaaattttctgaaagatagccagagtaagtaagcagccactgcaagctctgaatcagttttttaaaaaaaaagaaaaaaaaaaaaaaggagctgtgccccattgaacaatgacaacatcacaaggggaagggagggattttgccaaaagttagaaaggtggagctgctaggccatgtgcttgttgcctttgacagtgacagtgcgcgtcttacaactaattccactaggcatggtaatgtcaccttctttgccactgtaccctatcaagcttactctgaatcaaagtgttttgtagaacttttgaaaatgaacattagcttgcctatatatgctaaccactttccattgcaagcttctctattgactctcggtctgttctttatattactttcattatcctctttgtatctctagttcactatctcttgtatatatatatattcatactcctatatttcttttctttcattttcatctattatgcttctct

SEQ ID NO: 154593 - DNA, 529 bp, Homo sapiens
acagctgacagatcagtccaaagtgttctcatccatcccacgactttctagatgctcccagaagagtcatggcctggcctggccctttttcatactgtcttctctatggtttgcagacaccggcaaaggaaagagatattgctgacccatgaacaggagggcacgcacatcccaggggagaaagctgctgaaaagctgtttttcaagttagttttctgaagctcaatttctggctaacgtagccataaaggccatattatcagaagaaataagtgaaggaaaaggagacagaagaatgcttgctgaccacaccctgatcctgaccgagcgaggttcagaaggtccttgctgttagccccaggaggtccgccccactgtcttatctgagtggggctgcaagtgtgcacaggccaactgtgaatgttccccatgaccttggcctcacaagtccagagcaggtcactttccacctctgtccttgggcaagctgctctagtctccttcaagggcacattgccccaactctgca

SEQ ID NO: 154594 - DNA, 1456 bp, Homo sapiens
gctatttggggcctgctgtcaggcagaatgacgttttgaattgggctttctgcccttgttgagttttctcttaagtaaagtccaaagtccaaggggcagatggccagatgcactgcccagtaaggcaggaagccaaagaggcagtgcccagccccacaaaggctgcccgactccctgggacagtagtgtggagtcccagcccaggctgacctcacaccggagcttcctagcttcctttctttgctcaatgcagggcttcttgcaccccctggaaagctaagagatttttttcaaccctaaaagagagtacctttcactgcattggatggatgaacatcagtgccctaactttatccatcatgtaggtcagggaggactgggcactatttggcaggatgtactccaagaatataatcaaaagaattttctgtacaatatttcacttaaagacaagtttttgggctggatgtggtagcttacacctgtgatcccagcactttgggaggctgaggtgggagggtcgcttgagcccaggagttctaagacaagcctgggaaacatggcaagatctcatccttacaaaaaataataatggtgtgtgcctgcagtcctagctactttgggtggttgaggcaggaggattgtttgagcgagggaagttgaggctgcagtgaactatgattttaccactgcactccagcttgggcaacggggtgagaccctgtctcaaaaaaaaaaaaaaagttttctagaataagcaggatgattgtttaatttggaagatggaacaggaaactagagtgcatttaaaatactctgtcttcattttaacatgttgaaagggaaataaccgccatatccccccatgagtttgttttgccttttccatacagacttgtatgtgtcatttgaagtggtttcccagattggagcgaggttattctgatcctaaatgaacagcatttttttgccttagcctctgtttgcccactctgggtatcgtctcctatgggcaaagccattagaaatgcataaaacctcgagacatggtttttggcaaaaactccatgactttaaactagctcttttactactgacctttcacaggggaaaaaatatttcccttgaaaaaaaactggggcttggtcatttttttcccttgtagctttaagcagagacataagtgcccttgccattacacatagtaaactttcttttaaaaaaaaaaaaaaaagattttggagactaccagggtaagattccaacttgtccaaaagctttctggccttacatattttattataaaaattctcaagtctggtaatcttctatgtcagagctagtgatttcaaaaggtttcacaattccccaagacaaaagtgattttcgttcattataataaggttaagtgatatgtgattcatagcaattttgatgtgaagaaggggaggacatc

SEQ ID NO: 154595 - DNA, 1427 bp, Homo sapiens
  misc_feature (1)...(1427): n = a,t,c or g
cgagtggctgccccacaaaatgcctgcttctctgcggaatcctactgttcttcacatgctctctaataccatgggtttcatatccactttctcttgcatgttgaaaaattaaattgacaggctggattctgcaaagatctttggacatttaagtatcttcgaccggtgcgaaaagaggcggcctgaccttgtaagtgggacggggacctgcagcgggtccttccggcgggtgacattccagccggcggttccggggcgaacggactctcccattcccagaacccatggccccaattttgtcccgtaaacccttgtggaaaaaaaacccccggccgcctggtgaacgcctgcctgtgaccttacctcgaaaccctcgattgggcccacaattttggtacctacgcccaaggttgagcctggttccctccccacccctgcctgagatcccctagagcctattcagagccctgaaaaaaaatagtcaatagtgcctcagactggtagctttcaaacagcttcacagttaacggaagctgtgcctgaattggttttggtggcccactgaggtgtttgatgtggtttttatggtccggagagattatagggcaagcgggggcattcattgggctatggatgttttgaagaccattcttttaacatctgattatatttgatttattattttgagtgttgtttggaccatgtgtggatccagactgctattctngaattaaaataagatttgtcaaaactcagtgttttctccatcagacactccatgaaaggtcacaatttctcttgatattaagctgggttgtctttaaacaaccctaaatacacgtctgtttagcccgcaattggaaaggatatatgtggcaatattaacctggtacatgaatatatggggataacattttaatttgaaggtttggaatatatatatttaagctttatttcccagaacagtgagggttaggtcttgggaaaactataacttgcccaaagtagaagacaatagtagtaccatatgcccaaagtggatagagatgaatccatgtcagtaagttagaataacatttcaactgttttctttgctaaaatccacagaaagaccctattgacaacatctaatgtctgtaaaaatgttagagtacttgtcatcttgaatatagcctccccaagagagaacagggtggtattctaagtatgtttctttgtaacatctttagcagtaggacagagccatacgatgtgaaatctgatttttatgtgtgttattcgtttgtctggttttactacctttgcaaaaacaaaataccccaaagatatttaaacaaggttataatttagcatcttccctggatctaaatagtatattatatcctgaaataaatgaaatgattgctattaaaaaaaaaaaaaaaaaa

SEQ ID NO: 154596 - DNA, 3011 bp, Homo sapiens
cttcaccaaacacacttgagaactgtaacttcgtcaagcactttctgtcctgaagcttttaccagtatctgctgtcttttgtaattatgcatcctagctaaggcacagaagactgaatgaatgcaaggattcattaactctttgaatttgttaaatactaacagttaaccattagaagtggttcaatgatgtaagagtcacactgcttcaactttttctttgttgtagtttttaaattgtcgatttttagctatttgacagattaaaagcaaaataatcatgccatatttagtcctggagttcaatgtctaaatgttggatgtgaaaaattattgtagtaaacttttaatatgggcaaagcaaccttaagctctattttagccaaatgaaacataatctgaaattatattagaacatttcccttgtcttcaaactgtttggtgtaacagaatattgatatgccagcttggtggatttcaccaggttaatgcacattcttcttccctcctccccccattaatatgtatactgaaaaatgtgcatttgtctgaggaattattttgtttgctaccacttaatgaatctcaaaattttgagtaaatgtacctcagtctaatcagacctttttatgacctttataactacatttaaaacccttaattcctatttctgggtgtttgcgagcctgattgctatcatggaagtaaaaatttattactctaggtattcactagctaaataaaacatagttcttgtttaggcaagcatatgttgttccctcaggctcttttctccagcttttgcagtgtccgggcatccttaaaatactttgaaaatatgggccttgatccatggattaaatccagtatcctaagtgaatgtgttgatgttttattgatccagatctatataagtgggggattacagcatatatctggatattcttatagttatctttttaacatccttatttttttcattaattacatatcaacattaattttgtatcctggaaggcaaattgattttggtataatttaaatgtgtccaaggcatctgtattaattgatttgatgggcataagggttatggaaaataatgtactgccccatggtattactgttccaaaaggagaaagccatgtagaaagataccattaagggtgaaaatagccaataccagtagatttgaataccctgatgttttgccattacttcatttatgtttaccatccatgtttagaaatgttttcatttacctgtggtcttttgtcactttaagctcaaagacctagtgatggatatttctttgaggctttcatttatataattttattttgtacaatgttttttttaaatgtgcaaatactgtattcaagtgaaaaaaatacagtatttgtagataaccatagctactacacagttcttcggtagtcccagtgtagttatatcagtgtttactgaagggaacatcaaaatattaatggtatattataaaataaagactttcttaaaggaaaattgcacctattttacctttttaagagtaagccatgaaatcttgtaacatgtctcttaactatttataatgaaaagtggcatttggggtatagtcaccacagcaatgttctacatccctaaggattatctaaggtaggacatgtcaaagatgactgttgtcattctggaggtccctattagagaatattataaaaggggtgaccttggtaggaagggatctgagtcctccccctgaggttctctttttcttggtgctttattagcaactctgggatatttttataaaactagttacattataaacggggttcaaacatgtttaatttacattaggtttttatgtaacgagtgtcatgggaagcactcagccaagcagggctggattggcaatagactcagacatgcggaataaatgtaattgagagtctattcatggtgaggagtacatcaccagtgcctttaacctggatttctaatcttaagtgaaatgggtgcagcattcctttggaaaaaaaaaatctttttattttcaagtgataattttgtgtttttctcatataagttttctccagagcacccaccttctcttccttcttggtctgtcattatattgcaaaatatttttcctctgaatgaaattatcacaggttggtctcaagcacaaccaactgaatgtctctttaactgtggggaccaaaagggagagagcctggggtctccaagaggagacccatcctcaaatgtttgaatgatcacaaattaagacattatcagcccagtaaatttcttgcttaatgtttttccaaagttctggcttgaatatttcttattaaagctatcttatgtgggtattttattttgaaaggtattatagtttgtatatttaacagtaaggaggaaactgtaaccaaaattagtatttctctatacgtattggtacttgaagattcctttcaaaagaaatcccagcgttttcctaattttagtacttaatttctctttttaatttaaggggatctttctaattcagaaagctgtgttctttttggaatacccgtgcatgggggttaagctgatgttaaaaccagtttgcaataaaaaaaaaatgaatcagccttaaagtcatttaatcatttccaagtgcaatcctgcatccctttaaaaaataagtttaagaaatttaaagagaattgtgttttcattaagttttgcatatcttttgttatgcccatgtaaattccctttttccgtatggattaaaggaaggttatgataaaatgattagttcatttacattcacttgtagcaattacatgagaatttgaattttgtcgtgtttgggtttgttcattccttgtgaatgatggtacaagttaggtgagattttcttgttatggtacccaacactcaccaatttgggccctctttaatctttggggggttccaataaaaattggttccctcaaaaaaaaaaaaaaaaaaaagtcgacc

SEQ ID NO: 154597 - DNA, 523 bp, Homo sapiens
  misc_feature (1)...(523): n = a,t,c or g
acttacgctttaaaggactcccaggcatggctacgttctaacgggcgggacatagagcaccttctatatgctgacagtacatctcggtcgtggacacatacttgttgatgccgagactggctactgctatcattctctggatcactaactgagtctttgaaaaacgggttgctcattttgggtatcactgtagtctgatggtgagagataggcgcatctctggagttgatcgctactatgtgtcaaagggtttggagaacattgattaaggaagcattttcctgattgatgaaaaaaataactccagttaatggccatctacccctgctagaagggttacagtgtattatgtagcatgcaatgtgttatgtagtgcttaataacaataaaatgaaaaaaagnnnnnnnnnnnnnnngggcgggaagctttatgatgcttgaaggggcccaaatttaaggggtggtcgggcacccctgctttatccctaatgnggagcctgtggcacgccatgtggggtttttt

SEQ ID NO: 154598 - DNA, 2349 bp, Homo sapiens
ggtcgacccacgcgtccgggaagaggaaggggagggatgtggactgggtctgatcacagcccttggccctgcttcatactttggagcttattaagatcaattttgataaccatgtaatttcttagaaccatggcaggtagtattgtgctttaaaaaccagaggctcctgaaagtcgtttacaccaggtggattgataccatggctgtagctgatgcaactaacaagtactggggccagtgatcacaatccagggttggaaacaggagtgaagcccaccagcctgcctggttgatggacagcaggctctgccttctggaggcggcttatatcccaacagcctgaggcagggctctgtgggccaggccggcaggggctgcctctcttggttctgcatggtacattttgccaaccctgaggaccagttcttggggttccaggcctcgggcttcctgcttcacgtgctcaagcccccacagggggctgcgacaccatctggctcctcacagggaggtccagccatgttctctgggctccccagtgagccccctacccctccggctaccccccagaatcccatccttcattcctccaccaagctcctgtgtgaagctgcagcgcccacacgggggaagccctgcactcccagcagcatcttccagccttggcacagaactgatggcaaaggaagggctgggttttcagcttctgggacccgaggaagaccccacctcactcctccttccccagtacatcagactggttaggaggcatcccagaaggggccagccctcatgccccccggtttccagccccctaaaggtaaatgaattgtccttgaactcctgccttggcatttcgcctcggaatcacggcagacttggagtgtttccttccaaggcaggcatcctgccttatgagccaaggtcaaagatttttcaaaatattgtgcattaattcattaaagctactgttaaatatttgctgtttttagattggcgtccgtgctaattctgcagttgtagcactgtatattttatctcatttctgtgccaagaaagttcatctttatgtttttctaatacacaatcttgatcatgtttccaaaataaagcttcagctcctttggtcaatagaagtaagggtgtagccatccagggtctcccgggctctaggcagaccggatcccgcggttcatcccatggttgttgaaatgtacctcgatcagtcatctctggtattcctcactctgggccatgagccattgccatcttatggggcccgatttggggtactctggaattatgttcatgggagtaggacagttactttcttaaatcccaggcaaccaagttgcgttatccttccttataggcttagttttctattaggaggaagtgaaaaaggaaatctgggcttctttaataaggatagttgagcctatggacattaagggagcagcgctgctgggcgggaagattctagatttcactgggtgggtttaagagacccagggatttagttcttactggtgcataagtgttttcccatgctaaccggaaaaccactcacccaggcttcccccacttcccctcaaattttctcagctctgccgctggtctccatgaacggcaaggggaaccaccactcattcactgtcagtgtaggtaagacagaggatgcccttgcaaaaattggggactgaggacagtagcacacggaattggtggatcgtacatttgcacccagagctactaaacgctcagtgaccccagagaccattaattttcccagagtgaaggggatgggggtagagcctaatgggaatttttattatccaggactcatccctaggaaagaatgttggccttctcttccatcccctggcttagcccgtcaggtagaacgcctacctcaccctgaacacccgaccttccttagagaaagcgaagtccttttttgaaatggaggagccgaagggtaaacccccacctagggggcgccccatgatcggctccccagtgcacccccccctaagggtaaagcaggcccgccatatcctagagtcctgatagtcctgtgtgtaccataaggtcctagaagtcctgtggaaacgcccctgaaaccctgtagtattatccttaactacccctcttatgttaaggtttacataagtaggatttctacaccaatgcgtttaattctctacgatctcttcgtattaaaattctcttctggaataagctgtgggaaattttgttacaacctggttgagatcaacctctttacaatgacacaaattgtgacattttataaattagatacttcagtgaaaaaacacaacacaaaac

SEQ ID NO: 154599 - DNA, 395 bp, Homo sapiens
actcatccacctccggctgaagctccaggagctgaaggaccccaatgaggatgagccaaacatccgagtgctccttgagcaccgcttttacaaggagaagagcaagagcgtcaagcagacctgtgacaagtgtaacaccatcatctgggggctcattcagacctggtacacctgcacagggtgttattaccgctgtcacagtaagtgcttgaacctcatctccaagccctgtgtgagctccaaagtcagccaccaagctgaatacgaactgaacatctgccctgagacagggctggacagccaggattaccgctgtgccgagtgccgggcgcccatctctctgcggggtggtgcccaatgagggcaggcagtgcgactacaccggccagtgtatt

SEQ ID NO: 154600 - DNA, 928 bp, Homo sapiens
aattcccgggtcgacgatttcgtgcggccgggcggatccagcgcagccgggagacagatgcgaggcggcggtcagcaggtgccgaacccacggccaggcttccgtggccagcagccctagaggaatggccatcctgtccctgcgagcccctgggccctggcaggcgatgcaggtgggatgctatggaatatgatgagaagctggcccgtttccggcaggcccactctcaaccccttcaacaagcagtctgggccgagacagcatgagcagggccctggggaggaggtgccggacgtcactcctgaagaggccctgcctgagctgccccctggggagccggaattccgctgccctgaacgcgtgatggatctcggcctgtctgaggaccacttctcccgccctgtgggtctgttccctggcctctgacgtccagcagctgcggcaggcgatcgaggaagtgcaagcaaggtgattctggagctgcccgagcagttcggagaagcagaatgtattccgtggtgcggactcatcccacctccggcttgaagctccaggaagctggaatgaccccaatgagggattaagccaaaacatccgaagtgctccttgagcaccggctttttacaaggagaagagcaagagcgtcaaagcaggacctgtgacaaagtgtaacacccatcatcttgggggctcattcagacctggtacacctgcacaggtgggccgagacccagacgaggagtgaggaatgagagagaccaaagttcctgcctccgctgggctcacattcagatctgagctatccagtgtggtggccactagccaaacatggccagtcaaagttaaattaactaaatatgcatttcctcgttgtactgtctacattggacagggctgttctggatgagaaattaaactagtgaattac

SEQ ID NO: 154601 - DNA, 1632 bp, Homo sapiens
  misc_feature (1)...(1632): n = a,t,c or g
tggtctngcaaattccgggacgacccacgcgtccgaaggaacagcagtacagtactattagaagttaagtttgttgttgttatttcacatttcatttaattgtggataaatgttagacatctgttgaaataagctcatatggtggaaacgacaactatattatgaattattttcagaaatggatctttgaatagcagatcaggatttaaataataaaattatctatgaatcacttttatggtcatacatatatgatacaaatccagagttattggtgcagaaatggctacccgagagcttggtaaatttgccttggtttcttatgttaaatgtattgtgcttcccttctgtctctagaatgtggctcttcagaagacagacaatcgacatttaaatttttccaaacaatgaaaaactaaattaaaaacattgcttgatatttcatttaaaattgcaccttgcttaaggtttactgaataactgaaatgtcagcaatttaaaataaattcaattgtgtgataaaatatctcacctataatagaagaaaaggaaaatcatattatttggcaattttgcagcattgtggttgcctaacaggtatatccagcagatgagaaacagtatgaaaaggattgtattaacatggtacgttttgccctaaggaaaacgatcttgcattctggattcttgcagcaaagtctcagatacttaatacgttttcttgttttatcatctgttctatgattcggcttcactttgtgtggttattgaattatgtaacagagatttggttttcccaaaatgttatcacatttgaaactatgattgctttgtgttcagtccttttggaacacgtagcttccagcttaagggtagaggaaatatatacctaaaatcatcaatacatgaaagaaaaaggatggaaactatgtcctcagttttacttctaccaaaacatccctgtatgtgtgtgcatgtatgttggcgtgtgtgtgtgtgcatgcatattagtaaatgtgtgtctgcatgtgtgtgttggggagtgtatgtgatctgggtgtttgtttatctctgttattattcccctttagctttattttagtcaactctacattatgatgaatttcaaaatgaagctgtattaaaataattgtaatataacaattcaatctcacatgttactgcagatagttaacttttgctgcaatctattgtacatttgcaattttctgtgttagtaaacttagcagaatctggttatttatttttgtgtaggcttaatgttcactgaaagataagtcaattactgttagtaaaaaattaaggtactctcactgcagagatttaaggcctgggcctaatgtgctgtattatgaagccttgtgactgaaaaatatgtttacatatgttgtctatttttttaataaacttttatagctggtctatttgctcagtagctttgatcctctcttgattattgtgactatagtttgcaatggtttattttgtattcaataagaaaaattgtgttaataaagattattgtttaataagccaggtattaacctgctaaatatattaaactgaaaatcactaaatgagtcattcaattaaatacatcaaaaaaggtag

SEQ ID NO: 154602 - DNA, 1607 bp, Homo sapiens
aaaaggtttaaaacatttatcactaaaaatactaaatgttctttgaaaacctattaagacatttaaatattcttttatgctatcaaaagacattaaaatattcttttacgctgatcaaaagaaagaataaaagtttaggaaagggaaaaatgcacactttttttaaaaagtttatttctagccctgaaagaacaaaattattgaacaaagtcataaaatacagcagttaatgtcaatgtataacaattaaataattgaatgggattaaattaaaaataaaagacattataaaatttgaagacaacagaaaagacaaaaactacttttggtttatttccatttctattaaaacaagaaaaaaaaaagccaatcgcgttccaaccaaagatgttgaattccacacgtaactgtttctcttattacttctgttctcttagaaacacttctaagttctaagagaacagaagtgtgcttgacagaactatcatccatttctttctgcctctgtcttggcagctttctagagaagtgaatgggaaaagactttcggttctttcaaggccaggcccagcgcttgcctcctcctttcggaaactcccaaccctcatcccacccacagcacctttggcccagagtgttcaatcaaatgtgctgactgagaaaaaaggatcgtgtgtatcctattttttccttatatacacacactatcaaaaaaactgattttaccagtttccatacctactgttgggagcagcggagacaggaagacaatctgctttttgtattactatgaagttccactatgaataaccccatatgagtattaatctggattttagctataatctataatattttgacactgacatttcactagatgtggatctcagtatattttaaaagaatttagactcaaaaatggatgcaaattctttaagcatctattttgtttttttctaattttagctactacctgatcagatctaaaattattctggttagaatacagtatatacatacatgtatttaaggtgagccctaaaagaaatactcataggtggtttagaatcgcttgttagaggcacaggttcgtttacagttgctggttactagactgtacgcagctggacacttctatgttaaagggaagagaatgaatactatgtgccaggcagtcaacacatgaagacagagttgtattagcctcagtgtcttacgcttcacaaattacccgtttactttcaggtaggataaaatgtccccatgtttcatagtttcccagttttaattgtccctaaaagcagcagaagaaaaaagaaaaagagaagataactttaaatctaaaataaaataaataagtactataataatactgtcctaataacacaagaggactattaaggtaactttcagatttaaatgggaattttcattctaaagtgatgacaaaaagggtaaatataaaaggcaattatttaaaaaacatgaggccaggtgcagtggctcacgcctgtaactgcagcactttgggaggccaaggtgggcagactgcctgagctcaggagttggagaccagcctgggcaatgtggtgagactctgtctctac

SEQ ID NO: 154603 - DNA, 508 bp, Homo sapiens
ttctccaggcctgatcacttgaacggacatatcaagcaggtgcacacttctgagcggcctcacaagtgtcaggtgtgggttgggagcagcagcggcctgccgcccctggaacctcttcctagcgacctgccatcatgggactttgcccagcctgctttgtggaggtcgtcccattcggttcctgacaccgccttttccctttctctaaaaaaatcattcccagcccttgaaaacctgggcccagcacactccagcaacactcagatctagatcctgctttcatttctggctagtgaagtagacttttgtgtttttgaggtttattagcaggtctgctcaggaaccaaactaatgagtagctttatattgggccaccccaatatatggctttgggggctgaaaaagcagatgtagaccccctccctcggatccttattggtgtgccctttagcactccgcagactctgcggggtgaacaggagtgatgataaaatttttcattctaaaa

SEQ ID NO: 154604 - DNA, 1117 bp, Homo sapiens
  misc_feature (1)...(1117): n = a,t,c or g
gggagcggcngcacatngccnccatnggaacctcttcctagcgacctgccatcatgggactttgcccagcctgctttgtggaggacgtcccattcggctcctgacaccggcttttccctttctctaaaaaaatcattcccagcccttgaaaacctgggcccagcacactccagcaacactctcttctgcccagccccgccgggatatctgaggcagggctggaccaccccatagggcagcagggcctttacccagtggcctgttggctagcctgggcctccctggagagggttgacaagtggaagggaacaggaggggcatttggcctgagacccctgcttttgggagaggctagcagggtggttcctgcccagcatgcccaagctcctccctgggtgactcggagtctttcccatgtcagagcccccaaatcggggtaagcaaggagcacctttctgggaaccccctatagcatccaagtttctttctggggctctcttgcctttttcccccctttttcacagatggcacccctgggcatctgtccttgcctaggtgattttggaaggttgggtgccttccctgggaactagcccacccagcttatctgcttcccttccccctgggcatcacttccccataggccctggggtttcctagaactgggggcccctggcccacccctttccccccactcccacgagtgagtcggccctcccagagaagacttggcacaattccaacttagagtcaaccccatgcttgccctctgccccttccccactcaggatctagatcctgctttcatttctggctagtgaagtagacttttgtgtttttgaggtttattagcaggtctgctcaggaaccgaaactaatgagtagctttatattgggccaccccaatatatggctttgggggctgaaaaagcagatgtagaccccctccctcggatccttattggtgtgcccttttagcactccgcagaatactgcggggtgaacaggcgtgaagataaaatttttcattcttactcgaacccaatacctaaagtcaggtgtggaattttccacttgttacctggggtgctttttgttaggctttgaataattttcg

SEQ ID NO: 154605 - DNA, 1007 bp, Homo sapiens
ttttttttcatgtttccagaaatctcttttatttctttagatatataaaacactgttactttatattctctctgataattctagtatctgggtctagagtcaatctgttgcttctgctgggtctcatagtgtattgtttccttgtggtgtttatgaatttttaaacctggatctctcattttctttctttctttttttttttttgtagagatggggtctctcactgcgttgcccaggctgctctttttactcctggcctcaagtgctgggattccaggcgtgaaccaccacgcccggctgagatgttccttttccttggaacttgattcaacacaaaatcctgaggcctggtgtgggtgtgttcctctggggcagattctcaactggggacacttctgcccccaaggacacattttcaacatcctgagacatttccgggtgtcatcaccagtgtgcacgcacgtgtatgtacctgcacacgatactgagcacctacgcggatagagcccaggtacgctgctcacatcctgcacggagacttgacccgcccagcgtcctagggcaggttccagggcagggtttgcatgtgccttttgccagccacctaggaccctgccagccggggcctttaaattctcccctcgtggtctccagggccactcactagcctgatttcaagctgtataactgggaggtcgtatttcttttccccgtgcacggaactccaagcctgaaaggcagtttttccgaaggtgccagcctgactctcatttccgcttcaagctgcggggtccagctctatgtgggcggtctcctgatgaagtcaccccgggacagacactgttctgtctcctgcttccagtccagtaaagatgccaggatcccccagggcatggcaggcaccctcaaaggcagacgtggggaggccctggtgggcagaccccagcctgctgacggggggcttctccctgggctgccactggcccacccactgcgctgcagtccac

SEQ ID NO: 154606 - DNA, 1941 bp, Homo sapiens
tttttttttttctccttctgccaaaacaaactttattggcaccaaaaaggaaaacaaaaaaaaacaaaaaaacttcatttatatacagtcagatataaagacatctctttgactcctgtgcatatatttcctcaactcaagattagggcataaaagtcaggcttgttatgccagacatgctcttgccctatcggcagggccaagggagaggattgtcacttgaaagtcgggaacacttaaatcggatcgacagacaacactcggacccacagaccaagagcattcttctaaagccctgggacgtacgctccgaagcgaatcgggaaaggagcgggaaattggaagccaggggtcccttttcgttcttccatgtggaaggagacccagcctctttcatcaagggtatccaaggttaaactttccgtttccccaagcccaccaatccctgtcccagttcctttgcttcctgccctccccaaatagggacattctcctttggtgcccagcccccctttgcacagatcctcccaaggggagtccccatgatcccacaaggcagagaccttcataagcagagggcagggcaggtacacactatcctctcccttatgcatgggctgggacactgactgaggccctgcatcacaagaatcgccaatacccactgggaagccataaccaattaaatctgggaagtacggggagaacattttcaaaaagggggaaggatgggattccctttgatgcccaggggttacaggggcaccttaaaggcacatttttttttttctgagccaacttagctaaaggatcactgcagcttaaatacaggatagagaagcaacaaagccaggcaaatacccattcagagacagtgacaagagcatgctgggggcacgggggaggcggaaggaagagaaagaaggggaggagcctccagagtcccagccccaaccccctctgccattggctaacccttgctccccaaaaatccctgggggtttgaagtgagggaggacttacaggctgggggtgaaaattacacaaggacagcccaaacaaattacaaccaaggacttagcatccagtcctcccccccttaactcccaccccccaagaaaaataccccttatttgtgactagtatttatggaaaatcttgttaaggagacttattctattgtaggtgggctcttaatcccattattacacagcagcttgcctgtgtttgggggactttttcaaattcaggtgattgccggggaaacaaacaagtattttcaaccttccttacggtgcccatgcaggcttttacccaagaccttggttaagtccccagtcacatttactttctgtcttacatcctagaaaagggtgaggaaagaggggaggggagaaaggtgctcaggtgcctaggttaaagcttactggatcagcagccctagactcccaccactgttcccttctctttggtcctgtcctagaacagtgaactaataaattaaggaaaaacaaaattaatgctggcctgtgggaaataatgggggaaggaaggcagggaggaaaagggcattgggaagccctgcttcaagactgaagacagacaaatagacaaccacccagactgcttaagtgtcacagacagcccccaccccaagctcccttccaggtatccccataaatcatttgggcacactccctcttggaattgcaatttccatcttccacttatccctaaggagctggccctgtggagaggtgtgttggttgttttgtttttgccaaaggccctcgctctaggtgctcctgtaaaggtaccttggcccctgatacgggatgaatggatgaacgaagccccagatgctccagtgccaaggaggtcagaccgggaacaggcccccactcccacaccctgggatcggagcttgcttggctcttagca

SEQ ID NO: 154607 - DNA, 599 bp, Homo sapiens
ggatccagatggactgtgtactcctcttcccagcccaggcccaaatctcagctccacctctcattatgaagaccacacccaccatcagctggggcctggaacacatttgtccgtcttatccctggaatcactcccctagtctctaccacaggtatgcaatgggctttggaatgtttttccagagtggtccttgttcctcctgggcttggaaactttccagaactttacctagcttagttgttgccttgtcctctgcctggcccctcactaggggttgaaggttggatctaggtccacctgcccccagctcctatgtagggttctcctcccaagcaagtccttcccccagtccagcagcacaatgctagtgcctcctttgagtcttgtcactgaagccattctgccccagcccacaggtcccttggaggttcatgcctagtgttgacactgagcttgaatgtggccttggctgggttcaggggtcactctcccaagaaggtagccatggccccagctgactttcccttcctggtctctgatttaagaataaattcagttgcttcatctttcgaggcccaggccagggaagtggggtgggg

SEQ ID NO: 154608 - DNA, 370 bp, Homo sapiens
  misc_feature (1)...(370): n = a,t,c or g
tatatgtctgtattttttacacacatgcaaaaatatacattgtgggcacgtgtgtgagagatatgaatgtgtgcttatataaaaatagataaaggtaaccgaatgtattgtacaaacatgatttatttagttgagggtattggagttactttctcattgactctgatgtataaatacaccaaattaatcattatgttatcttatgttaaaaggctaactctgatatcatgtgcattttatgttaacctttggattaacttatattatgctatgttcataaaatgacatgagaaacaggaggttctaagatcagcctctcactttcgagcataaaaataacagagggagacagacagccccagacatgacn

SEQ ID NO: 154609 - DNA, 467 bp, Homo sapiens
actcatggttggaattcagcatattcattgactgctccatttcccgtctcatgtcaggatcacttgtgttgaccactttaggcagaagcacaaatatcaataaaggaagaaccatcatcataaccattgggttcattagaaagtctgtccagccccacgattcccttttaataaagtaagaaggtggacctgaagatttcatttggagaggatagggcagtctgacaacctctgatgttttgatgtaattcacatatcttgctttaaggaaaccgacgtgctcttctccgtctaccagcactcgggccgccgagatccagtcctgaggcttcacccctggaacaactgcacgcccctcaatcttgaagcgatgtcctatgccgaccccactccctcccgatccctcagcagcagccccgggcacctccgagctctggacatcccccgatagcagcagcagcagcagg

SEQ ID NO: 154610 - DNA, 1527 bp, Homo sapiens
tttttgatttctggattaagatgttttaattaatatacataatgtatagtagttcatataatttattaatggcattttctataggacactgtaagttaattgcagtgacatcaatgattgacctcatacagacaaaagatgaaagctgggttttctcgtgtaccaaagtacaaaacatgtgctaaaaaagttaacatacacagttgtaagagatcaaccgtcgggaaggacccaaagttaaagtaagtggcttcacccgggttttccaaagactggaatccccccaagtggtccgttttgggggcaaataccagctctgggacggcctgactacctccctttttgccagccccacttttggcctgttttaactgctgccgctgctaagatttgcccagatgatttttgaaagaagaagagtcttgtccatgaactcagaaacatcagggcaactcatgggttggaattccagcatattcattggactgctcccatttccccgtcctccatgttcaggaatccacttgtgttgaccacttttaggccagaaagccacaaatatccaataaaaggaagaaccatcattcataaccattggggttcattagaaagtctgtccagccccacgattcccttttaataaagtaaggaaggtggacctgaaagatttccatttggaagaggaatagggcaagtctgaacaaacctctgaatgttttgatgtaaattcacatatcttgcttcttcatttttccctttcgaaagtgatatcccactcgaacggggattaaatctgtaagctgggaagatacaacttccaacttacataagatccaagaaggtatatcatgacccacaaaactcccaatctgtctttaaggaaacccgacgtggctctttctcccgtcttaccaaggcaactcggggccggccgagatccagtcctgaggcttcacccctggaacaactgcacgcccctcaatcttgaagcgatctcctatgccgaccccactccctcccgatccctcagcagcagccccgggcacctccgagctctggacatcccccgattagcagcagcagcagcaggacgggaaagaagccccacagagcggccgccatgacagcagctctgcactcagaccggcagccccggaagccctcccagtctcccggccgccaccgccgccgctggcggcttgatgttgtcatcactgcgcgcccgtttctgtcataagctgtgggatccaaccagagggaagagatcatggccgatcgactagcgaggcggaagtaaggcggaagtactgcccttaactcccggcactcccacatcattgcatacaaagggtactgagggcatccccagtctgcagggtcagacccagcccacacagctgagaggagcaaacaaaaccggtagagctggccttggtagtcgccagtcaaaacgaaaattccagatactttgaggaatgtttctggcacctccaggattgaagagtaaccagtttcgtgtaatctcat

SEQ ID NO: 154611 - DNA, 720 bp, Homo sapiens
  misc_feature (1)...(720): n = a,t,c or g
attgtttacaattttttatgagcatggttcctgtgggttttttatttttccaaaagcatcaataattagtcttttttattatggccaagataattttctatttcaaatttgaagaaagtgatgtcaaagatgattcgatattttttcnnnnnnnnnnnnnnnngnnnnnnnnnnnnnnnnnnnnnnnnnnnnnnnnnnnnnnnnnnnnnnnnnnnnnnnnnnaaaaaaattatatactttattacaaatggtaaactcagagtgctccaaatctcttatttacaaacaacactgggcaggatacccaaacaaacaaacaagaaataacttacaaaggcatgaagctgtttattgacagtaatcagctttcatcaaattaaaaaatatatatatgtacatacacagttaacgaaggcaggccagaaagagttcatctgtaggctcagcctcgctctcacaaacctccctcctgccgcccctccgctggctatggcaccatgtgtcagccctgcctcgagacaggacactgtcctcggggtgtccacagcctccctctgggcctgctcccacagctcctcaacagcctgcctaagcccggtggcagctcgggcctccctctcccgggccctcaatcttgcctccccgggaagggcggcccagtgccccatcaggagcaggttggggaggtgacctggcgggcccctcacaagtacattttct

SEQ ID NO: 154612 - DNA, 1595 bp, Homo sapiens
  misc_feature (1)...(1595): n = a,t,c or g
gtgcaccgagtgggaaggacttggtcgcgccctcccttggcgtgggagccaggggagccggccgcctgcggggctggccccctttgcgggacgggctgtccccggcgcggaaccggaacgttggaccttttccgttaacattgacccaagaactgccatggaccctaacattcgatcctcattccagtattaaaaggggggaaggggggagggggttaacaaactgccaatagaagactgtaagattgccctcctgtaagtactcccttaagaacacaaagcggggggaggggtggggaggggcggcaggagggaggtttgtgaagagcgaggctgagcctacagatgaactcttttttggcctgcccttcgttaactgtgtaatgtacatatatatattttttaaatttgatgaaagctgattactcgtcaataaacagcttcatgcctttgtaagttatttcttgtttgtttgtttggggtatcctgcccagtgtttgttttgtaaataaggaggattttgggagcactctgaggttacccatttgtaataaagtatataatttttttatgttttgtttctgaaaaattccagaaaaggatatttaaagaaaaatacaaatwaaactattggganagtactcccctaacctcttttctgcatcatctgtagatcctagtctatctaggtggagttgaaagagttaagaatgctcgataaaatcactctcagtgcttcttactattaagccagtaaaaactgttctctattagactttaggaaataaatgtccctgatggtacccctgatgccctatggtccgggttaatacctccctccctcccccccagcctatcctatatgggaattgcccttaccccaaagggatagtgccgatgtttccaggaggcttggaggaaggggggttgcagtggagagggacagccccactgagaagtcaaacatttcaaagtttggattgtatcaagtggcatgtgctgtgacccatttataatgttagtagaaattttacgaataggtgcttattctcaaagcaggaaattggtggcagattttacaaaagatgtatccttccaatttggaatcttctctttgacaattcctagataaaaagagtggcctttgtcttatgaatatttataacagcattcttgtcacaataaatgtattcaaataccaataacagatcttgaattgcttccctttactacttttttgttcccaagttatatactgaagtttttatttttagttgctgaggttaacattgctgcaatctgaagtgatttgaaaattaagaagcaaagaatttaggaagagtcaaactagaagttgtgatctgaatgaaacagtctcccaatttcattaattctttccctctttctccatctctatctctctctctactacctcacccccaaataaacccctatgcctatggaaactaacagtttagcattttgggtctgtctgtagcttatttcttaatttggttctaaaaaaaatcaacctttgtttaaatatagaataagtctcaaaagatagtaatctaatactatggaaaagattcaca

SEQ ID NO: 154613 - DNA, 600 bp, Homo sapiens
tcctggtctaatcaggcattctaaagaatgtacataaaaggaaccagagttaagaactctgtcctatatcatgaattaacttgcatgtttcaaagaatttgggactatagaacatattttgggattaatatagtctgaacttagtgtagtagttacttctggtttaaaatagtatctcaatttccttttcaccttaaatagacttaaggaacaaatatatgtgtagtttgcttgacgttttacataaaagaaatttaatatatgaattaaattataattgtgtatttttaggatatatcacattaattaaaacagtgaataatgtggtacatacatataatggaatatatttgacctcaaaaaggaagaaaaattttgacacatgctacaatatagatgaagcttgaagacattatgctaagtgaaataagccagtcacaaaagaacaaatattgtattatttcagttatataaagtttctagactagtcaaattcatagaaactaggatgatagttgctagggtcagggagaagaggggatggaaaggtattgtttaatggatgcagagtttcagtttgagaagatgaataaaaaaaaa

SEQ ID NO: 154614 - DNA, 748 bp, Homo sapiens
tactgttatgaccatcattacgccatgcttggcacgaggcgcagagtgggttcaaaaatggctgtgagggagtcctagcaggtgcccagcctttctctcatcccctgtggctgcaaggccacctttgactcatttccccacaggtgcggggctcctgagagcatcaggagagcctgcttgcctgcagacagggtctgtgtcacagtgacctcccagagccccaagctcgggcctcccacttaaacacagcccccaccagtgctcagcccagcactcaggaaaggagggcctgggaggtgggacgaacacaacacgggagaactgaccatcaccacggccgctctgcatgggtgcccaggccgggagaatgctcctcctgcctgctgctgtgaggaaccatgtcctggaatctggctcagtgtgagggcacccaccgtaagaggaatcagccatgtctttaccattatgtaaagacatcacggctcccctacccagcccttgatatgggaatctattttactcatttttatccctagtatagattatgggtcttgacataagatgctcaatagatgttgagttgaagttgaaaatttaaagtactttacaaatgtgggggttatcccaagacgcagcccccaagccagcagagctcctgagacgcctgtggccaggactgaggggagggatgggaaccaggccttttggcaaacaaggcctgagtgttgctcttgacctggccctggtc

SEQ ID NO: 154615 - DNA, 500 bp, Homo sapiens
ggggaaggctcagaaccaggcggcagggtcaggatcgggagaggaaccagatctaaggatagtggggccctggtctccgcagtaggggttgaactatatccaatataaagcattatccaaggggaccggattagcccccatgggtgacaccaagatgggagcgggggtggggggtgataagagacacaggagacagagtcaggtcccagaggcagcaaggcctacccccaaaattgcagtcaggttgggaagtagaatcatggctaggcccgcggccccgggtctttctcaggctcggtccctggcacgccgcggatgtccggcagcaggcggcagccagccacgatgtccagacgctcggccagcgcacaaaggtccccgcgcgccaggcgcacgctgtgggccgccgccagccccgccgcctgggctgccgccagcctactagccagggcggccacgtcgcggcctgcacggcggtagacaccgctcacggcggccgc

SEQ ID NO: 154616 - DNA, 2003 bp, Homo sapiens
atctttttttttttttttttttgtaaatgcttaagagactaaatcagtccgccataaaaagctccaccccattctccatcttgggggctcagatcttggcttctggatgagatgagggacagggatatcaggctgtgagaggagagtaaatatgaatgcggctgagggaccaaagctgggatctgaaccaaaacacatgcgaaaaggagcagaaagagactgctaaccccagtccctgagccaagtcagaaatccaagtccttttatagcatccaggagccaaatgtagtgaaatccacacatcatatcgttcttatctgcaaagtgctgtcatctggcgctgaaagcaccaggactgggctgaattgggcccgaagtgcctgaagggtgtcactttaggtctggagagtcaagaggagacgccaccttggcctacagagttgagagcgagcatcatcttggcctggaggggtgtgcaggaaatgccaccttggtccagggagttgggaggaagatcccctgccttgggttaagaggggccatcattttgggcccccaaattgcagtcaggttgggaagtagaatcatggctaggcccgcggccccgggtctttctcaggctcggtccctggcacgccgcggatgtccggcagcaggcggcagccagccacgatgtccagacgctcggccagcgcacaaaggtccccgcgcgccaggcgcacgctgtgggccgccgccagccccgccgcctgggctgccgccagcctactagccagggcggccacgtcgcggcctgcacggcggtagacaccgctcacggcggccgccacgtcgtggtccagccgcgcctggctctccgccagccgaagttgcaggagcgagcgcgcgggggcgggcgccggggcctcctccgtgccccaggcctcctccgccgattcccgctgcaccacgagtggaggcaggtccctcggcgcggccgtcggttccggctccggctccggctccgagtcggtctccgcggcttccccagccacccgcagccccgtggggcggccgcgcgtcgggcccgaaggacccaggtacagctcctcctcctccgacgaggacgcagagcgctcggaatccgtctcggtcgcctcccccggcaccaccgtctccggcctccgcaggggcctccgccgacgaccctgggacgccatggcaccgaactggtccaccatgccaatctcagacccggaagcacacgggcccgtgagctgctcgggaccagcgccagagtcgcagaaaggatgacagtccgactggactctgccattgtctgagaccaggagctcccaagtgtctaaaggggctttggtttgctttttccgttcatcctccttggagctcaaccccttggcttcagtctggacgtgtgaatcttcctttagctcaggacatttttctcctgtgatctctctgatgatttcttctcctgcatcgttccctgtatgtcctgcctccctcttggcagtcgctgtgagcatagtgaagccggccattgcacctttgcccattccccgggtgaaacgccagctccagcagggcagggactgagtctgtggcccactgtggctggcattcaggcaacgtggcctgcgttgaccctcaggttggctgcacttgcctgcccgtctcctgcagtcatcggccccttccatgagcctctgctgtgtggccggccctgctgtgcctgaggacactggaggaaagcagatggtgacaccagagggagacagtgcaacaggaagccgtgtcgttgtcacccatgagggcgaggccattgtctgggtggtggttgtgggttctccctgtgctggtgcaagttcctctgggctctcctttccttgtgcatccttgggatgtgtccgctgggtgagctcccgggtctccgtgggcccagtgtgagtgagtgtgggcccgtgtgcgccctgtgatgggatggcgttctgtccagggtccat

SEQ ID NO: 154617 - DNA, 767 bp, Homo sapiens
  misc_feature (1)...(767): n = a,t,c or g
gctgtattactcagcccactttgaaacgtggttttatcacctgttcttgttaggcagcatggtgtctaattttggcttagcaaatgacgctccttggtcttcctggctcattagctgtgcccacgaggctgcactgactgggtcgtaaatgtatctgagatgtccacacggggctgctgctgctcctctgtaatactgaggtccacatgcaaaatcagctttttttcccccgtaattatcagagcagctaggccagggctgacagccaggccagactccagtgggaaggcttctggccctgagtgtggccttccccnagggggtgggttttccaaaggcaggtgggggaactggggaggccttcggggggctggcttgtccattaccctgaaaccaccagatgctcttttgtccataccacagcccagcattccctctggggtttcatcaagttggcatatccttaagccttcagaaaggaactgggccttgcctgactttccctatctggcctcttcccctatcctcctgtggggccaagagccttaggacagtgtctcagaaaagcctctaagtagggggtttttcccatgggattgtggtagtctgatttttcatgatctattcaaatgttaagaaatattttgttttctgtatttttctattctttagaaatttttttataatagataatttcaaacctatataaataaatccttatgtatttatcatttgactttattataaactcataatcaatcttgaaa

SEQ ID NO: 154618 - DNA, 1033 bp, Homo sapiens
gagcatcatcacgccaagcttggcacgaggctgggcctctttcctcagtccctccttgagtcagggcttgggaatggggtgaagtggggaggatgcttccttccacaggaatctgggagggtcaggtgcactgctctgataggctgaggcttggggcccttatgggatcctccctcatcagcccttctccctggataccaaactttttggctggtttctcggctaacagcaaggctttcctgaaccctttcttatctggggaagggaggttcaggagggagtctcagagcctctgacaaagttagggaaccccagggaagtaatgaagggggcaatgccatcctctggtctttccaaacagggaacaccttccaaagccacttgggtcatttggggtctagaggcttagagaggacaggacatcttggaaagagctgagctcaggccttggtgctgggctgcagccaggaccatttgttttctgggttgcatgggagggggcacttggtccggagaagcttttagctaatggtgtaaagtgctcggtgccatcacagttttggctttctccaggatttatttgtaatcagcttgtcccgatttgggggtggggtgggtgagtagagaattagagacgacactggctagtgtgtgtgtgtgtgtgaagtagagggtagtaaatggagattggtcctggtgtcacaggcagctctgccccctccctccacttccagatgtcccactgctcctcatcaagcttcctggccagggcacacacatgtagacttgaaccccagctcctagttagtgctatgtccattaccacatagccaactaacaaaaggcacctcccacacctgcctgaccctccagggccccctctagaagctcacccgtctggctttattcaggctgggtgcggtggctcatgcctgtaatcccagcactttgggaggcccacgagggccaatcacttgatgtcaggagttcaagaccaggctggccaacatggtgaaaccccttctctactaaa

SEQ ID NO: 154619 - DNA, 853 bp, Homo sapiens
  misc_feature (1)...(853): n = a,t,c or g
gtagaattctagccttaaattccacttcatctctttaataagaaaatacatggaacacatatttgctaaagattcttaacagtcactgattggcacttgaaatactttcatatttttatttactttacctcccagtatggcactttgggttcaattcagtagttgccttaagtttaaaaatactgaatattatagtttacctcttctcttcttttaagagcttacgcaacttttctgcacttgtttctattttctttgttttctgcttttcttccttttcagcttgtttttctcttaattccaaagatttcttttagaacccagatatcgaaaaaaaaccacacgttaaaaatagcagaatatataaaacccagtattcaaaagaccacccccaacgagagaaccaatttaggtaaaaccaaatcaccatagagccagcattaaacagtatttttttaacataaaaaaattagtcatacagatgtttggcattagtcattgaaatggccagaacagcattgaggaccatattgcagttggcatcccctacaaaaaggggagagcaaatgacagggggccccatgacccagagtgcaaaaaaggtttnnnnnnnnnnnnnngtacataaaaattatttttaaagattgaaaaatttaaacaggacacattttacaaataaaattcaaataaagacattccgttaaggtgaagtgaaggaggaatcaccatgttcaaatacaaaccatttaacccaatagcacagcccagttggcgccatgattacataggaaatcattttccagtttgtgaatggggatgagcagcaccagatgtcacagacacagcagcacgc

SEQ ID NO: 154620 - DNA, 677 bp, Homo sapiens
cggacgcgtgggcttcactcctggctcctgggaagcattcatggtcaaaaacatagtgcccaagctggggatgtgtcttggtgagctagtcattaacccccaccagcagcacatggatgcattctattgggtgattgactgggaagggatgatctctgtctctagcctggtgggacttcttgaaaagcacttcttccccaagtggcttcaggtgctgtgctcttggctcagtaacagcccaaattatgaggagatcaccaagtggtacctgggttggaagtcgatgttctcagaccaagtgctggcacatccatctgtcaaggacaaattaaatgaggcacttgatgtcatgaaccgggcggtgggctcctacgttggttgcctacatgcagccagggagcacgggaggaacattgcctatctcacccacacggagcggaggaaggacttccagtacgatgccatgcacgagaggcgggctggccctcaaattggcctattacggtctctggggaagaaccttaagatttgtgccaaaaaagagcctcttgaaatttatttatgggctaatttaaaggagtattacctggcaaaaaccggccagggcccaccaccctttttcttaacaagagccccggagggtttaatcacagcctgggctctctggggataaaact

SEQ ID NO: 154621 - DNA, 2871 bp, Homo sapiens
ccggccacggtgcttccgggttctggtgtaggagcggcgtcttctcgcgcggatggtgaagctgaatttggtacgctggaccctcggacagacagcaagagagagacaagcccgaggcctgacttctagcactcctgagtttgagccctatgagcagtggaacctagggaccaccaaggatccagatataattctttcctcagtaatagaaaaaagaatctgggatctaagaagatacctactcattttctaagtgactggccatgtcattgtcccacttataccgggatggggaaggccgcattgatgatgatgatgacgagcgggagaactttgagatcactgactgggatctccagaatgagttcaaccccaaccgacagcgccactggcagaccaaggaagaagccacctacggggtgtgggcagagcgagactcggatgatgagaggcccagctttggaggcaaacgggcccgtgactactctgcgccagtcaacttcatcagcgcagggctcaagaaaggggcagcggaggaggcagagttggaagattctgatgacgaagagaaacctgttaagcaggacgactttcctaaggattttggaccaaggaagctaaaaacgggtggcaattttaagcccagccagaaaggttttgcaggaggaaccaaatctttcatggacttcggcagctgggaaagacacacaaaaggaattggacagaagcttcttcagaagatgggctacgtccctggacggggcctcgggaagaatgcacaaggtatcattaacccaattgaagccaagcagagaaagggaaaaggtgctgtgggggcttatggatccgagcgcaccactcagtccatgcaagacttccctgtggttgactcagaggaagaagctgaagaggagtttcagaaggagctgagccagtggaggaaagacccaagtggaagcaagaagaagcccaaatactcttacaagaccgtggaagagttgaaggccaagggcaggattagcaagaagctcactgctccccagaaggaactttctcaagtcaaggtcatagacatgacaggccgggagcagaaggtctactacagctacagtcagatcagccacaagcacaacgttcccgatgatgggctgccgctacagtcccaacagctgccacagtctggcaaagaggccaaggcccccggcttcgcgctgcccgagctggagcacaacctgcagctgctcatcgacctcacggagcaggagatcatccagaatgaccggcagctacagtatgagcgggacatggtggtcaacctcttccacgagctggagaagatgaccgaggtcctggaccacgaggagcgggtcatctcgaacctcagcaaggtcctggagatggtggaggagtgcgagcggcggatgcagcccgactgcagcaaccccctcaccctggacgagtgtgcccgcatcttcgaaaccctgcaggacaagtactatgaggagtacaggatgtccgaccgtgtggaccttgctgtggccatcgtctatccactcatgaaggagtacttcaaggagtgggatcccctcaaagactgcacttatggcaccgagatcatctctaagtggaaaagcctcctagagaatgaccagctcttgtcccatggcggacaggacctgtcctctgcctttctcccataggttgatatgggaagtctggatgccttttgttcgaaatattgtcacccagtggcagccaaggaactgtgacccgatggtggactttttggatagttgggtgcacattattcctgtgtggatcttagataacatactggaccaactcatcttccccaagctgcaaaaggaggtggaaaactggaacccgctcacagacactgttcccatccactcttggatccacccatggctgccccttatgcaggcacggctggagccactctattcccccatccgtagtaagctgtccagcgccctgcagaagtggcaccccagcgactcctctgccaagctcatcctccagccctggaaggatgtcttcactcctggctcctgggaagcattcatggtcaaaaacatagtgcccaagctggggatgtgtcttggtgagctagtcattaacccccaccagcagcacatggatgcattctattgggtgattgactgggaagggatgatctctgtctctagcctggtgggacttcttgaaaagcacttcttccccaagtggcttcaggtgctgtgctcttggctcagtaacagcccaaattatgaggagatccaccaaagtggtacctgggttggaagtcgatgttctcagaccaagtgcttggcacattccatctggtcaagggacaaatttaatgaggcacttgatatcatgaaccgggcggtgtcctccacagttggtgcctacaagcagccaggagcaagggagaacattgcctatctcacccacacggagcggaggaaggacttccagtacgaggccatgcaggagaggcggaggcctgagaacatggctcagaggggcattggcagtggccgctagctctgtgcccatgaactttaaggacctcattgagaccaaggctgaggagcacaacattgtcttcatgcccgtcattgggaagcgacacgaagggaagcagctctacacctttggccgcattgtgatatacatcgaccggggagtggtctttgtccagggcgagaagacgtgggtgcccacctcactgcagagcctgatcgacatggccaagtgaactgtggcaggtccagaaccagtcagagacttgcccctaagagggatgtactgtaaataaacagtatttttagatcaccttcaaaa

SEQ ID NO: 154622 - DNA, 1347 bp, Homo sapiens
ttttttttcatagtgggcaccatttattggacatttgccatgtatcagaagctgttccaagcactttatttgctttatctcagctcctctcagcaaccctatggggtaggggatatggtatccctgttgtgtagacatggaagctgaggctcagagagtttacattccagggccactttagctaccaggctgactccaaaatccatattcataagtgctagactgtttagctactataaatccctgtaaagtagtgtcactagcctagtaggaccaggatcaaaacaaaacaaatggccacttcagaaatcttgccttcatttgttgccacgatggatgcaagtaatttttctttttggcaggtgctgtgctcttggctcagtaacagcccaaattatgaggagatcaccaagtggtacctgggttggaagtcgatgttctcagaccaagtgctggcacatccatctgtcaaggacaaatttaatgaggcacttgatatcatgaaccgggcggtgtcctccaacgttggtaagtgaggattcccattttggatgtcctggccccaagtttcagattttacacatgtaaatgacacagaatcagagttttctggttcctgtaggcagcctaaaccttaggtcacacttttgcacataggcaacagactctcaccctgctgactggggtacatgggtcagctgggcacccactgcccagggtctaccatgactgaggagggggcatcttccctgagtgggagactgacttaagctggattcagatgatgtcagtctaaccccaggccccgcccttttaaccactgtgctgtgtggccttttaaggctcattcatgcctgagcatgctgcttaggtgacgcatcttacagtgtggagtttggcacgcggtctgacacttggtgattgctcagccttaatcagccccattttacctgttaaacagtaagatctactttataggctaaaagggagagtgagttcatgcttgtgtatagccttcaataggtggtgtctgtgttgtcaaaaacaggcagttcactgttcgtgtactatatctattcccaagttctaggtaagtcattctgcctagatcataagtaagtgagagtatatttatgtttctacatttgggagcctatttcaaccagtcctgtgctccagtgttgctcattagccgattcgcagcattgaaatgggatcgtctagtctgtgttttacagataagcccagcgaggctgagagcctgttcaaggtcacatagttaaagggtggcagttagaactggaatttctatttcctgagtctttaattcttgatatttagaagtcc

SEQ ID NO: 154623 - DNA, 2835 bp, Homo sapiens
caaaaggcttctctcctgaatgaattctctggtgctgaatgagatatgtgctctggctaaaagtctttctgcattcattacagttataaggtttctctccagtatgagtattctgatgttcagtcagatgagtgctccggctaaaggctttgtcacattcattgcacttatagggcttctccccagtgtgaattcgttgatgctgagttagatgggagctctggctaaaggtcttttcacatttattacactggtagggtttttcttctgtgtgagttttttgatgttgagcaagagatgaacaatgtcgaaaggctttaccacactcagcacactcataaggcttggctcctgtatgaattctcttatgctgtgtaaggtgtatgttctggttgaatgctctcccacactcattacacttgtaaggtcgttctccagtatggatcttcctatgctgaataagggatgaaccataactgaaggttttcccacattcatgacactgatagggtttctctccagtatgaattctttcatgcttagcaagagatgaactccgaataaaagctttcccacattctttacattcataagctttctcttgagtatgagttttctgatgctgattaaggtttgagagataactgaaagcctttccacattcactgcattcaaagggcttttctctcgtgtgaattctccgatgttgagtaagggatgagcagtaactgaaggcctttccacattcattgcatttgtaaggtttttctccagtatgaattttcaggtgttgagcaagggatgaccagtaactaaaagattttccacattctgcacaatcatagggtttctccccagtatgagttttttgatgctgagtgaggtttgagtgctggctgaaggctttcccacattcattgcattcgtacggtttttcaccagtatgaatcatatgatgacggataaaagttgagggcccgttgaaggcctttccacattcattacatttataggttttttctccagtatgaattttttgatgttgagtaaggtgtgtgctcctggtgaaggttttatcacattcatcacatttaaaaggtttttctcccgtatgaattttctgatgttccataaagtggcctctctggctaaaggcttttccacactcattacaagtgtatggcttctcgccagtatgaattctctgatgctgaacaagatgggtcctctgactaaaggctttcccacattcatcacatttatatggtttttctccagtatgaattctttgatgttgagtaagagatggaccctcaatgaagccttttccacactgatcacatttatatggtttatctccagtatgaattctttgatggtttataaggttttcactccggctgaaggctttttcacattcattacatttgtagggtttttctccagtatgtgttctctgatggcgaataagagctgaacaataactaaaggctttcccacattcattgcacttacaagatttctcttttttaactgggtttgaattctgtttgatgcttcttttagtagaggtctcttctggagatggttcttgtgttacaaggtttgaactcacattgacacttttcccaaattcattatttacagggcctttttcccaactgggtattgtcttttcggttacctttatttcctttggcagtgtctgttggtttgcctgctgtctctctaaactgccttcatattcccaactttctagcaagttggaactccaagaatcatctcttttgtgtttttccactattacctctggagatagctcttcttcagaaatgtcaggctctggggctgacacactattttcaagtcttgtctcccagtctaaaagaaaaagaaaattccagtgttctctgaatagagaaaaaataaactgctattgtgggaataatataatgataggtttagaaacttggagtcctgttcattagggaaaaaaagaaagaaacctgcagtaaggggaaagtaccatatcagaattcaatcaccactttgtccattcttcctgggtaaagtccactatcacatccttgaaagtcaccgcttcctgaaataccaaacatatttctgcttagccataagcatttacttaggaaaggggtaaagttagcaatactgacagaaatctcggtctaggactcagatgtctaactccccttgcagggaatctgcaacacgctgaggttgtctaccctaaaagacacaggatggcgtcagcagcatacgtcacacaatcacacatcagagcgttaaagctggaaggtggacaaacagggcggggcccggcacccgacttccccttaggccagaacaaaagaacaaagccctccaattgtctgactgaactgattataagaaatgcacgtctactgaccgagcgcagtggctcacgtctgtaatctgagcactttgggaggccgaggtgggtggatcactaggtcaggagttcgagactcagcctggccaatatggtgacaccccgtctctccttcatcctcttctttctacctcctgtccctccttcctttctctcttctcctttctggtcactttcttcttttcctcttccttcttgtccctcttcctcatttatctacttagtcgacatgatttcttagcttgcgattgtttccctcttttcttagattagtatatggttccaagaagtagtaactcctatgttagctagggctccaaccatggttgaacatagacggaaaccagtgcgtcacaaaggaggctagcgagagttcttttttaaaagggtctgacaaagcg

SEQ ID NO: 154624 - DNA, 1116 bp, Homo sapiens
tttttatttttttttttgttttttcagataatttattgttaaatgaagacatcacaaagcaaaatgggagtggggcaggtgtcaaaggtaaactgaaaacgtcgtgtctgccaaacgctattctggtttcctaaggttagaaacaggaaaagtgtcaaatgaaaaggtactcgctcaaattaagtttttttaaaaggtctgtaatttgaaagggaaaacacttttcacctaaaaatttccctttttcatgaaagccctaatttaaaagacaggggaaaaaagctttttaattaacaaataaacagcatctctcaggggacacttggggaatgtttgttttttaatccagtggggtcctaaaaattcactgctttccacctgcaaaccgaacaccgaatccactgtgggatgggcgtcctctgacccaccctggaagggttctggtttctctccacacacttccttttctggcaactttcagcaaagcaggtttggaagaaagaggattacaaagaactacgactgggctccctagtgaataacttaacacggtaaaccccggttctccatttacattacacattcacaatcgctcactggctacttacttcactgacgtattttcacactcctctacacacccagcatggatttgtctgaacttaacacagtccccctaagacaaaaaaaaatatctccctaaggacctctgaagaacacagcggtgttcaaaggccacgtcctcgcacacaacacccagacctgccacgcagccggtactgtttcctgaactcatccgagcaagcgtctccacggggcaaagcaaggccttgaggatcccgctaacataacttacaaattattgggaggccgaggcgggcggatcacctgaggtcaggagtttgagaccagcctggccaacatggtgaaacccctgtctctactagaaatacaagaattagccaggcgtggtggtggacacctgtaatcccagctactcaggaggctgaggcaggagaatcgcttgaacctgggaggtggaggttgtggtgagccaatatcatgccactgcactccagcctgggcaacaagagcgaaactccatctcaaaaaagt

SEQ ID NO: 154625 - DNA, 354 bp, Homo sapiens
  misc_feature (1)...(354): n = a,t,c or g
nagccacattcctgccgcgagcaggagaattattcctcaagtgggtcatcctcctcttcctcttcctcctcctccccagagccatgcaggtgttgctgcaggtgatgagtgacatgctcaaagaacttttccatggttgagcgcacaaaggagcaggaccccccctcacactgtagccgcagattctcctttcggggaactttcccagtaggcggcannnnnnnnnnnnnnnnnnnnnnnnnnnnnnnnnnnnnnnnnnnnnnnnnnnnnnnnnnnnnnnnnnnnnnnnnnnnnnnnnnnnnnnnnnnnnnnnnnnnnnnnnnnnnnnnnnnnnnnnnnnnnnnntgtatgtcg

SEQ ID NO: 154626 - DNA, 416 bp, Homo sapiens
  misc_feature (1)...(416): n = a,t,c or g
ggtgtggtagcagtggaagtagacatggcgaatgaggtcagcagatctgtccagagaacaaaagccacattcctgccgcgagcaggagaattcttcctcaagtgggtcatcctcctcttcctcttcctcctcctccccagaaccatgcaggtgttgccgcaggtgatgagtgacatgctcaaagaacttttccatggttgagcgcacaaagtagcagtaccccccctcacacagtagccgcagattctcctttcggggaactttcccaggaggcggcatggccttcaccctacagtccccctgcttggannnnnnnnnnnnnnnnnnnnnnnnnnnnnnnnnnnnnnnnnnnnnnnnnnnnnnnnnnnnnnnnnnnnnnnnnnnnnnnnnnnnnnnnnnnnnnnnctgtatgtcga

SEQ ID NO: 154627 - DNA, 1482 bp, Homo sapiens
atggtgacacatgcctgtaatcccacaaccattggaaagttggagccatcctacgtgatccgcaagtttctggatgcccagcgcattcacaacctgactgcctacctgcagaccctgcaccgacaatccctggccaatgccgaccataccaccctgctcctcaactgctataccaagctcaaggacagctcgaagctggaggagttcatcaagaaaaagagtgagagtgaagtccactttgatgtggagacagccatcaaggtcctccggcaggctggctactactcccatgccctgtatctggcggagaaccatgcacatcatgagtggtacctgaagatccagctagaagacattaagaattatcaggaagcccttcgatacatcggcaagctgccttttgagcaggcagagagcaacatgaagcgctacggcaagatcctcatgcaccacataccagagcagacaactcagttgctgaagggactttgtactgattatcggcccagcctcgaaggccgcagcgatagggaggccccaggctgcagggccaactctgaggagttcatccccatctttgccaataacccgcgagagctgaaagccttcctagagcacatgagtgaagtgcagccagactcaccccaggggatctacgacacactccttgagctgcgactgcagaactgggcccacgagaaggatccacaggtcaaagagaagcttcacgcagaggccatttccctgctgaagagtggtcgcttctgcgacgtctttgacaaggccctggtcctgtgccagatgcacgacttccaggatggtgtcctttacctttatgagcaggggaagctgttccagcagatcatgcactaccacatgcagcacgagcagtaccggcaggtcatcagcgtgtgtgagcgccatggggagcaggacccctccttgtgggagcaggccctcagctacttcgctcgcaaggaggaggactgcaaggagtatgtggcagctgtcctcaagcatatcgagaacaagaacctcatgccacctcttctagtggtgcagaccctggcccacaactccacagccacactctccgtcatcagggactacctggtccaaaaactacagaaacagagccagcagattgcacaggatgagctgcgggtgcggcggtaccgagaggagaccacccgtatccgccaggagatccaagagctcaaggccagggtgaaggccatgccgcctcctgggaaagttccccgaaaggagaatctgtggctacagtgtgagtgggggtcctgctcctttgtgtgctcaaccatggaaaagttctttgagcatgtcactcagcacctgcagcagcacctgcatggctctggggaggaggaggaagaggaagaggaggatgacccacttgaaaactcagtcaacaaggatataaggaataaatctgccatcctgccatcaagaagtaattgctga

SEQ ID NO: 154628 - DNA, 2364 bp, Homo sapiens
tcaaaccatctggatctctggctcctcagctattccttgaagcttttccatgatgccccctgaaggtggctcaggggctgggggaggctcccctggggcttcagacagcacatagtagacaatctcttgctggccttgggcattggtctgattcaccacgtggatgacagaactggggttgtcctgagaggctgagagggctgtcccttcgctacccttgccctcctcttcctcttccttacgtcctggctcccctggcactgtttctagaataatgccctgcaggctgctctcgttcagcgacgttcccaggcccgatccctcttgtggttgccgcagcagttgctgtgtcagctctacactctcgtagcgaaccagctgcagccgcatatagccatcttcatgttccttgtaccgaaaacggggatgccctgagggccacttgaactggtgcttcttgcgaaggtgcacggtgaggttgttgccccgtgtgaagcatttgtcacacacatgacatttgtaccttggctcagagtctccttcatgtactttgcggtaatgggacttgatagagcagagggatcgggcactgaaggtgcagttctcaaaatcacacctgtaggctggctcctcgctgtgggtatccaggtgcttctggaggtcaataagattcttgcagctgtagtcacaacagtcacatttaaagggccggtcctcactgtgacgaaagcgcatgtggttgcggagggaggaaggcagcgggcaggtcatgtcacacagagggcacttatagtgattcacatggttgcgcatgtggtcccgcaatagccgctctgtggcaaatctcttggaacagtgagaacactggaagtgctgctgatccaatgaggtctggcgacggatgtgatctaagaacttggtattgttggcaaacatgcccccacaggtggggcaggctaccactttctcctgggtatggctgcggaggtgctctcgaagtttactgcggtccttgaaggtgcaggtacagcctttccagccacacagcaccaccgggttgtccttgccgactgcttcgtattcacagaaacagactgtgtgcttccacatgccgataaaaccactcaggattgtcgaaggaattctgtgccaggggcaactcacagtgctcccacagacaacaggaagtggtcagggatatcagggatgacgttccggctctggaagtccaggatgcaggggccaaggtcagcctggctttgctaggcctgcagcccccactgtttcagcttggtgtggtagcagtggaagtagacatggcggatgaggtcagcagaactgtccagagaacaaaagccacattcctgccacaagcaaggagaattcttcctctgtagaaaggggtttaaaaggaagagtctgacactttccaaggctcaggtcaccttccacctgcagcacaagtgggtcatcctcctcttcctcttcctcctcctccccagagccatgcaggtgctgctgcaggtgctgagtgacatgctcaaagaacttttccatggttgagcacacaaaggagcaggacccccactcacactgtagccacagattctcctttcggggaactttcccaggaggcggcatggccttcaccctaccttccaactctaccaggttgaagacaatgatggaagcagaaatgactagtgactggccagcctctaggccgttaattcctgctaggatattgatggcattggtacagaacactgcagcagccccatgtagacatagtacaggattcatgcggggagagatggtaggaaaagaagtagtgccacccaagtccagatgcaggccaagtatcgggcggaaaggcttgggcaccacaatggtcgtgttgccaaagttggtgaaatataccatgaggagaggtagtgaggcagctgtatgtagcagcagcttatggcgccagcgcagattcagtacatcatccgcaaagcccaggaagatcatgcagcagatggcaaggagggcacctcccaggtcccagccacaggcaatcacccccacgaacccacttacttcatggtgggggaatgccttacactgctccttcacaaagcagttcaggaaggggaaagggatgaagcagaagaggatgataaggaaaacagcaccgctgatcactccctgggattctgggatctgctgtcggctggttttgttgaggtcctgaccacagaggcgcgcagcaatgaagtggccccggaaggccgggatgagggtgactgtggccacaaatcccagcagcgagacgatcaaattgatcagcagcggcatgggcaattccgagaaggcccacat

SEQ ID NO: 154629 - DNA, 587 bp, Homo sapiens
ggagctgaagagacctgggagccgacagacgggtctgggtctgccgcccaggatggagtacaatggtgtgatcttggctctttgcaacctctgcctcctgggctcaagccttcctcccacctgaacctcccaagtagcgggactgcagggtgaaggccatgcgctcttcctgggaaagttccccgaaaggagaatctgtggctacagtgtgagtgggggtcctgctcctttgtgtgctcaaccatggaaaagttctttgagcatgtcactcagcacctgcagcagcacctgcatggctctggggaggaggaggaagaggaagaggaggatgacccacttgaggaagaattctcctgcttgtgggcaggaatgtggcttttgttctctggacagttctgcttgacctcatccgccatgtcttatttccactgctaccacaccaagctgaaacagtgggggctgcaggccttgcaaagccaggctgaccttggcccctgcattcctggaatttccagagccggaacgtcatccctgatatccctgaccacttcctgtgtctgggggaccactggagaaattcttcgacg

SEQ ID NO: 154630 - DNA, 423 bp, Homo sapiens
ataaatcactcaccaggcagcttttgcagtttccggaagttgtgatgagagctgccctctgaggcccctggaggcagttgggctgcatgaatggatgtgattggggacaggagcttgcagcagcccagggcacatccattcctgccagcctgcacctctgccacagttcagctctgccgagatgggattggtgggcatgacgtttgtcaggggaaacatctgtgggagaaaatgacatgggagagcgttagcccacgatgaaggagtgggggaaggaacatatcatcccgaaagagcatcacggcccataggagtatctcagcccctggaagcatctcagcccaagggagcatcccagccctcaagagcatcttagcccatgggagcatcccatcccaagggagtatctcagcccacaggatg

SEQ ID NO: 154631 - DNA, 1958 bp, Homo sapiens
gaaaaggaaaataacaggactttttatagctgtgataaaatgggtaaagaaaaacctccatttaaataaggaaggggagacaaaatggaaggtcctggccttaagtcaaattccagatagtgctttcaatatccaaagcttaggccttgtttacgttataggaatgctatatttttctttatctgccctgtgatttcgcttcgtgtccttcaaagtttttttattgtaattttaaaggaaaaaaacaatgtatttttatttgataactaggcaaaatcatttgccattttttatttcataaatatttatttttctatctcatacaatgatcagttttactttaaaaattctgcatttctcttgcctctcatgtacttcatccagttatttattattgtaaaatgttaactggagatactgcattcaaaaaaaagtcggaccacttaacacttaccaggaatgttagtgtttcagctgttttagtaagtgaccaagtaagctatcaccttgtgatagctaattcaacatctttattgaaaatttgttactttttttaaaggtttttaaaagattacaattttaaaacattttatgtttattttatttttgtgtaaagcaaacacttttaaaataatatcagagtaattattaccctatgaataaggagatagaaatgaaattcagccagttaaatcctcatactctttctcattcaaataatataataatggtttgagactatagaagcaactcaactgtattttaatgaactgccagacacttttcactgtgttctctgctttttactttgtcatttttatataaatgtgaaagcattttgttgttgttgttgttgttcctgctgctagaacacatgcagtttaatttttaggcccacagtgtattatgctttaatgttgtgatgtaaactaatacttctggcctgggaaaacctttctgtttctgtatctttgtcctttggaggccaggcctcattaacaccagtattgttgaataagcacaatatatgacggagccttatcataaggctgcttgacatagacacccactctcctccacattttataaatcattgtttggaagtaaagttagataagagtcaaattaaatgttttgacttgaaaaatatttgacttttgcgttcaaaccactgttagacataagtattttattagacataagtattttattttgggactagacagttgctttacatgtatttaagggaacattgtgattttcagaaagtggctttacatactattgaattgctatttcccaagttactttacaaccaccagcagcataccaataaattacaaaagcagaaaatgaaaattaaccctaggtgttctgatgatagagaaatagctaaattagaaaagaaagatatggatagatgcttttaggaggaaaacctttttagaatggcaatgaccacttggatctaggtcaacatattccaaaatgtgtgaccttgggctttgtgtttactgaactcactctagaaaattctggacctgattcattaaccccgcttttcttctctaatgtgtcctgaagctgagctagatgatgagtaaattctttgctgactgttgctcatcactttctctcaaagttagaacttttcagtataaaaataattagcttttaactgattattaattttctttaatagtttctgtcaaaacttgtctaaaatttgtgttgtgccaaattggaaatacccactataatatggtgcattcaggtttactccacaagtggttaacattttaagtcctagatttttgatgtcttgcctttgtataagcatcgctttggggaataccaagatgattcattattcagtgattattttcttgaaagataactatgatgattggctgtaaaatcttcaccctaataaaggagtgagatctctgtgtaaacaa

SEQ ID NO: 154632 - DNA, 746 bp, Homo sapiens
gaaaatggggggccctgagtccctggcctggaagtgggcctgaggctgtggtgaatggagccaagagaataattaccaggtcagtttcctatggagtttctgggtcagtaatgccaagaccaatagtccagggtcagggtgccaaattcagacagggcaataaaaaagagaaagctctaattcaaattgatcgttctgacagagaaggcaatgcaaagggagttcagtcagacaagccaggactgattcctgagaaaaaaatgcacacagtgccaatttccttttttaactggttcctgccacagctaacatcggggacatatcctaaatctggcaaagctgttgaagaagcccagccaaacagtccacctgccgaggacgttcgggacagggtgagagaccgaatttacgattcaagtctaatgttcttcggacgtgcgcttcggccccagagaaggggagtctcggtccccgttttcaggtctgcgaaggaacacattggcagggtgaaaggaattcctcccacacaaccagctctaaacctgatgacgcgggtggagaaggtgccatcccgccccaaaggggcaacggggaagatccctaggccagaccgccggaccccggttagcctttgggccacaaggagccgagagggagtaggggaagagctggccgcagtcgctcagccccaggatagaagctaccaaccagttaatgcaaaatggtcgctatggcaacacacgtag

SEQ ID NO: 154633 - DNA, 1372 bp, Homo sapiens
gcggccgcattctttttttttttttttttttttttttttttttcagtgtaaggactaaaatatttattttttaagacaatttgaacttccattttgttaaattgttcttaattattacttattaataacttcttctttgagtttctctgcaagcaatctcctctttagtaatgtttgcttctcctctcgctcgtcatttctgggtttctctgtcatttcctcctaccctcccccagtgggtttccctttctggctccatatttttgaatctgtttagtcctcatatcctttctcatggacatcaacttactctctcttctgcttgagatagtgttctcgttgccgaagttcttctgttccaagtactgataaagtttgctattggtcccttcaatgcgtcgcatgctctaagcccaggaatcttcaaggccttttttgtgggagggagggaagtttcagacccttttccacttttcttcccaaagggttctattgactgattagcaaaatgcattttaacttctgagggtgggtgtgcaaaatgttcacccatccccttgggaattattcattattgcagcttcactggaatgcactgtgggctcttctgttttaggcctctgataactgttttttcctcttcctttcctcttccgggtcatattcctcttttgattttctaagaacttccctcaggattgtcagtctcttcggtgttcaaggtcactgaccacatcagagccatcggttaagcagtcaggtaatacaccatttctctcttgaattattcggaatggcttgcagctgcatttcaatgtttttctggaccatcattgctttaaagatagtaaaatcttctgctgccaacacaggttgcaaaatggcctgtgatgtatgggtctttgcaagaggagaagtgcatgcttccttgaaattgatcttcattaattccaaatttctttgaggtaaccttgtaacagcttttcaactagttctttgtattcctgatgaatctctgtataggtcaatttgctttcttcttcatcatcaaaaacttcacatttctgttccacaaagtccaagatggggatggaccagtctgggcctcgcaggaaccccgcgatgctctccactacccactccacctcgtcttcttcttccgcagccatcccgccccaaaggggcaacggggaagatccctaggccagaccgccggaccccggttaggcctttgggccacaaggagcccagaggcacgtaggggaagagctggcccgcagtcgctcagcccccaggatagaagctaccaaccagttaatgcaaaatggtcgctatggcaacacacgtagccgcgaattccaccacgctggag

SEQ ID NO: 154634 - DNA, 366 bp, Homo sapiens
gcaggcagcaccacaggtgccctggctgtggctgtggcccagcccacggatgtggtaaaggtccgattccaagctcaggcccgggctggaggtggtcggagataccaaagcaccgtcaatgcctacaagaccattgcccgagaggaagggttccggggcctctggaaagggacctctcccaatgttgctcgtaatgccattgtctcagtgctggtggagttgacatttgacagtgtgggaggcctcgtaccagccaggatcccaagcgtcccgtcccttggaaagttcagccagaatcttcgtcctgcccccgacagcccagcctagcccacttgtcatccataaagcaagctcaaccttggaaaa

SEQ ID NO: 154635 - DNA, 513 bp, Homo sapiens
  misc_feature (1)...(513): n = a,t,c or g
cgcgggcccgggatttgattttgggggccccattaaaaaaattttaccttgccagcccgcggtcgttaacttgggttctttaaaacggcccccccnnnnnnnnnnnnnnncaaggttgagcttgctttatggatgacaagtgggctaggctgggctgtcgggggcaggacgaagattctggctgaactttccaagggacgggacgcttgggatcctggctggtacgaggcctcccacactgtcaaatgtcaactccaccagcactgagacaatgagtagatgagaatgtagaaagagggaaggtggtaggtaaaggagcggaaggaagacgtggtcaagacgagatacatgaactctgccctgggccagtacagtagcgctggccactgtgcccttaccatgctccagaaggaggggccccgagccttctacaaagggttcatgccctcctttctccgcttgggttcctggaacgtggtgatgttcgtcacctatgagcagctgaaacgagcc

SEQ ID NO: 154636 - DNA, 3680 bp, Homo sapiens
  misc_feature (1)...(3680): n = a,t,c or g
ggatgcgacgatttcgtgacatttcgtccctgtctccagtttttctccatctcctgggacgtagcaggaaatcagcatcatggttgggttcaaggccacagatgtgccccctactgccactgtgaagtttcttggggctggcacagctgcctgcatcgcagatctcatcacctttcctctggatactgctaaagtccggttacaggtgaggggatgaagcctgggagtcttgatggtgtctactctgttccctccccaaagacacagacccctcaagggccagtgtttggagcatcgagatgactggaggtgggaagggcaacatgcttatccctgtagctaccctgtcttggccttgcagatccaaggagaaagtcaggggccagtgcgcgctacagccagcgcccagtaccgcggtgtgatgggcaccattctgaccatggtgcgtactgagggcccccgaagcctctacaatgggctggttgccggcctgcagcgccaaatgagctttgcctctgtccgcatcggcctgtatgattctgtcaaacagttctacaccaagggctctgagcgtgagtatggagcaagggtgtaggccccttggcccttttttctcagtgatgattgatcttagttcattcagccatatagttttttaggccccacgatccctaggaagatcaggggaacagagaactggaaggggccctggtcctccacatagttcctaagcacctgggctataccaggctctgagcagggcgtcatcccatcacagtcttcaacaccaccttgggagtaggtagtatcatcccagtgttatagaagaagagactgaggtgggaaggcagtgggtagagtggggacttggccaggggcacacagtagagagccagaaaacacacagtagagagccaggacactcgtctctaaggccagcgttcttccctttcacctccttagtatgccatgccaaccctccattttacacatgacgaaacagagccccagacaaaaggttgtctttcccagatcacatggcaggaagaagtaaagctgacctgagatcccaagtcttaggaatcccagtcctcagaaagccacttctctctgagccttggttttcacatttgtcagatggaaatgattgtgatttctcagggctgttgagcaggtaaatgaaaatgttttatgaaagacagcaccaagtttcattttggtcttagcccttgctatgtccctagcaagaagtagatattcatagggatattttgtttgatgtgaggagttcttacagcaagagcttgtagaaggccaaaagcttctggattctattcccaaaagcaggagatgacagtgacagggtggttttggtgaggagagatgaggtagaaaatgagtgcaagcccgctggccactgaccccatggctcgcccacagatgccagcattgggagccgcctcctagcaggcagcaccacaggtgccctggctgtggctgtggcccagcccacggatgtggtaaaggtccgattccaagctcaggcccgggctggaggtggtcggagataccaaagcaccgtcaatgcctacaagaccattgcccgagaggaagggttccggggcctctggaaaggtgtgtaccagttgttttcccttccccttttcctcctccccgatactctggtctcacccaggatcttcctcctcctacagggacctctcccaatgttgctcgtaatgccattgtcaactgtgctgagctggtgacctatgacctcatcaaggatgccctcctgaaagccaacctcatgacaggtgagtcatgaggtagacggtgctgggtctcacccttcccccatgccaggagcaggtgcgggggtctagctgacaccagaagaccacatcttttcatcctatttgccctttgcagggagagtaagatatctcttacttgccatattgaagccaattgggatgaagctcccactttgcacattgaggaactgaggctagattggcaaaatgactctttcaggtcctcagaagatgtctcagctggagtccctgtctgtttttgtttttttgtttgtttgttttttgttttttttgagatagagtctcactctgttacccgtgtaatctcaagctcactgcaaccttctcctcctgggttcaagcgattcttcgctgcctcagcctcccgagtagctgggactgactacaggtgtgcacacagcacactggctaatttttgtatttttagtagagacagggtttttgccatgttacccagtctggtcttgaactcctgggctcaagtgatccacccacctcggcctccaaaagaagtcctggattacaggcatgagacattgtgcccagctctctgtgtctctttaaaatcatgaaaactcgtagctacttaagtaattctcctgccttctggaatgatgggtgaagatcttgactgccttgcctgctcctcccttggcagatgacctcccttgccacttcacttctgcctttggggcaggcttctgcaccactgtcatcgcctcccctgtagacgtggtcaagacgagatacatgaactctgccctgggccagtacagtagcgctggccactgtgcccttaccatgctccagaaggaggggccccgagccttctacaaagggtgagcctctggttcctccccacccagttcaggcctcttggctatgcatgtctattgtgggtgggagagaaccacctggaagtgagtagcagccaagtgtgactatttctgatcctggtcctggcatttcaccagcattcacctatccccttaattccttcctcccagaattgctaccatcactgtttattaggtgttaaatggagactcaaagggaattcatgcttatagccaagcagctgtgagctcagttcattgagtcctcccagcctcctttgggacagagcaactgggttggattgaataccaggcccagtgagggaagtgggaggtggaggtgcccccatgacctgtgatttttctcctctaggttcatgccctcctttctcccgcttggggttcctgggaacgtggttgatgtttgtcacctattgagcagcttgaaacgagccctcatggctgcctgcacttcccgagaggctcccttctgagcctctcctgctaggtgacctgatcacctttggatttgtctcctaagccgggccatgatttccttttatgcctttttttttattccctccttcccttctctccttccctctttccccacctcttccttccgctccttttacctacccaccttccctctttctacattctcatctactcattgtctcagtgctggtggagttgacatttgacagtgtgggaggcctcgtaccagccaggatcccaagcgtcccgtacccttgtaaagttcagccagaatcttcgtcctgcccccgacagcccagcctagcccacttgtcatccataaagcaagctcaaccttggaaaaaaaaaaaaaaaaaaaaaactgattataagtaaaaggcttacatcttaagagcnnnnnnnnnnnnnncaaaataatttgttggtaactattttatttggggggcttgggtaattttaagcccttcaactaccctttgatgaggcggtgcgtttctttttgaattat

SEQ ID NO: 154637 - DNA, 1969 bp, Homo sapiens
tttttttttaaaatttcaaatatattttattcaaaattctccatttaggagaaaagatatataacaatgtttacacatgctttaataacttatttcactgtacaacttacattctgtataacagtacaataaaccagccaaagaaaataaccagttagcacttaaataagaatctaccatgtaaaaaacacagtatgggacactacaaggtagtatttaaaatattttttaaatgaaccgaagcctacagtacaacagtccaccctagttccagtggttgtcctaaaacatccaagctgtccccacacctttcctgaattcatgatggggaaagcctattatgacctttcacattcgaaccatgtcatttgggttgtgtaaatttgggtggggtgggggggcagaaggggctctattaccctttatcccctttccttataaaatatattttcccccttttatattacttccagaattttaaataaaatatttatttgtgtttgtgtaactacaatgtcaacattgtgttagaattatattaatccagttattttatagccagcaaaatggtcccaaacgcattaagaaaaccaaaagataacttaagctctgccaaagtagcacctaggaaaacagcacttcagtaaaatttctcctgctattcccttatagcctattgcaggcaaacagcaacaacttcaaaaacataggcagaaatgcaagaaggaagtactcaaggaactattttctgtttctgaaaaaaagatcttattagttagtatattctctaaggcattttataatcctcagagtttgcaatgattgcccaaagcaggtacatggtaagaccttagcaagaagaaaacaagatgaaaatgactgacccagtgaaatctgaacttgttcccaagtaattagattttctaaggagaaaaaaggcacaggaggtgcacatttcaatttggctcaaaaataatgaaaattaatttaaaaagttggcaacaattactaaaacataaaatacaatttccttttacagagctcaactacatagaatatcaacaatagcaagaacaataaaataaacaaaacaccctaactgtggttcaccatgaacaaggactatagagaactattagacatttctacagactgaatcccagggactaaatccacaaagtaggatctaataatcaattccaattaaacatctgcttgatcaattttctttctaaagctcatcctatgttcaagctcactttctttctgtggaattgaaatcatttaaaggctctagttttcagttgattgcagaagtattacagtaattctacacaccaaagaatgccaaaagatagaaagtcaactatctgtaaaagcccaactcagatttcaccttgacacatgtaaaccatggaatcatgtatttcaaaaaaacaggtagttgtggtcaagtttacatcctattattatatctttaaaagatagcaataatatttattatattgtaaacataggtctgtatcccaaaagcataaatctaggaaaagagacacccaatgtaatgatgcacctgacatcccctcacaggctcttgtgagaactgtagtgtaacttacttaactgcaattgctgagagcagaattctggagtatgatccaggggaacgtttccccacaccacccgagctactttaccagcgatcatgattgtgatggaataggcttattaagttacacatttaaaaagtcattagaacatctcgttcttgcacactagtgtagaaaggtcttccaaagataaaagagtgtaggcctgggtttaattttctcagccagagccattattatgttaagatcgccctctgctgttaaatcaaggtctatcttcaggttccgaagagatttaaagggccttttttcccttctgcgtatcgtcttctatatattttattagtgtcaaggctttt

SEQ ID NO: 154638 - DNA, 447 bp, Homo sapiens
gccctgctggtgctgggaatagggcgcaagatgtcggcggatgcagctccgaggaggtaggcagtgtttagccggcgtttagtccggcccgtgccaacagtgggtcctctctgccccgtagttcgaggagaccacgcgctgcccctctggcacgatcgtggatgaaccccctggcaactgaaatgggaaaggcagcgcccccgactctggggactggaccgaagtccacggtagtgacaggctgccagaccctgaggagaggacgagaagacccgaggcctctgctacgagcactggcatccgatggaaaattcagacggatttgggacagtatgcagagttctccaagcgacagattaacagaggctcttgaagaataactgcgtaatcacgtgttctgctcaaaagaaggcctgaatgcccagtgccttatttggctttcagggg

SEQ ID NO: 154639 - DNA, 701 bp, Homo sapiens
tttttggccactgtgagcaaggacagcttgagtatttctaatgtgaaaatctgaaatataaaatgcttcaaaatcccaaactttctgagcaccgccatgaacgcacaagtggaaaattccacacccgacttcatgtgacaggtcattgtcaacatgctggcacacaacagttgattcaacatccctaagggaaaaataaaatttccttcaggctatgtgcattaagtttcatttatgaaacataaatgaattttgtgtttagacttgggtcccatccccaagatatctcattatatatatgcagacattccaaaacctgaaaaatttcttaaatctcaaacattctggtcttaagcattttggataagggataatctataattgatttaatgtggtactattttctgcaaatgttgttaaatacaaggactgggacaatccaacaagccacataaagcagaattgaacttaacctcaagaatgatgacaaagactattatgagaataaacacttcttatcttatgtgtaaatatacatgcaataatccatgttagtgatgtttgggtgttgctgacatgctcaccaggaagattaaagtgggtgaactctgacttcctcttgctctgctttttctttctttttaatagtacctattaccttctaatatactatactatttatttgtattgtttaatgttta

SEQ ID NO: 154640 - DNA, 698 bp, Homo sapiens
agggagccgttttcagaagcaggtgagcccagtgaaacaatgcagtggagagaggaaccgtgctgtgcgtgcttccctcttccctgcagtccctgaagattgaaggcagagaagatagcctaccctgatgctccactacataccatggggtagaggtcgacttggagggtggggccagtgtggacaatctcattctgcccgctgtgctgggacaggcacatgtctgcccatgggcacactcatgcacatgcatgaggcctctcggcaggtctgggggggctgcatccttccacttccattcccctacttccttccccctcagctcccatcctagcttggccccagtaacatctgggttgccaaggatgggtggctgagagacctcctggaccctccgtagtatgaatggaccctgggtgtgaattggccttctcctggcatccttgcatactggacagtttcagctccatctctgggcttctcagggcccataacagatgctgccctaccctgtccctataacttgggtggttcctctccccaccccagaagaggctccagattccaaaaaacaggtctctccctaacagagggaaacctcccctttcctcccccaatccctcccactccgtatctccctcatttcctccacatcagggtctggcccgctaatgtggaacaaatgagatgtcggaagg

SEQ ID NO: 154641 - DNA, 1041 bp, Homo sapiens
cacatacttaataatatggaaaggaagagctgtggggaaattaaccctacttacaggtgagatacagttcacatttatagcaacatagataatttggatacatatatcacagataagctagacagttatgtcatctgacatacacttatttgaatagagtgtgatttattggataggttcgattttaaccacctataaatgttttcttttttctggtataaagtaacataattattgcaatacatttttcctgtagtaaatataagttaatactttttttccagttgctcaaaagatttataaatatgtaggttttttactaagaagataattacagaaatcgtgtcttactgtcaatgctatttctaggtgtatgcaaagcatgtatatttctctatctaactgaacaatgctcggcactggaagacttggtgataccctgaaggaataataacatcaatgcaatcaccaccacgaaccttttcccttttctctgctctcactatatgcaggcgctgttctaagtacttttacatggatttctcaacatccctgtcgggtattattattacccccctttttaccccatgggaaaactggaggcatatgggaggataaggcagtctctccaggatcacaaagctagaaattacacccacggtaattggtaaacactatgccacggtattctcgggcaaaatgaacaccttggctacgcaagaattagttttttttccctatataaagtgtttagaaagtatctgctcaaggctgaagcttatggccaggtgtggcggctcatatctatcattttagtattttgggaggccaaggtgggaggatcacatgaggccaggagttcaagaccagtctgggcaacatagtgagaccacatctctacaaatcgggaggctgagatggcttggtttctaagtagctaccctgcctccacacaggagccataatgaaccttttaaaacagaattcagataatatcactccttggctcaaaaccctacaatagtctctcatttcactttg

SEQ ID NO: 154642 - DNA, 409 bp, Homo sapiens
aatacattgcctccatggttttaattaccttcattttcagctgctgcatccgtacagcgtcctcctgccccgccagctctggcgtctccatcaacgtgcccagccgcgtctgctccagctcctgcaggctgcgcacgtggccggcgagcagcggctgcctgcgaggcccgcccagctctgcttccaccgccagcacctcccgcgaggcggcggcgaaggcctgggtcaccccgtgcactgtgctccggtagcgcgcgaggtcgtagtcagggccgctgcgcaggtactggcggtggcctctgcggcatgtggggaccctgaggccgcgcccccaggctctcaggccctgcaccggcgccaaccacctgaaaggcccccaggaagtggtcccagacaccaaaggggagga

SEQ ID NO: 154643 - DNA, 414 bp, Homo sapiens
tttttttttacagaggaggagctctttattgtgggaggtgtctggaactgcaggaaggtcagcagtgcagtggggcgcgaccccagccagctggcagttagggctgggctgggcgccatccgccccgtttcccatctccctcggcgcatccctggggagccgccatcactcggcagattccgcatcaaacctaaggtcctggagaacctcgctgatcgcctccatggttttaattaccctacaagagcggatgggaactataaataaaacccagatggggtgaattagctgctgccgcgaagctgcaagagggctgtggctgtggtgagccccaggccctcctgcccgccgccaaacctccaggcagcactagcagcaagagggaacacttaggtgctagctcttcctcgtgcc

SEQ ID NO: 154644 - DNA, 911 bp, Homo sapiens
tttttttttttttttttaacagaggaggagctctttattgtgggaggtgtctggaactgcaggaaggtcagcagcgcattggggcgcgaccccagccagctggcaattagggctgggctgggcgccatccgccccagtttcccatctccctcggcgcatccctggggagccgccatcactcggcagattccgcatcaatacctaaggtcctggagaacctcagctgatcgcctccattggttttaattaccctacaagagcggatgggaattcattttcagctgctgcatccgtacagcgtcctcctgccccgccaagctctggcgtctccatcaactgcagcagggccaccgtgcccaagccgcgtctgctccagctcctgcaggctgcgcacgtggccggcgagcagcggcttgcctgcgagggccgcccagctctgcttccaacgccagcacctcccgcgaggcggcggcgaaggcctgggtcaccccgtgcactgtgctccggtagcgcgcgaagtcgtagtcaggcgccgctgcgcaggtactggcggtggcctctgcggcatgtggggaccctgaggccgcgcccccaggctctcaggccctgcaccggcgccaaccactcctccagtcggcggaagccctgcgcgcgctcagcctgcagctggtggatgcgctgcaccagcgtccggatcggggcgtctttccagggccacgccggctcctcgcgtccccgagcttcggtggcctcctcagcagcaggcactgcagggaccgtaggctccgccgcggtctcggtgatcatgactgcgcagccctggccaggctccggagcaggcccttccgctgcgcccgacgccccctacaggccggaaggtccacggaccccctaccctgcgaccggccagc

SEQ ID NO: 154645 - DNA, 528 bp, Homo sapiens
ttatcgaagggcactgggggtgggtctgctgctgccctggggagtagccgaattgctgctgggaccccgcgggggacctggagtaggagccagggtagccgccaggggacggagacccgaaccggccccccgggaagctgccgccgtgtcgcggagagtgactgctcccgtacggcctagaccggggcccgtacggcggcgtgtggtgcggactcccgtacccgtcggaactgtatcaaccggccctccgcagagaactgctagtcctttaccaaaacagtcctccgaccgcagccaccggagttcgccgcttgcaccgggaccgatgccatctgagacgcacgcgatgctggcgacgctggcgagggtggcagctctgcgcagaacctgcctcttctccggccggggcggcgggagggggctgtggactggccgcccgcagtcaggtaccctccgagattcggtctgggtggctaaagggatccctgccccagcttgcctcctcgggcgcccttgtgatctgcccat

SEQ ID NO: 154646 - DNA, 1180 bp, Homo sapiens
actggaaaggttgatgctgggcttgggcgtccgccctttcttgtcttcttttcttcctcttttcacttaaatgcgctgagtctctcgccaagtcagtgatttaggtaatcccgccgcccctggcggaacctttgtgacgccggaactgatgtgccgtaaggtggctgcggtcggaggactgttttggtaaaggactatcagttctttgcggagggccggctgatacagttccggtgggagaacgcggctgcgaggttttcggctttggctcctgatatgcagcgacagaattttcggcccccaactcctccttaccctggtccgggtggaggaggttggggtaccggaagcaacttccggggaaccccgggcgggggcggaccacggactgccctcccttcgagacgggtacggggagtccgcaccacacgccgccgtacgggcccccggtcttaggcccgtaacgggagcaagtcactctccgcgaaacggcggcagctttcccggggtgcacggttcgggtctccgtcccctggcggctaccctggctcctactccaggtcccccgcggggtcccagcagcaattcgggctactccccagggcagcagcagacccacccccaagggttctccaaggacatctacaccatttggatcagggcgtgttagagaaaaaagaatgtctaatgagttggaaaattaatttcaaagccttcaaatgcttgaagatcccttggggctggcctagaacccaggggatctgtagtggatataagcccaacaatacagcaatactcaaacattcacaggcaaaaaaggaagatactttttgttaacattttttctgaaattcaactggaagcttcatgtgtcaggaacattccttggacaaaaactttaagttgtgttgatataaatttaccccaaagatgatgactttgattggataattagtaaggtctttttgttatttttcatcgtatcaggtattgttgatattagagaaaaaagtaggataacttgcaacatttagctctggaagtacctgccacatgttagagatttaccgttgccatgtgatttaacattcctggttacataatggacatttgtcttttaaatgttttttcaatgttttaaaattaaaacattttgtcttctaaaaaaaaaaaaaaaaaa

SEQ ID NO: 154647 - DNA, 721 bp, Homo sapiens
cactgtttgtcaacacacacaatacaaggaaagcagggagtctggggctttttgcaggcgggcctggggtctcagtggaggggacaaaggcaagcaaaagcccatgtccaggagccctgggttgtccccacaggcctcgcctcaaaagagcctcctttggggtgagcagccttgtattggccacaggtgcactaaattgactgtgaatcccaaacctccccagaccagccaggccgcctgcccccacccagaaccttccggtttgccctgtatggaaagccactctcagaaatccctctttcctgagtcagcaatcgtggcaaggggacatgtgttccaacagcggctggggagtggacctctctgtcccttgcccaccttaagccccaaatccagaccccctctgacatcactggcattgcacctgggtgtgcccccctccccacgctatggacccagataggaggggttaggcatgggggaggcacagaatgctggagagatgcgtcctggtgaaccgtggggcaagccctcccaaggacccccaacagaactggccttaggttttgtcagccccactccctttccttcccctctgcctcccacccactctgggggtccacatcaagatagctgggcccagtgtggaagcccaacgtgtctgttctagcagaaaggacacaagcctggtgttctggagacctcggctcaagtctttgcc

SEQ ID NO: 154648 - DNA, 392 bp, Homo sapiens
aatacagcctatggtagtaatgctgagtttgtttttgatactttccgagcaaagattttcagtggcaaagtctgtagcatgtttcttatgttcagggagttgcatatatttttgttccaggtcgtcaacttgagctataaaggagttttcagtaaagctatcatagtcaccaaacatgtccacttcactgtcattaggctcaaccggcagtacgcccgcggttttccgcctcctgttctcagccaccatttactcctcctctttcccctcatctccgggctcgagctcggccgcggagggagcgccaaaaatacaccccaagcttggacggtttcttttggggagagacacccgccggcggatgcgggaaccacattcatccatggcaagga

SEQ ID NO: 154649 - DNA, 794 bp, Homo sapiens
gtaggagctgcagttatctggaagcctagatttgtgtctcagtcatgccacttaactgctgcgtgcacaacttttatgtctcggggtttacatttcatatttatatagaaatgtaaataacaaggcaatcaatacctcctaagtgccgattaacagtggtaacgaagacgagagaagtaaacgaaggcgataaaactggtcaactctttgcatctgggaaggatgccaaaagtttgcagtttcaagttccaagtcctccgtacctggtctcccacccctctgtcagtgggcatgtgacgtaggaggtccgggtttagtatcaccacctccaaggacgagacattccggggaatctgagagtagaagggtctgtacctcacccggcagtacgcccgcggttttccgcctcctgttctcagccaccatttcctcctcctctttcccctcatctccgggctcgagctcggccgcggtgggagcgccaaaaattcaccccaagcttggacggttccttttggggagagacacccgccggcggatgcgggagccacattcatccatggcaaggacccagggccctattcagacgtcgttctcagtgacccagacgataagcccatatggaagggagagtgggacgccggagcccgcttctacatccaccttgggaaaagaccccaagctagctctcagggctcacggaccggaagcaagcataaaattatcccctgtacaatcataaaacgcgcgtccgcggacgcgtgggtcgaaactgcagttccggtgcggtacct

SEQ ID NO: 154650 - DNA, 944 bp, Homo sapiens
gaaacattttcaagtcattttgagaggccttacctccagttcaaagctgagcccccactaacctccagaggattcgtggaaaagagtactgccttacacagaatcagtgctgaacatccagagagcatgatgagtgaagtgcatgagagagctttacagcagcaccctcaggctcagggtggtttgctagaaacacgggagaaaatgcatgctgataataacttcactaaaacccaagataggctgcatgcttcctctgatgcattctcgggcctcaggtttcaatcaggcaccagcaggggctatcagaggcaaatggttcctcgagaagagattaaaagcacatcagcaaagagcagcgtggtcagcctagctgacacggcacctaatttctccaggctcctgtctaatgtaactgtcatggaaggttctccagtgactttggaagttgaagtaacaggatttccagagcctacactgacatggtgggtagcctataatgacaagccataaatggaaacaaattcaatcacagagaaaaatcattctgtgagcactaactgaaaggtttagggctagctgattaatattctatgacactgcaactctgcatgattcaatctcacatcagacccctctcattttagtagcagcatagttaatacctttaagaaaaataaaaggtaaccatataaagtactaataatttaacaaatttccaaagcactgtaggttggttgtgcttgttttcttctgtgtttaacattccacatttctaaagattgtgggttgaaattattttttattgtctatttccatataagcatggcatctgcttgctttaactacctttatgcaattgaaaatataagaatttgtttttatttccctttactctcatttacctctttcatctttttcctctttccaacagagtcacacgt

SEQ ID NO: 154651 - DNA, 644 bp, Homo sapiens
  misc_feature (1)...(644): n = a,t,c or g
ctgtgcagtccagaagccagaacttcctctaggaaactgataagtagtttgaggttacttgaaggaaaaaacaaaagcatctccaaaaatagaatgtcttgctctggacatctaaccagatgaaaatatatcatgaatagtaggcaggaggtactggtctgatatttgggtatagaatggaagcatcagttgagcactacaacatccatactgcaaggacagtccttctgtgctcttccccagggnctccattttttttttaagaaattaaatttgtaagatctattaaagactaacatttccaagtttgaagtttcctatttaggatccccagaatttttaaagggcaaggcccactatattaactcagtaccatgttacatcagcacctgttatctgtactcttgaaactgtctcagagcttgtatgttgtctatagtttctttcttatccaatctactctccagagtggcaccagagttacttttctaaaatgcagattacaggcaggcgcggtggctcaggcctgtaatgctagcactttagaaggctgaggcgggtggattgctcgagcccaggagtttgagaccaacctgggcaacagagcaagaccctgtctctaataaaaaaaaaaattaaaaaat

SEQ ID NO: 154652 - DNA, 479 bp, Homo sapiens
  misc_feature (1)...(479): n = a,t,c or g
cgagactgttttccctgtagcagataacagaacctacgatgaaatggttgggtgggtgacgtagacgactactcgctgcacgggggctgcctggtcacgcgcggcaccaagtggattgccaacaactggattaatgtggaccccagccgagcgcggcaagcgctgttccaacaggagatggcccgccttgcccgagaagggggcaccgactcacagcccgagtgggctctggaccgggcctaccncgatgcgcgcgtggaactctgagggaagagttagccccggttcccagccgcgggtcgccagttgcccaagatcaggggtccggctgtccttctgtcctgctgcagactaaaggtctggccaatgtcttgccccaccccgccagccgcgatacggcgcagttcctatattcatgttatttattgtgtactgactccatctgccccgtcaaataaaaaaccacaaggttcgaaaaa

SEQ ID NO: 154653 - DNA, 1763 bp, Homo sapiens
ggtgccatggcggcagcggcggtgacaggtcaccggtctgagaccgcggaggacgaggaggcctcgaggccgcagtgggcgccgccagaccactgccaggctcagttttgctgccgtgctgggcgacggcgaggacgcaccggtgcgtccgctgtgcaagccccgcggcatctgctagcgcgcctacttcctggggctgatggtgttcgtgcacctgtacctgggtaacgtgctggcgctgctggtcttcgtgcactacagcagcggcgacgaatgcagcgagcccgggccccaacaccgtgcccagggccccgggcccgagcccaccttaagtcccctcacccggctggagggcatcaaggtggggcacgagcgtaaggtccagctggtcaccgacagggatcacttcatccgaaccctcagcctcaagccgctgctcttcgaaatccccggcttcctgactgatgaagagagtcggctcatcatccatctggcgcagatgaaggggttacagcgcagccagatcctgcctactgaagagtatgaagaggcaatgagcactatgcaggtcagccagctggacctcttccggctgctggaccagaaccgtgatgggcaccttcagctccgtgaggttctggcccacactcgcctgggaaatggatggtggatgactccagagagcattcacgagatgtacgctccggatcaaggctgaccctgatggtgacggagtgcttgagtcttcaggagttctccaacatggacctttgggacttccacaagtacatgaggagccacaaggcagagtccagtgagctggtgcggaacagccaccatacctgtctctaccagggtgagggtgcccaccacatcatgcgtgccatccgccaaagggtgctgcgcctcactcgcctgtcgcctgagatcgtggagctcatcgagccgctgcaggttgttcgatatggtgaggggggccactaccatgcccacgtggacagtgggcctgtgtacccatagaccatctgctcccataccaagctggtagccaacgagtctgtacccttcgagacctcctgccgctacatgacagtgctgttttatttgaacaacgtcactggtgggggcgagactgttttccctgtagcagataacataacctacgatgaaatgagtctgattcaggatgacgtggacctccgggacacacggaggcactgtgacaagggaaacctgcgtgtcaagccccaacagggcaccagcagtcttctggtaccaactacctgcctgatgggcaaggttgggtgggtgacgtagacgacttactcgctgcacgggggctgcctgggtcacggcgcggcaccaagtgggattgcccaaacaactgggtttattgtggaaccccccagccggaagcgcggcaagcggctgttccaacaagagatgggccgccctgggccaagaagggggggccccaactcacaacccgatgtgggctgtggaccgggcctaccgcgatgcgcgcgttggaactctgagggaagagttagccccggttcccagccgcgggtcgccagttgcccaagatcaggggtccggctgtccttctgtcctgctgcagactaaaggtctgggccaatgtcttgccccacacccgccagccgcgatacggggcagttcctatattcatgttatttattgtgtactgactccatctgcccccgtcaaataaaaaaccccaaggttcgaaaaaaaaaaaaaaa

SEQ ID NO: 154654 - DNA, 708 bp, Homo sapiens
ttaaggggagtaaggaatatgatcaacaggcagcaggtggttagatgagaggtctagcatctcattgtaaccaccctcagccctcttggtgccagcagacacatagccacaactcctctcatcccacaatgcaggtctaactcctccactattacattcatagggtttctcccctgtgtatgttctatgatgtgcaatgagttttgacttcacacagaatgattttccacattcattacatccatagggtttctgtcttatatgagttctctggtgaacaattagggccaacttctgatggaaggttttcccacattcattacatccaaaaggtttctcccctgtgtgtcttctcagatgttttaaacgaggttttcccacattcatgacattcatgatttctccccacgtgtgttctctgattttgagtaagggatgacttttcactgaaggatttctccattcatgacatctgtaaggtctctcccctgtgtgaattctttgatttctaatgaggtctgaattcttatagaaggtcttcccacatccgtgacattcatagggttttccctgtgtgtgttctctgatgtcttgtgtgggctgacttctgggtgaaggtttttccacattcatgacattcataaggtttttcccctggatgtgttctccagatgactctggcttcgaaatttttcctctaatatccat

SEQ ID NO: 154655 - DNA, 2322 bp, Homo sapiens
atgattatctcaatagatgcagaaaaggcctttgacgaaattcaacaatgcttcatgctaaaaactctcaataaattaggtattgatggaacatatctcaaaataataagagctatctatgacaaacccacagccaatatcatactgaatgggcaaaaactggaagcattccctttgaaaatcagcacaagacaaggatgccctctctcaccactcctattcaacatagtgttggaagttctggccagggcaattaggcaggagaaggaaataaagtgtattcaattaggaaaagaggaagtcaaattgtccctgtttgcagatgacatgattgtatatccagaaaacccgatcgtcgcagcccaaaatcttaagctgataagcaacttcagcaaagtctcaggatacaaaatcaatgtacaaaaatcacaagcattcttatacatcaacaacagacaaacagagagccaaatcatgagtgaactcccattcacaattgcttcaaagagaacaaaatacctaggaatccaacttacaagggatgtgaaggacctcttcaaggagaactacaaaccactgctcagtgaaataaaacaggatacaaacaaatggaagaacattccatgctcatgggtaggaagaatcaatatcatgaaaatggccatactgcccaagggtattgcatcattcacagggtattgcattcctaaaccagaagtgatcctcaaattggagacaggcaaggagccatggatattagaggaaaaatttcgaagccagagtcatctggaggaaccttctgaatataataacaatgggaacagcttctggctgaatgaagacctcatttggcatcagaagattaaaaattgggagcaaccttttgaatacaatgaatgtgggaaagctttccctgagaattcactcttccttgtacataagagagcttacacaggacagaaaacatgcaaatatactgaacatgggaaaacctgttatatgtcattttttattactcatcagcaaacacatccaagagagaaccactatgaatgtaatgaatgtggagaaagtatctttgaggaatccattctctttgaacatcagaatgtttacccattcagccagaatttaaatcccactctaattcagagaacccactcaattagcaatattattgaatataatgaatgtggaacctttttcagtgaaaaattagcccttcatttacaacagagaacacatccaggggaaaaaccttatgaatgtcatgaatgtggaaaaaccttcacccagaatttcacagaacatctgagaagacacacaggggagaaaccttttggatgtaatgaatgtgggaaaaccttccatcagaagttggccctaattgttcaccagagaactcatataagacagaaaccctatggatgtaatgaatgtggaaaatcattctgtgtgaagtcaaaactcattgcacatcatagaacatacacaggggagaaaccctatgaatgtaatagtggaggagttagacctgcattgtgggatgagaggagttgtggctatgtgtctgctggcaccaagagggctgagggtgaggtgtggaagggacagggggaggagatgggcagcattgttgagagattggtaacactgagcaaataaatatgttgagaatgatgacagcaagatttctccattagagaaggtatttataaaaataggaatgaggagagctagaaaacctggagtgtggcattagaatagaactcatatcttttaaatatataggaacaaataaataaattgttgtgtgtgcacatatgcatatattttgtgttcattctactgagaggacctaaacacaatgacacctcagtaacagtaagcacaccaactgccaagttattagttcctaaatactatccacaaaaaaggggaacagggatgattcctagtcagagattgggagaaatacaagatgagcctgaatcatctcatgtacctgacagtaagaaaatactctggctggtctcagtggctcatgtctgtaattctagcatgttagaaggtcaaagtggggtgggttgcttgagctcaggagtttgagaccagcctgggcaacatggcacaattgtctctacaaaaaatacaaagattagccaggcatggtggcatgcacctgtagtccgaggtactcaggaggcagagacgtgggaggatcgcttgagcctgggagattgaggctgcactgagctgtgatcgtgccactgtactctagcctggaagacagagtgagacccgatctcaggaaaaaaaaaa

SEQ ID NO: 154656 - DNA, 1159 bp, Homo sapiens
ttttcctgagacagggtctcactctgtcttccaggctggagtgcagtggcatgatcacagctcgatgcagtctcaatctcccaggctcaagtgatcctcccacctctctgcctcctgagtatctcggatgacaggtgcatgccaccacgcctggctaatttttatattttttgtagagacagttttgccatgttgcctgggctggtctcaaactcctgggctcaagcaacacacccacctcgacctcctaacatgctagaattacaaacatgagccactgagcccagccagagtattttctttctgttaggtacatgaaatgattcaggctcatcttctttttctcccaatctccgactaggaatcatccctggtccccttttttgtggatagtatttaggaaataataacttggcagttggtgtgtttactgttactgagctgtgactgcatttatgtcctctcggtagaatgaatcacaaaatatatgtatatgggcacacccaacaatttctctattgttcctatgtatttaaaagatatgagttctattctaatcccacactccagggttttctatgctctcctcattcctatttctacaaataccttctcctaacagggagaaaccttgccatcatcattctcaacatatttgctcagtggtaccaatctctttaacaatgctgccccatctcctccccctgtcccgttccacacctcaccctcagccctcttgggtgccagcagacacatagccacaactcctctcatcccacaatgcaggtctaactcctccactctgggaagggaaggcaaaagagacacataaaaactcaaagaggggaatcaaaagaaagaggaagggaaggccacattgattttttaaaaaataataaatcatcttttgattgccctaataaacatctcttggtgatgatacagtttatggatatgactagactttttttttcaattttaggattttgcatctaaatctatgagactttggtctatagctttatgttttttgtttgtttgtttgttttattggttttggtatcaaggttgcactggcctgaaaaactgaattggaaaagttccaacttttttcttctagaagagtttataaaagcctggtatgctttatttattaaat

SEQ ID NO: 154657 - DNA, 416 bp, Homo sapiens
  misc_feature (1)...(416): n = a,t,c or g
cagggctgagatcccgacagctggcgaggtctgggatggggcggggcctatgggagcggagctgaagccctgggcccggcagaggaaggtcgagatggaccatgttgggccccttctctccccgcccccaggccgcagttcgggggccacgccccggcgtgctcgggtcaccgcgggaagcccttgaaccccctggcgcccggcacccacgtgcggtaaccgcggctcctcgagagctccagggatgcggatctacagtaagggctgtggccagatgaatgaatgcacattntttagtgggcagaaagatgttagaattcatgaattagaatatgcacaaaggagggcgagacgggaggccgtggaagccgcattcttcccctttgcttgtgcgcncacccccgaatgggcgcgtg

SEQ ID NO: 154658 - DNA, 1566 bp, Homo sapiens
gctcttttgggttggtttgttaatttatacaaagagattaccaccaccaccccctccttcagacggcggagttatattctgggttttgtaaaactttatgtatctgagcatttccatttttttttttgggttttgtattatttcttgtaaatgcattgtgaaaaattttattttcggcgttgcaatgcggggaggagaagtcagattatgtacatagttttcctaaaaagcctttcttcctaaaaacgaaaaaagaccccccacccaaaatgtttcgagtcaacaaatttaagagacagagcccattttctccataaatttgtaacatgctatttttatgtgcatgttttatgagttcaaaatgcaatgagggaaatctgacaggggaaattatctgtatgaactaaaagtaaggggaaccccggggaatggggaggacagggttttttcaagggaaccttttttcaatggaaaggggaagggaagtttaaaacctataggggttattttgtagagctgagtgttaatacgggccgagaaataaaagtatcttctgctccggctgtttcactgcggacggctggggctgctgcgcgttaccttgctgcaagcggggcgccttccacctggctgggggtctgcgccacagtttggtccagaggagggaggaggaagggaagaccccagtggtgggaccctggaccaggccatggatgaaggacaaagaccagggcaggtcacgggtttcccaattccccagcaattaagatttcgagcagaattttatcctaaatgtgtttcaaggaaaaaacaatcgctgaaccaaaaacgtactgcagccgagccccctccgtccatcctctgcccctccccctggcttctttctcttgggaaaacgggcaaaataattgtgctggattctcacacacacagaaatatcgaccatcaccctcccccgcgtgaactgggatgcaagttgctaaccgatgtgaacgcaaaatgccttgttcattattcctgacgagatcttgaggttgtttgatgctttaaatttttttaattatattattttctaggtgtttattggtacattgcagttttttttttgaaatttaaaaatttctgtaaaactttgtcttcaagtaatctgacagcattaaatattgcatttaaaaattatactgtagcaaatacatttaaaaattaatcacaacgttaagatgaaattatatttttggaaaaaaaaaaacacttgaagcccagatggaaatacgtttatttcagcagccttaggtttcccctcgctttctcaacacccttccttgtcctggagtatggactgtccgtccaaaagtgagcctatgctataagtttaatgagaaccgaattcagcctgcattcgagaatagctttaagtataatgctgatctgacaattgacgtgtaatttgggaagtcattttgataattttgcttaaaccactcattcgttaaagtgattacaaaaaagttcaagaatgatgtccactgctttctaacaagataataaaccccccccctcttttct

SEQ ID NO: 154659 - DNA, 1688 bp, Homo sapiens
  misc_feature (1)...(1688): n = a,t,c or g
tttttttttttttttacaagatgttgcatcactttacctttaattggcatggatttatcagaaccaactattaaccatacgaagtcccattcagtccagctgcaggtataggcagtgacaagtatctaattcttagaagaatcacttactcccacaatctgtccagacacattaatctaaggacaagtttataaatagcaaacgtggattttcaacattgcagtgttctccaagaatgtatatacaagtgtggtagtcctgttgatggggatgtttccccgagttctttctattgatgcgttcaatgctccttggacccccgggtagaagaacagttctttcctttcccnacaagagcagattttccttttgtcaatcccacccatttacaatactctggtggaattagggattaccttattaccatttatggaaacgggcaataatttggattgtaataggctcttcagtaccaattccttgtgtcctcgggaaggtctcggcacattcaggagaggctttaaggtaaaatccattttccgtgcaacaacagccaaacgtcaactattgagtttcagtgtgacacaccctctttgtagcttgctgggttaacccttggccttccaagtccctgaatgatgtaatgagggtggggtgtattggcaatcagtacatttcccttatcgcaatttacagtcattgaaaatcatgctgtcattaatcccagtctgacatacccttttcctaaaatggttcacagtgcagtgtttttgtggccctaacaaaatttttccccatatccattaaaaataaacatttttataaaaaatataacactttaaatgtttacgtcgacaaaaccagttagagtaacctacaccacatgcactatacagtagtaagcacaaaattccacagaatgaagcatcacaaagttctgctcagggtggctattccatctaggtgaaatagctgggattttcaattgcctttttcatttgtttactaaagtatgttttgcttaacataaaacacaccctaatgcaaaataaaactcccccaaaagttttgtttcccaattgcttgccgaggtgggaacctgcccaccgagacagaggcctaatcttttcaatcccatcccaccctttctttgctctacctatgagctgtgaattgggaacccaatgaaccttttaagtaaaatggtatccctgcctttaacaaacatgcctgagttatctttaaaaatatttatcaacaaattacttgtcttattttgagttttcatttaaaaaaatacacacaaaacatctacatgttcacattcattagatcagagtagcatcattctcaaacagtgggtttttatatgacaactaaatatttcatgatgactaaattatttcatacaaattttcttaatgtcatctatgtacattacatcctgttcatttataaacatgttttgtgtgatgctattttgaaactttgactgtattgcctataaatattcttccaaccaaaggaatgtctatacaaaaatttataagggctgggcgcagtggctcatgcctgtaatcctagcactttgggaggctgaggtgggtggatttcttgagtccaggagtttgaaaccagccttggcaacatggcaaaaccccgtctctacaaaaaatacaaaaattagc

SEQ ID NO: 154660 - DNA, 1136 bp, Homo sapiens
  misc_feature (1)...(1136): n = a,t,c or g
cgaattccaattatttaagtaagctgttttttcctttcttttctttcttttcttgttttaacttctgggtgaggttaagattttctaatagttattgttgttgccagagaagcatagaattctgcttgtgtcttagggttagagaaagatttgttatattttgaggtaatttggaaggactttcatacatggtgactagaaacctgatctttttaagaataaaatagggtcactatttacattatatataatatatggctattatagctatattaatctactttaattgtttctaagattattttgtgtaagtcagctagcgtgtgtatagtgtcatttcttatgttttgtatattaacgttttacaaacacaatttgtgtgggtttgtagcatttcttatagcttaaagtatgattcaccattctaagttaaaactaatatgtgaagtcagtcattagtctgcataatctctgtctccctctgtgcgtgtctttctataaagcacatgtgtacacacacacacacaaatatactgaaagctagggtaagttctaaactgaatatcaaaaaccaaaatcaagaacaaagaagtgatattttccaaacaaacatgggattctctgccgggtgcagtggctcagcctgtaataccagcctccactttgggagtctgaggtgggagtattgcttgagctcaagagttggagaacagcctgggcaacatggtgagacctggtctttacaaaaatttttttggccggacgcagtggctcacacctggnaatcccagcactttgggaggccgaggcagggtgatcatggaggnccagagtcgggggccatcctggccaacatgggggaaccccggnttnaccnaaaaattccnaaaatttagcctggggantggtgcngtccnncctggaaggccccnaacaaactttgggggggctaaaggcaggggnaancccnttnganccccnggaggcgggagggttccangtaaagggggngntancngccantaaancnccnagcctggggggnaagnnnaaaaccccccccccnaaaaaaannnnanaaaaanccncgggggggggaaattnccnaanccctttgggacccccctnnanggggg

SEQ ID NO: 154661 - DNA, 1891 bp, Homo sapiens
aatttttttttttttttttttttttgcatccgtttcctgaaaaattccggggtacctccccaactaacaggtaaaatacattttaaaagagtaatattccttccttcctgtcctggaactactcaatgagcacaaagaaaacattttctgtcttccttaacagatttaggtattggtgggtgtggggcacagaacatgagcaaacagcttctgtttatcctctcagccacaaattcgcttttaggtatattttcctatacccttttgcaaattacaaaatcaccttcagaggaactatgggtagatgggattccaatatgcatatctggcaacaatcagcttcaaatcaaaccctttctggggtggctaaagatccagctaattggtgtcatcagcaaaggcctctaatatgtgttttgccgtaagtaatggaaacaagtttttaattggggcctgtttaattagttgactgacagtaagttctatatggtatataacactaattctctagtcttctgggcatatctacgaacaaatacaatccaaatattatgagtaactgggttgtgaccactgcatgcattacactgaaagaaacaccaactcgaagcacaaatatattattcttatatttcggctcagctctcagtggggagagcagctacctcggaccacaatgccatttaaaccagattcttttcaaataaaattctcaatctaagtggaaagccccctcagagaatgccttattcccctactaagcaatccaggcttgtataaaacgtctgataaggcctgtagtgcccattgagtatgagtctgctgtttacattctgcacaggccaggaggggaacagaaggtgtgagccacaggtgctcctgggtctgaccagcaagtctaacccatgaagatctcgagctccaaaaccattctagagcccaccattttgattgttacacatgtgtttcagatgtatgttatggcatatctgaaacagcagagttctcagttttttgtgtgtttgtttttgctaagctaaacaagttttgctagagttcgctaaaacaaggtgctcagagtgtaagctcctctgtcaggaaatcggcagcactggtcacgataaaggagaaatcgtcctttgtcaagcacagaattactccttccagcagctctacatgttcccatcctcaagaaattgcaccaagagtgagctacctgcctatccctggaaaagattcagaagctcctaatccagaatccagggaggagatgagcttcctgtgactcttctcttttactgggatgttcccctgacctctcatcacactttactgtgttgtgaaatattgtttctcttagtttgtaacttgtctggtcttttgactaaacaactatctaaagaatatagaccacactcctgcagggaaagggatgtcttactggagttgtatttggaagctttataagcacatctgagacgttctctagaatcaaaatatttgtctatatttgtttttgcagttttcttacatatcagaacctctggcagcccttgcaagtccattatattaaaagccaaaagccataaatatgtacatcatagttcaaagtataagtaccaagaacaaagaaagttgtaaaaaatgctgtgtttgcatttacaggactaaaaactaagtatgcaacagataaattacaaatgtacatctcagcagcataggggtgattctcttatctttctaaaaaacacactgctgtctataatgacaatccaattgtggaaaattaccaacctcagaagacttaaaggtcaccacccccgcccctactacctttccctttagcctctccccagcaaaataaagaaaagggggaaaaaaataaatcctt

SEQ ID NO: 154662 - DNA, 167 bp, Homo sapiens
gaaccgtccgtgttctcagaaagcccagtggctgattccaatgctttcacgttggttcctggcgtgggaactgctctcctttgcagccccatttcccaagctctgttcaagttaaacttatgtaagcttttcgtggcatgcggggcgcgcacccacgtgcccgctgg

SEQ ID NO: 154663 - DNA, 416 bp, Homo sapiens
  misc_feature (1)...(416): n = a,t,c or g
tcttggactgctcctgaggaggccctcttttccagtaggaagttagatgggggttctcagaagtggctgattggaaggggacaagcttcgtttcaggggtctgccgttccatcctggttcagagaaggccgagcgtggctttctctagccttgtcactgtctccctgcctgtcaatcaccacctttcctccagaggagaaaaattatctcccctgcaaagcccggttctacacagatttcacaaattgtgctaagaaccgtccgtgttctcaggaaacttgcttggaaatccttggctggactatagaagctcagaaggacacagnccggtccttcccttggcctggcctgaattccaatggntggttgngctgattccaatggcttcaacgttgggtcctggccgtgggaactgc

SEQ ID NO: 154664 - DNA, 418 bp, Homo sapiens
ttttttttccaaagaattgtaaaatttattgtataagtattgcagcttttcaaaatgtcatcattgccactaatgattactgatacacaacaagcagtttcttcaggcctgtggattggcatccaaatacagagtcttacgcagcggggacgtgggtgcgcgccccgcatgccacggaaagcttacataagtttaacttgaacagagcttgggaaatggggctgcaaaggagagcagttcccacgccaggaaccaacgtgaaagcattggaatcagcacaatagccatggaatcaggcaggcaggggaggacgggctgtgtccttctgagctctatagtacagcaagatttcaagcagtttccagatggttacggaagcttcgtgttgcacataggaaaaaaaatttctctgaaacgt

SEQ ID NO: 154665 - DNA, 396 bp, Homo sapiens
gaaccacgcatgctgcacacgcgttacgtatcggatccagaattcgtgatttcccgggtcgacgatttcgttgctaccatcacaggacctcgctaatcctgactgatagagataagtatccatttactcctgtaatccttaccagccttcattcattttgctttcttcttccgtctttccctagacaatctcctcccgctgtgtacagcaactatgtggggaactatttgttctatttgttaaacaaaagaagtgatggctagaagatagaataggtggtgctataacatctctgtgatctgaattcctcgccaagcttctcgagcttaggctagctctagaccgcacgtgtggggggtcaagctctcgcccgctgtcttagatagtgtctcttac

SEQ ID NO: 154666 - DNA, 414 bp, Homo sapiens
  misc_feature (1)...(414): n = a,t,c or g
ctcactatagggaaagctcggtaccacgcatgctgcagacgcgttacgtatcggatccagaattcgtgatttcccgggtcgacgatttcgtgggcacgtgaggaagagagagttcccgggtcgacgatttcgtatgaacatcgtactgagcaaaagaagttaaagctcctccaaaagaaacaggtacaaattcaaaaagaaaaggaccagttacaaggtgaacacagcagagctatcctcgctcgaagcaaattggagagtctgtgccgggagctgcagagacacaacaagactctgaaggaagaggcgcttcagcgggcacgtgaggaagagagagatctnnnnnnnnnnnnnnnnnnnncgagcctaggctagctctagaccacacgtgtgggggcccgagctcgcgcccgc

SEQ ID NO: 154667 - DNA, 396 bp, Homo sapiens
tgtgttctagagctaacctaagctcgagaagcttggcgagcaattcggatttctcctgaagagctggttggattttctccatctgcttggttagaaaatctatcttcctcttgaagaagtccttggcatcctcagctgtcttctctacatagtacccagttcccacatcgatgagcacgtgttccacatcatgcagcttcccagggacatacatagaactcgtcagtgggacgagtaattctttcccctcgttgctcttgttcagcacgttcagacagtccttggcttccacatacttggtctgtaccactttgagctgagcaatggacgtggaccagaactccacttcctggtccagctggttcttgagcatttctagctgcggcagaacgaaat

SEQ ID NO: 154668 - DNA, 911 bp, Homo sapiens
  misc_feature (1)...(911): n = a,t,c or g
tttttttccaaagaattgtaaaatttattgtataagtattgcagcttttcagaatgtcatcattgccactaatgattactgatacacaacaagcagtttcttcaggcctgtggattggcatccaaatacagagtcttacgcagcggggacgtgggtgcgcgccccgcatgccacggaaagcttacataagtttaacttgaacagagcttgggaaatggggctgcaaaggagagcagttcccacggaaagcccagtgtttttgcaaagaatgaaaagggaccccatatgtagcaaaaatcagggctgggggagagccgggttcattccctgtcctcattggtcgtccctatgaattgtacgtttcagagaaattttttttcctatgtgcaacacgaagcttccagaaccataaaatatcccgtcgataaggaaagaaaatgtcgttgttgttgtttttctggaaactgcttgaaatcttgctgtactatagagctcagaacaacttttcaaaatgtcatcattgccactaatgattactgatacacaacaagcagtttcttcaggcctgtggattggcatcccaaattacagagtctttacgccaacggggacgtgggtgcgcgncccgcatgccacggaaagcttacataagtttaacttgaacagaacttgggaaatggggctgcaaaggagagcagttccnacgcnaggaaccaacgtgaaagcattggaatcagcacaacagccatggaatcaggcaggcaggggagataattttctcctctggaggaaaggtggtgattgacaggcagggagacagtgacaaggctagagaaagccacgctcggccttctctgaaccaggatggaacggcagacccctgaaacgaagcttgtccccttccaatcagc

SEQ ID NO: 154669 - DNA, 1060 bp, Homo sapiens
  misc_feature (1)...(1060): n = a,t,c or g
gaaccacgcatgctgtacacgcgttacgtatctgatccagaattcgtgatttcccgggtcgacgatttcgtagtattgcagcttttcagaatgtcatcattgccactaatgattactgatacacaacaagcagtttcttcaggcctgtggattggcatccaaatacagagtcttacgcagcccgggtcgacgatttcgtagtattgcagctttttcaaaagtgtcatcatttgccacttaatgattacctgatacacaacaagcagtttcttcaggccttgtggattggcatcacaaataccagagtcttacccagcggggacgtgggtgcgcgccccgcatgccatggaaaagcttacataagtttaacttgaacagagcttgggaaatggggctgcaaaggagaagcagttcccacgccaggaaccaacgtgaaagcattggaatcagcacaacagccatggaatcaggcaggcaggggaggaccggcttgtgtccttgggaggaccggnctgtgtcctttctgagcttctatagtccagccaaggatttccaagcaagtttcccagaaaaaccaaccaaccaacggacatttttctttccctttatcgacggggatattttatggtttctgggaagcttcggtgttgcacatagggaaaaaaaattctctgaaacggtacaattcatagggacgaccaatgaggacagggaatgaacccggctctcccccagccctgatttttgctacatatggggtcccttttcattctttgcaaaaacactgggctttctgagaacacggacggttcttagcacaatttgtgaaatctgtgtagaaccgggctttgcaggggagataattttcctcctctggaggaaaggtggtgattgacaggcagggagacagtgacacgaaatcgtcgacccgggaaatctgtattcgtcgacaggcttcacgagcttaggctagctctagacacgcaggggtggggggccaagctctcgcccgctgtcttagatagcgtcacctaaatggccgcacgattcactggccgtc

SEQ ID NO: 154670 - DNA, 873 bp, Homo sapiens
  misc_feature (1)...(873): n = a,t,c or g
caagtttaacatatttttatttctccagtaaaagtaacttcacaacctactaaaaataaaaatttaactgcattcagtttctgttcatttttctattaaagaaagcacaagataaaggatagctgtgttcaagtaaatgtgtaattatgacacagacagaatcaagtacgtacataaaatgttaaaacatgaaaatgtatagttcttttaccatttcctttctgaactcataaaatataatcagaaaaattaaaagaaacatgttttattattgtaaacttatattttatttaattaataatgttttggtgtgttagtaatttctgtaaagtagcactccttaaataagttcctaaaaataatattggagccttgaacatttaatctcagctaaaaaaattattctaaaactgtcatgataaaaaaggttacaaaatttctctttattctagtcctgaattccttctccagaattttaatacaaaacgaattttcaggcacaaatagtcaccagataatgcataccgtaatttagcagacttaaccaaacaataaacacccctacaaaagtgtcactattttatcactttgtgctgtactcttctccctatacatctttaatagtggtcacttctactttacttctagcattcaatttagacatctcaaccccaaatttaataatctgttttatcaaacatttgttttgagaacaaaatttctataaattatctgacaaatcaaagcagaacctttaattgtagaacacaaatgaaaaataatatacaagaaaccttatctcttcaacacccaggtattagccttaaagttaaagagataaggtttcttgtatattatctccgnacgcgtggg

SEQ ID NO: 154671 - DNA, 493 bp, Homo sapiens
  misc_feature (1)...(493): n = a,t,c or g
tgcttttgacactttatccgtttttatttaaaaacatgctaaaaacatggtgttccataaagccaggaccaggatgaaggaacgcacagatacggcaatgcaagcagaaagtgcatctgaaaccaacaagcgtgctcaccctgctctccctcccgtgctgcccgggggnggcaggtgggcaaggagggggcaggaagccccaaggcctcacctcctgagtccccaatcagggcagggaggccaggccccaccctggagggagaggggggtgacacggctcaagctgggggaggggtgcagggggagacttgcaccgtgacacctgcttccaccacccaagagcagttctcagcctgtgcccgctcacatcagacctgattgaantgactctggcaaagggagccgtgagtgagggaattcctcaggggaatttaccccagtgagatcacagtcaggagaaactgaagagaggctgtccaccttcactggcang

SEQ ID NO: 154672 - DNA, 516 bp, Homo sapiens
gcaaaagcctagtgcattgggagatggcaacctccctgaaaatcttttctgtttctggagtacttcaggggtcgctctggccccagagcctttgccacagtgctcccaccagcccccacctcatccgtctgtttgcagagcctcatctacaggtccccacgctgccttctttactcactctgcgcttggccgttttgttatttggcttagtctacattgggcggaagtctgtgtgcacagagtgggtgttccttcgagccccttccactcagagggccacacccagcgatgccagtgaagtgtgcacagcctctcttcagtttctccttgcccaccttgcctgccccgggcagcacgggagggagagcagggtgagcacgcttgttggtttcagatgcactttctgcttgcattgccgtatctgtgcgttccttcatcctggtcctggctttatggaacaccatgtttttagcatgtttttaaataaaaacggataaagtgtcaaaagcaaaaaaa

SEQ ID NO: 154673 - DNA, 1171 bp, Homo sapiens
atgtgctgggctccctccaccagaggcggctcccctgccctgcacctccctctcctgctcctgccgcaccctctccctgcccgctgcactggcttcagagccccggctgtccccagctcaccagctggcatctttgggcatatcgctgtcattggctctcccttccccaccgctggagggaacacatcagattctttctccaatggctgttctcaagatgttggcagcccaaggctctgtggctgtgggctgctgggagtgggcatctggctctccgtgtcccaaggcaactttgccaccttctcccccagcttcccttcgttgtctgcagccaacctggtcattgccataggcaccattgtcatggtgacgggcttcctcggctgcctgggggccatcaaggaaaacaagtgcctcctcctcagctttttcatcagtcctgttggtcatcctcctagcagagctgatcttactcatcctcttctttgtctacatggacaaggtgaacgagaacgccaagaaggacctgaaggaaggcctgctgctgtaccacaccgagaacaacgtggggctgaagaacgcctggaacatcatccaggctgagatgcgatgctgtggtgtcactgactacacagactggttacccagtgctgggggagaacacggttcccgaccgctgctgcatgggagaactcccagggctgcgggcgcaacggcaccacgcctttgtggagaacgggctgctatgaaaaggtgaagatgtggttcgatgacaataagcacgtgcttgggcacggttggggatgtgcatcctcatcatgcagatcctggggaatggccttctccatgaccctcttccagcacatccaccggactggagggaatcacgtccacctgggtcccaagatcttcgcctccttccctggggccacggacatcagcagtgggttgggtggcgattatatcatctgtgatcccaaggagaagaaatacagaaaacccaagagagagcctcatctacaggtccccacgctgccttctttactcactctgcgcttggccgttttgttatttggcttagtctacattgggcggaagtctgtgtgcacagagtgggtgttccttcgagccccttccactcagagggccacacccagcgatgccagtgaag

SEQ ID NO: 154674 - DNA, 1379 bp, Homo sapiens
  misc_feature (1)...(1379): n = a,t,c or g
ttttttttttttttttttttttttgctgggcttttgacactttatccgtttttatttaggaaacatgctaaaaacatcggtgttccataaagccaggaccaggatgaaggaacgcacagatacggcaatgcaagcagaaagtgcatctgaaaccaacaagcgtgctcaccctgctctccctcccgtgctgcccgggggcaggcaggtgggcaaggaggggggcaggaagccccccaggggcctcacctcctgagtccccaatcagggcagggaggccatggccccaccctgggactatttgactcactgcagtgggggaggagggaaagtttgggggcacgggggaacacaaggggcttggccggacttttgagaagctgaagggggacaaagattgggacccccaagcaccttcacgcccagtttcccattcctattgccacgttccctgctagttagcacctccaccagtgggtggggcaggggctggagaggaggggacagccacttccatccacccagactgctcttgggccaccaaagcctggaaagatggccatctagttgcgaagtcaaaccaggacacctgcaagagggtccggggcagggccaccttccagagagcctgagacacaggcccatgctggagggagaggggggtgactcggctcaagctgggggaggggtgcagggggagacttgcaccgtgacacctgcttccaccacccaagagcagttctcagccctgtgccccgctcacccccactgcaggatggctgccagaagaaaaggctgaagtctgcagcggatgccccccctgcagtccctcctacaaaccctgagggactttcctgaagacaagtgtgtaaattgcttcaacattcagacccttgatttgaacttgactctggcaaaagggaacccgtgagtgagggaaattctcctccaggggaattcctacccccagtgaaaatccacagtcaggagaaactgaaagaagaggctgtgccaaccttcaactggcatccgctgggtgtggcccttctgagtggaaggggctcgaaggaacacccactctgtgcacagcagacttccgcccaagtgtagactaagccaaaataacaaaacggccaagcgccagagtgagtaaaagaaggcagcgtggggacctgtagatgaggctctgcaaacagacggatgaggtgggggctggtgggagcacctgtggcagaaggctccttgggccagaggccacccctgaagtacttccagagacccagaaaagaganttttccagggaggttgcacatctcccaatgcactaggcttttgctgttgatattaacaaaaattaaaaattgcactcgtgccgaattcct

SEQ ID NO: 154675 - DNA, 641 bp, Homo sapiens
cagcagccaacctgccaacacctactgacactcactcatctcccagagagagaaagagagcgagagagagcgagcgcgagagagcgagcgcgagtgatagcgagcgagcgagcgagaaagagagagagggagagacaaaatacctaccaggaaagggggggaggaagtccaatttttgcaaactattcatttttttttcttgatttttctcactgctttctttgaacaatactttaaagagagaggatcgtattatagataccgcgggggcaaagctaaaaaaggggggaggggggaggaaaaaaattcaagaagcagaaacccctcgcggagttttactggaagaaaaaaacgggtctgaaagattcctcctcttcatcatcatcaaccatcattcattcactacctttgacattccgggctttgattgacagctggagtggcaaaaagccatgaaacacgacagttcggttacatgtgggctgctgacgggccgctcgtaaccttcagttcgggggcttgacaatttttttcttctttttcttctttttcttttctttcttttttttttccaactagatataaatcctctcctaagaggggcctgtcccgatgcctcctctcccttctgtcgtcttctc

SEQ ID NO: 154676 - DNA, 790 bp, Homo sapiens
cagggactgatgcgtccccacagacaaggacttggctcgctggagctctgctgagccgagagaggagggggtagaaaacattcacacttcctatgctctgtcagcaggacagggagcaaaaacgtccccaggcaacgccctcgcctctgggactttctgcctgtcctaaggcccccccaggtaccaaccccgtagctatctgggtctgtttggcactgtggattctcaagggcctagaacccttgcctctgaaactggtccgctggtgcagccctgctgtctgcagctcctgcccatacccccagcccacaccaggccaggcccactccgggctcaccaccctctgcagccttgtggggctctcccagcccctccagaagcccaccccacttctcgccaacccccgatctctaaatgaggcctgagcgtcaccctagttctgcccctttttagctgtgtagacttggacgagacatttgacttccctttctccttgtctataaaatgtggacagtggatgtctgtcacccaagagagttgtgggagacaagatcacagctatgagcacctcgcacggtgtccaggatgcacagcacaatccatgatgcgttttctccccttacgcactttgaaacccatgctagaaaagtgaatacatctgactgtgctccactccaacctccagcctggatgtccctgtctgggccctttttctgttttttattctatgttcagcaccactggcaccaaatacattttaattcaccgaaagcaaaaaaaaaaaaaaaaa

SEQ ID NO: 154677 - DNA, 525 bp, Homo sapiens
cggacgcgtgggcggacgcgtgggcaagaaatgccttctgtctcagggaagcccttaccagaacctctaggtagagttagaggctaactccacggcaccctagagtccatagcatgttgttatcatgtgtgtatcgttgcatgtaaaaatattcctatttgttacgggttgcttgtatgtgtttgtcattaatctattaattcattcagtgaagagatgccaacttgtatactagcctgggaaacctctgtgtcctcagtgcctaatttaatactcctttttctatctaggagtaaaatgaatatgaatgtacatgtctgaggtctctataaattaaaaggtaaaaagtcttaagccaggtgtggtggcatgcacctgtattcgcagatatttgggaggttgaggtgggagcattgcttgaggccagaagtttgaggctgtagtgtgcaatgctcttacctgtgaatagccatggccctccaacatgggcaatgcagtgagaccctgcctttaaaaaaaaaaaaa

SEQ ID NO: 154678 - DNA, 389 bp, Homo sapiens
  misc_feature (1)...(389): n = a,t,c or g
caggtgccgggggcagcgcacaccccacagccaagcggccccctgcccagcctctgtaaacaganccccactccctgagaaacactggcgctcctgccccgagagggccagggtgtccaccgagnctggctgaagccagctgtcccctcccttcttgcagagcaggctccagngatgctgaaggcccagcacctgcagggcccagcctggggaccaccaatgcccggcctcttccagctcagaagcgcacacggcagccacggggcagcggcaaaggcgatggtacagaggcaaatgcctccccaggcagtgacaggcacgcncgcnncccagggcggccactgcccacaaccgcctagagctcnctacgctcaagacgccccagggtg

SEQ ID NO: 154679 - DNA, 825 bp, Homo sapiens
gttgtaaaacgasggccagtgaattgtaatacgactcactatygggcgaattgggtacsgggccccccctcgygttttttmtggtmvtmtttttttttcagagtgaaacaggagtgctttatggtctgagtggagtgtttgtgaggagtgcctcccggcgtccgtgcgtmcgggcgtcaccgtgagcgggggcgcagcgtgagggccacgtgtgggaaacacaacccccactcccaggagaggcctcacagtgcgtgcttcggtctcgccagcctvtctagcgtaggggcstggggccgccctttagggtgagtctgcacacccgtgttcagggcbccsgggccggaagcggaaccataggcatgctgcggcccgcagatgagcgcggagggcaaagcaggtgccggggcagcgcacaccccatcagccaagcggccccttgcccagcctttttaaacagacccttcacaggtccctcctggggccttcagtcacatccctgagaaacactgccggcttttgccccgagagggccagggtgtccaccgagcctggctgaagccagctgtcccctcccttcttgcagagcaggctcacactgggcctgaaggcccagcacctgcagggcccagcctggggaccaccaatgcccggcctcttccagctcagaagcgcacacggcagccacggggcagcggcaaaggcgatggtacagatgcaaatgcctccccatggcagtgacaggcacgccccccgccccagggcggccactgcccacgccggcctagagctcctcgtagtcgccacccccagggtggcggccgc

SEQ ID NO: 154680 - DNA, 1245 bp, Homo sapiens
caagtgttttttttttttttttttttaaaaatctaagatttctttattcccttagacagtttctgtacagcgacaccaggctgtgcaaagcccagtcgtcgtcttcactgagcacattccccaggacgcctggtgcagcccttcctgtgccccaggccccaactagccacccctgtgccccactaacaagccctgtgcccttcaacagggaatgaaacccctggcactgaagaaatccctgggaggcaccgtttgctgcgggagcaagagggactgacctttggcttctttgtggctaggaggtgttccaaggcctgggtgaggggggtcccatactgttctctgctgagcccctcttgcacactattgggggatcctgggctggccggtggtaggttgggccggagactcagtttgtccgtcagcttggccatgtccccatttttatggacaggcagcctgaggcccagaggcggaraggatttctccttgcgcacagctgcatcacacttgaactgtccagacctccacgcgctggcctgtttgctccccaccctagtcccgcaggbctgatatggtgcctccagcagactccatggcttcccggagggtgcagggtccccagttcaccctccagcaggagtggcagcagctggggtaccccctagcagtggcatgtggagaagctggggtatgcagaggatccagttctgtgaacacccaggaggcaacacccaagttttcctctgtcccctaaacacaagaccaagaaggtggccccgccacccccccgggtggaggatgtgtggaagttaagaggtccctgggtggccccttggttggccatcagagacccccgggagcccagcctgcagggcaggagcacaatgacgtggccaggatcccagaaaggggctggagtgtctgcctcagtttccaggataacggtgcaatggcctcagccaggccaggtgctggctgctgctgggaataatctctgagcttcgtgactctacagtgtgggcatgagggtccttatttcatagatgagaacactgaggcaagtgcagttctcggccaaaactacccagctgatcagcaaaattcagcccacgtctgatagactccacagctcgcagcatcccagcaggaagcagggcaatcgactcaggggccaatttatgtcccaggtttctgagaaggagccctggggaaggagggcggggtgagcgtcacaggctggag

SEQ ID NO: 154681 - DNA, 1045 bp, Homo sapiens
cccaggaattttaagaatcaacctgggcaaacatagtgaaacctcccatctcctaaatttttttttaaaagggtcatcatgtaatgtctaggaaggctaagactcacatgcagggaggggccctccctgagccacagcatgaggccccaccaccaacacagtggtcatgggtttggttttagcagagcttgttcaaagagtattccaaggtggctatggggaagaaccaggtaagacttggcagactgttctctccagctccagagtagaagttcatggaagaaatgttccacaatgctacagaaggtgctggtgcccccagaggcagccacgtccctcagtcatcccactcctcgtcctctgccccatccccctgctctcggatctccgctgcagcccccttcgaacacttttgggccatgatgttgtctgtcccaggatgcccctgtctttccatcaccagtgaaattacacttggtcactgttccagcctcaagtttggccaatgaatccaggaagggaccatcgccccgagtcttcagccgtaccccggcccccagctcgagttccatcacctccatctctgactcgggcatccagaacgccactgtgtggtcgggggtgaggctctctgtcagcgcgagcagctttggcttgttgaccagccccttcagcgcatcgggcgtgagcctgtcagtgtcccccttggcttccaccttgtaggaggacatgaggaagcccgtgttcactttcctggtggcgctgaagttgggctcgatttcatttccctgggcgtggaatatacggcgatggatgtgattgggccggatatacagcacgtagtagcgctccttcctgccatgagtgtccaagatgctgtgccgagatacatcgatcagttctccctccagcaggaccccatttcccccatgtgtgggtggcggcgtcccaggcccctggcagccggacgatctgcaccgccttgttccggagcgcgccgtcgtggtagatgcggctcacgaaatcgtcgacccaggaattccgg

SEQ ID NO: 154682 - DNA, 2362 bp, Homo sapiens
  misc_feature (1)...(2362): n = a,t,c or g
aaataagcttccatttttcatatccatctttttttcttttttagtttttttccttttaaatgcttcttttatttcattggttgtacattgggtgagtgaactgaatattacaaccaaaacatagtattgatacaaattagactcctgtttacactgtaaggtaatgaatgagggaattctttaagtgttacagaaagatttagtagaaatgttaccagtggtatggctgaaagaatatttcggtgaagtgctgttatatcctgaaacccaagagtgaaatggtagttcccatacaagtggagagttagtctcttaactacagtatttgttgaactgatatcttcatgtcttggatattggtgatttttgttttttaattaaacaaagcatttaagatttattccatcatagtccagaccttcctggaataataaaccaaaccttttggcaaataatatttatacgggaaaaatagttttagatcctctcaaatcccagaattattctataaaattacattataaataaataaaaagcaaaatctgttgtacatatatttgtacatctatgcatttgccttgcctcctccttattgtaaatggcatatttatgactctttgcatattgtaatcacaattctggaaaatggatatcatagtaacaaatacagtcttctatatttgcttggggttacaggtgatgtttttgatgctcccttattaaagggctgaaaatagttgtgtgctaataattttaagaatcaaaatcatgaaacaaaagaaaaaaaaagaaagacaatgttacaacaattaatcctacaaaaatatttcagtgattcccataatttaccttttagtaatgtatactatgttttcaatgagtttaaatgaattaacaaagaaaaaaacagaaaaaagaaaacaagtttgaatgttttaggcaagttgtagcgtaactacattgttatagttgagaaaattacaaatatcaataatacataaagatgaaactaccaaagtaatacaagttagatacaatacttttccacaaattaaaacaaatgcaacgatacaagcactatgtaagaatacatttagcgtgtgactttcttttagatagggttatccagatctacgatataagataaatagatagtaattcgactttgaccaacatgaattaaaatgcagatttctttttttcctcaaacaaataatgatacggttggtgcatctagttttcaggaacaggcgatgatcccaaatttaaaatattttacattcaatctcaaaaggtcaaaatacttcaatcactaatatgttcacaaagaaaatggatgtttgaaacaattacacataatattcatttataacagctgttttgttttttaaacaataatttaaaaactatgtaggtactgtataggctatgtgcaacatataaaatgtgaaatatgaaatatttggtacgatagtgcttaaaataaactttaaaacaaactttctgaacaaaatttaattgtatcgctattaccttgaagatcaaccaagtatttaaaaaagtaaacaacattaaaatatgtttcatccatatatagtatatatatgtatgtgtatatataatatgtatgtacttgtattaaagttttttatacttttgagacataaaatatgctttaaggtgaaagaattaaaagaactatttttttccatgctgtagtcagttacaaccctttaatccaacttttgaaatgcaaaacaggtaatggattttttaaaaagtgaaactatctactttttgtttacatagtaatttagattaaagtcacagtcaaatttgcagtgactaaactcaaacttacttaaattagaatattatacagatctcctcacctacagcttccttgtttgactaggtttttagttaagaagagttattctgtaacaggcaactggatggtgagtttgaaagactaatctcttagattagactgttggcatgggcctctcaatcttgtcaagctggatgaagtctggcaaaatctaggcacttctacaaagtctctcttataaaacaactttaaaaatatacttggtaaaataaataccttcaagactttgtttggtgggggtatgaagctcataccgtgcaaagtttccttttcaatctatttaatggttaatctagaatcacatgattcaacgtggcatctccaggcaaaccaaacaccacactttgatgtgtccccagtacttgtgcttgaatttccattcaaattttaaacctgcaggacaggtatcggntttacttcacctctcatctttgctgcagcatttatattgtcaagaagtgaaacataccc

SEQ ID NO: 154683 - DNA, 769 bp, Homo sapiens
tgagttactttttgacaagtcaacgatgagaaggccttttggtcagaaagcttcttcactacctcctattgtaggatccagaaagtctaaagggagtggaaatgatcgccactctaagtcaacagttggatccagtgacaactcatctcctcagcccctgaagaggaaagggaaaaaagaagacgtgaattcagaaaaactgacgaaattgaaacaaaatgtaaaattaaagaattcacaagaaaccattccaaatagtgatgaaggcattttcaaagctggagcagagaggtctgaaacacggggggcagcagaagtccaagaagatgaagatactcaggttgaggttccagtcgatcagaggccagcagaaatagtagacgaggaagaagatggagagaaggcaaacaaggatgcagaacagaaagaagacttttcaggaatgaatggtgacctttgagaggaaggaggtagggaggctacagatgcccctgagcaagtcgaggagattctggatcacagtgagcagcaggcacgccctgctcgtgtaaatggaggcaccgatgaggagaatggtgaggagctgcagcaggttaataatgagcttcaactggtcctagacaaggaaagaaagtctcaaggagctggcagtggacaagatgaggctgatgtagaccctcaaagaccaccaaggccagaagtaaaaattaccagtccagaagaaaatgaaaacaaccaacaaaacaaggactatgctgccgtggcttag

SEQ ID NO: 154684 - DNA, 1351 bp, Homo sapiens
ttttttttaccaatattcccattttaatgatgagaaaactaaggttcagagaagtaatttgcccaaggtgacagctgaacatggcagaggtgcaatttgaacccatgtcttcacatcccagtgctgtgctctctaagctccactatgtgggatgttttattaccactggatcgaggagacctccatctaagctgtattgattcttccaattgggctctgttcagatgccagagtaaagttgtcctttatcactgtgttgaggctgatagcaagggcctgcgaagtgtcttagatgagttgactttgaacaagactaacctagagttgaaaatggaaagccagacggagaagctgaattacctcagaaacaatcatgaagaggcgggaactacacaaaatgaatttaaagtttcagtatgtcaatacttgtcaagatatggtggtggtggctatcattataagagacagtcttttcataaaacacagagtaaagaactgatgggcaggcatcggcttctgctgacaattgccaaccggcatgagattgctgagctgaggtggactctccagacactggaactggaactccaggcccaatggcctctggtaagaatgctgcaacagtgagaaccttgagagagactgacttgttgaagatgaagagaaaaccaagagcctccagtccaggttgttgaagagcaaccacgagccaacaccaaggagacaaggaagaagtcgtccttctctcaaccgatgtccgcaagcacaaaagaagagtcccaagatgggcgaagaaagggaaaataactcaaggggagagccagggaaggaaaaatgctccaccaaaaatccctgggctttaaggaatactttgagggaaggggagcaggcccaacaccctctgggcccacagtgacccagctgaaatgaggaactcctaaacagaatgaacctgccagttggagccaacagaggggacatagctggaacaacagagcgaaggggacacagccggagcaacagagtgggaggatgccaaccatttcaactctctccctgagcagcgagtaatttcagggcaagcccagagactaggatccatcctgagaagtcttcagaggttctgacccagagaactcaacaacaggaatacgtcccatggtgatgaaaataaaatgaatcttgtgttcaccgttgtattcctcacgcacttaagttaaaaacctgatgcaaaagtggttaatctccatacatgggtgttagctccatcgttttccaacgttagagataaccgaatgtgacctcaccccgtttagttccggaggcggcggacgcgacggcggaagtttcg

SEQ ID NO: 154685 - DNA, 674 bp, Homo sapiens
gcgtcgactcaaatcaggtgaaatgtgctgatacatatagaatgggttatacacatcatagctaggtccgtgctgggatgaactggaaagttctacctttcgatctccaaaagatgctctggcagatccttcaagttcttccagatgtgaaggagtttcttgtgtcctgcgttgaatgtaagataacttaaacttgggcaccacaaatggtacttctttgccatcagatggtaatctggaaagcaaaataatcctcaggctacagccaaagctgaggcctgtacagaaaccagaagtcaaatgggagctacagagactagtagcacttttgactatctgggaactgcctctttaaaatctcctccccacagaaaagttgtgtttttctgtttcaccatagaaacatcgctccacagcaactctttataaattctgttgccattacattcaatttccaatatccagcaaaagacacaaacttccaatcttaatattaatctccagcccgcaacggcggggccgccctcacaggcgccccccacagccctgagcgagctgccaggtgggagaagcgcacctgagccaagccacgccgcgcctttccccgcccgggtcccgccgccctcctccgggtctccacgtcccaacgcccgctgggccgcccgcgcggccgc

SEQ ID NO: 154686 - DNA, 471 bp, Homo sapiens
ttttttttttttgagatggagtctcgctctgtcacccaggctggagtgcggtggcatgatgtcttggctcactccaacctccacctaccagggtcaagcaattctcctacctctgtctcccaatttctttctttttttttttgtttttttttggtctgtttctcagattttctctttgtcataggttctaagcagtttgattatgatgtagcttggtattgttttcttcatgtttcttgtgcttggggtttgccatggtgtttggatctgtgggtttatagttttcatcaagtttggaatgttttcaggcgttatttcttcaaacatttcttctttcttttcctctcttcttcatgaactccaattaaccatgtattaggctgactgaagttgtcccacggctcagtgatgctcttttcatctttaaaaattctttttcttgctgtgcggacgcgtgggcggacgcgtggg

SEQ ID NO: 154687 - DNA, 666 bp, Homo sapiens
  misc_feature (1)...(666): n = a,t,c or g
cccacgcgtccggccagctgacagctgctgagtactgttcggttgctgttatctgcatggccagtctcttgagtctcagcctgctgttgacccccagtcgacagtgctcgtcagcagagggtgggcacggcccagtactgcctcagggcccgtctcagtagtcccagagagacggggtatggtatgctcttgtcacttttaaagagtatgtctgtggctcgaggcttggcattgtctctgaagtattattcctagaggcgggtatgctgacactagatcagagggcttggttggttatgtctctgtgaactgaaaagcaaggggcagatttcaatttacaaaccagattttagatgaacttttctaattaaaagtagaattatttacataaatgacactgaaagatgtggtggctcatgcttgtaatcccaacacttcgggaggccgaggtgggtggatcacctgaggtcagttcaagatcagcctggccaacatggcaaaaccccgtctctactaaaantataaaaattagccgggcatggtggcaggtgctggtaatcccaggctactccgganggctngagggcaggaggantcacnttggaaccccagggggttggnagggtngcagttgaagccgnagaattggtacccaangcggccagc

SEQ ID NO: 154688 - DNA, 811 bp, Homo sapiens
gcccacatcccttcttccattacttacaggttattgttaccattaagaacacttctttttcttaaatgagcaggtttatgtcgattattcagagttgttacacaggacatagattggttttatcatgtctatcttaaagtttttctttttcttactcttaccagtcaacctaaaattcttttttccctctgatatctaattgcaggttaagcaacctgaaattcttgcaaaagggcacctttaatttgaattgtaattggaatcctatgctagtgacagggtatggcttttctgtattgttttctaataattatttgaatatgaaacattccacagtaaatcccagacaagagctattgtttttcattttataggtgagagattaagtaacttatataagattatacaactggtaaggttggagctagtattcaaattctgataaatctggtacaaaagtacacattcttctgtaatatttaaatgtgaattctttttgcagtttttgagtcagagtcttgccctctcccccaggcatgagtgcagtggtgcgatcatggctcattgcagccccagcctcctaggctcaagcgatcttcctgcctcatttttaaatttttcatggagatgatgtcttcattatgttgcccagcctggtcttgaactcctggggctcaagtgatccatcccaccttgggcctccgaaagtgctggaattacaggtttaagccaccatgcctggcctaaatatgaattattattattttaaatggagcctgggcaacaagagcgaaactctgtctcccattta

SEQ ID NO: 154689 - DNA, 431 bp, Homo sapiens
aaagtataattatcttttgggtgatctgttgtctggaaaaagctgttacatgtaaaaatttggatgctgaaatcaaatggctatacccaaatgagcaagaatagtttaaaacatttaaatcagcatctgcataaaaattaatataaatattatttatgcctgttatgtatatataattatattatgcataagaatatatttatccaaatatatactgctagaaaattgtatatgatgtactattttattttatgtaatattttatgtatatatttatttacacataatttatatacttttaaggctgtgtccatttttcatttattcttggtctccggtttgaacaacgctgctttatggcattacactgataattctctctactctttagttctcttccttatcgcttattcatgtgtatcttattccat

SEQ ID NO: 154690 - DNA, 472 bp, Homo sapiens
tttatacctcatgtagcttcagtcattttgcagacttaagaatggcatgtgagattaaacattctctaggaagcatagcagagtatgactgacaactttacatgaattttttagacataatggtaaacaaaaattcagcctaattattagctgtgctttcttggataagttatttagattctctaagctgttgtctcacaagtaaaatggagatatgtctgcctcataggctattaagaggatagcattctcatacagcagtgttacaaatgatgtatcataaaataatagtccaaccacctgccacatttcagaaacaaaaaaagatttatactttacatgcaatagacatacaaaaaattttaaattctgagggaaaaaaatgaaaatgccccacacatttgagtcatttatatattaatcctggagagaaaagctatctttttgaaacctcgggtttaaatttttaatg

SEQ ID NO: 154691 - DNA, 497 bp, Homo sapiens
tttttttttgcaaacagtatggtgatttatgacagattttcttaatatatatttattattggagcaatcgtttcccatgaatgtaatggtatactttcttggtatagattgtgaaaaaatgttaaaggcagagtcacataattctcagctaaggatttaagataagcactaagcaagatatattcatgattttttacttctacctaagcattcttccttttagtactaaccccttttactcatgtaaaccataactatacaaattccaaactagcgttcctctgacttaatttataataaaagctttatatattacattctattataattcaaggtaaaggggatactactcaaaatttaaaacataatcatagaggccaggcatggtggctcatgcctgtaatcctagtactttgggaggtcgaggtgggcggattacttgaagccaggagtttgagaccagcctggccaacgtcgcaaaaccccatgtatactaa

SEQ ID NO: 154692 - DNA, 451 bp, Homo sapiens
ttctggcagaggccgacctccaaggctctgttctcccctccccgtgtacaaatcctccgggtttcccagcccctccattgccgttggctttttctggtaatgtgctgtgctccacgaccaagccgagaaaggacctagggtggggaagggagggtctcttgattcctaaccgcccccacatactgctccaccgctgaacttcgggtgccggggaggagaaattgggctgatgtgagctccccgtcacccgccatggagccggctgtgtgtgttcatcagatacagttctcccttaaccttgtcctttctctcctgtgtctcagtctccgtcagtctgtctttctccgctcttctctgacccctgtgaggaacctccttaccctgttctggaatcgctgccagactgtagcttttaatttaataaaaataaagtaaaatatgcaactcttaa

SEQ ID NO: 154693 - DNA, 1491 bp, Homo sapiens
gtcccaccaggcgcaatgtagccgggcggcgcagaggatttcttttttggtcttgagagcatagagtcccttttcatattcacgtgtactcttaagaaagcgtctgttctccaaactggctttccattctccccgtcctaaatggtgcgtggctgacaccgtagtgttttcaaaactggatatggccaggatgctatagcattgtcagtgcatctccttggaaacaatgccatctttgaatgtgagagataaacctagtttcagcatgtctgcagcagagaccagtacatcaggcttattcccacaggaagcctcctaaagcctgtggcgcggcaaccatttccaggactaaataataatgtgtcagatgcctgtgagtggactgcctggccaaatgactcatgaagatattcacggaagaatagtcaaaaaccaaagaaaaggcatattctagaagcaccttcaattccatcgaggatttttgagcagctgaagaagaaagttctgaaaatatgagtgacaggactccagcacatttttttttttagttgtttcttacattatctttgttaacccatccgcttttgtgtataatattaagttattttccactactgcaatggctagtaatttacttaggctcagagttttactctgtatggacagagaaaataggaggtaacaacagtgggagaacaaataggaacagttcactgggatgttggtccccagaaattggctttcattgaataattcctaaagggtgtcgtgtgctgaattgctttttcatagtgatgtgctgcttcttgttcatactcttatgactttaatttcacctttatctactcccagcctctgtatatgcctacgtttttaaaaataatttttggcactgaagatctgattaccatattttttcagtttaaaaattaaatcctcgcaaatagacctttggtataggtgcattctaccctaggttattttctaggatcaagaatagaacaatttctgttctttccagcattactctttactattcatatgttcttgttcagtgttttgttgttctcatattctaggtggaaatgaagggtaatctctatgttctattttcagttttctaggaaaccagaaaaacatgggtagtagaaatgtatagaaaatgtatgaggtctcttaaccattgtgttaaacttgcattaagcttcttttttagcaatatcgatgtcagtggtacgtgttggtgtgcccttttatcatttattttttttgagacagagtctcattctgtcgcccagactggttggagtgcgatgatgcgatcgcggctaactgcaaccgctgcctcccgggtacaagtgattctcgtgccttgggctcccgagtagctgggatttttagtggagaacaggtttcacatattggcaggcttagttggtggatcaaaggtcaggagattaaaccatcctggccacatggtgaacccgtttt

SEQ ID NO: 154694 - DNA, 716 bp, Homo sapiens
acatcgatacgacttttttttttttttttttttttttttttttcggggaaaaagaatggctgactttaatcagtctataaggaaaataaacatctttagaggccgtgtgggggtgggggagccatgcagcagaggaggcatgccacttcaagcacacccgaggcagaagaaacttctcagagaaaccactagaagggtggacggagggggaggtgggacttacagtcagctttccctgactgggcaaaagggagcagttgcagtattaaaagtggttcctgagtccaccacagcagccagctccggtcaggcagcgggatgggctcccacgccccatggcaggcctgtgtgcaccacagggcagctccctcccttcttggtcctcttctatcctcctgccttacaagagaagcacgtccctgagcacatatggcccagcccttgcccaagctgagccagacaggtaagcagagactttcactgcagtgatgcttctggctcagccccaggagctacccgctgccatgtcttccaggctgcactagaggaaggcagtggagcaggatgctgataaaactagctcctggccgagtgcggtgctcatgcctgtattcccagcactttgggagaccaaggcaggcagatcacttgaggtcaggagttcgagaccagcctggccaatgtggtgaaaccctgtctctactaaataatacaaa

SEQ ID NO: 154695 - DNA, 6403 bp, Homo sapiens
gatcgccctcaggaattcggcacgagccaagatggcgcataggggttctccaggctgcagttggcgccttatcagtatctaagcggagtgttttggaaggagttaacgggctgtggcatagacgccctctccgccgtcatggcccggcatcggaatgttcgaggctataactacgatgaagattttgaagatgatgatctctacggccagtctgtagaggatgattattgtatttcgccgtcaacagctgctcagtttatttattcacggcgtgacaaaccttccgttgagcctgtggaagaatatgattatgaagatctgaaagaatcttccaattctgtttcaaaccatcagctcagtggatttgatcaagctcgtctttattcatgccttgatcacatgagagaggtacttggagatgctgtgccagatgaaatattaattgaagcagttctgaagaacaagtttgatgtgcagaaggctttgtcaggggttctggaacaagatagagtgcagagtttgaaggacaagaatgaggcaacagtatctacaggaaagatagcaaaaggaaaaccagtagattcccagacatcgcgaagtgaatctgaaattgtgccaaaagttgctaaaatgactgtatctggaaagaagcaaactatgggatttgaagtgcctggagtatcttctgaagaaaatggtcatagtttccacacacctcaaaaaggaccgcccattgaagatgccattgcttctttccgatgttcttggagactgcttctaaatctgctaatccaccccacacgattcaagcatcagaagagcagagttcaaccccagcaccggtgaaaaagtctggcaagctgaggcagcaaatagatgtgaaggcggaactggagaagcggcaaggagggaagcagctactcaacttagtggtcattggtcatgttgatgctgggaaaagtactctgatgggccatatgctttatcttctgggtaatataaacaaaagaactatgcataagtatgaacaggagtctaaaaaggctggcaaagcttcgtttgcatatgcatgggtcttggatgaaactggcgaagaaagggaaaggggagtaaccatggatgttggtatgacaaagtttgaaaccacaaccaaagttattacattaatgtatgctccagtgttcataaggacttcattccaaatatgattacaggagcagcccaggcgggatgtagctgtttttagtttgtagatgccagcaggggagagtttgaagctggatttgagactggaggacaaacacgagagcatggactcttggtccgttctctgggagtgacgcagcttgcagttgcagttaataaaatggatcaggttaattggcaacaagaaaggtttcaagagattactggaaaacttgggcactttcttaagcaagcaggttttaaggagagtgatgtaggttttattcctacaagtggtctcagtggtgaaaatctaatcacaagatctcagtcaagtgaactcacaaaatggtataaaggactatgtttattagaaccaattgaatccctttaagcttccccagcgatctattgacaaaccttttagattatgtgtgtccgatgttttcaaagatcaaggatctggattttgcataactggtaaaatagaagctggttatatccaaactggtgaccgactactggcaatgcctcctaatgaaaacttgtaccgtgaaaggaatcactctgcatgatgaacctgtcgactgggcggcagcaggcgatcatgttagtcttactttggttgggatggatatcatcaaaatcaatgttggctgcatattttgtggccccaaagtacccattaaagcttgcactcgtttcagagcccgaatcctcatctttaatattgaaattcctatcactaaaggatttcctgtgctgttacactaccaaactgtcaagtgagtccgccgttattaaacgattgattagtgtcttaaacaaaagcacgggtgaagtcacaaagaaaaagcctaagtttttgactaaaggccagaatgcattggtagagctacagacacaaagaccaatcgctcttgagctatataaagacttcaaagagctggggaggttcatgctacgttacggtggttctacaatagctgctggtggttgtcactgagataaaagaatgatgggtcagaatttctaccaccgtttctggatacagtgaaatagctaacctctgtttcaagaatgcagttattaagtcaaaggaacaatgtgcaattgatatgtttttagatgagagagaaaaattaaagctaaaattagctgcaaagaagtattaataatcacctctgcaaaaattctaagttgccaactggcaaagaaagtctaatgttaaaaacaactttgcctttgaaacgttaataaatggattttctttgctaagatttatggccaaggtcaaaaataagtatctgaagatactgaatcatcatgaaatgaactctacttctggccaaagcacaatgtatttgcagttttctcttttgaatcaattatactgcacatggtgttaaggaaaagtaactttaattgggtttttcaggcagttgatatttgacctaagcttttttttttttttttttttttttccagttaatgctaagaaaagatttggggaaggttataataaaagtattttgtggtgaccataagaatgtccctccccaaaacaagtaaacttgtgaaagtttaatttggaattagtggaagctgttcctttgaaagccaagatattatttaagttgtaaagccagctaataaaatgccttagtttgagcataatacaaactgtgttttgttctttagacatttatgagattctctgccactaacagtaaatatgatttaggggttttgtgggatctttttcacctaagagtttcctagctctgtcacatgaattcttttttatcctaatggcagatccaatttcatctcattcatttttttaaccataacttgcttttcccattctcacttttagaattatacctatgatggccctttctttatcttgcttaccttatagattataagtcccctgtgagtaagtaagagtcatgtttttctttaaagtttcaacaacaaaccccaaggtttatttatttaacaacaggtattcgttgaggtgccttctgggtgcaaggagctttagagtagattttgacctcagctgaacctggaactctgatctgatagactgtttatgataagcttttttttttattagcagcgtgatttgtatatcgatggcttaacatatacaacagcatttcttctccctgcaccttttcgtgaacctgacattttgaacataagcaataacatctgtatggtaaagtaggcagattatacatgtgttgcttagtgaatgattaccaagtgaacacacttggtatattgctttaccaaaatacatgtgtagttgtcacttcagattcactgagttaagaaagttttatttaaatattaatattaatcaagaatttaacagatatatgtgacagaaatctaacttcaagtgactgaagcagaaagaaaaatttttgaatgacataactgagaaaattagaggtagctctagctttgattccatttagatcgagcagctcacacaatgttagcaaggactcatctccactctgccttccctggtgctggttttgctctcaaactctatatagaactctcggccgggcgcggtggctcacccctgtaatcaaaacactttgggaggctgagtcgggaggatagcgtgagcccaggagtatagaggccagctaaggcaatatagtgagaccatgtctctacagaaaaaatttaaaaacagatcagctgggtgtggtgccacatgcctgtagtcccagcttctcaggaggctggggtgggaagatcacttgagcccaggaggtcgaggctgcagtgagccatgatcacatcactgcagtccagcctgggtgacagagcaagacctgtcaccctgccacccataaaaaacctcttctgtaatgccaggttcttgacaagatgtgataattccacacttacatcctcagatctcccatccagggcaaggacagactaaaagagcatatcttctccagaagtcctagaaacatctcatcattgactatgattgaattttatttattaatacttccctaggatatcctgtgtttgagtgtgaagttaatatcacacaaagcatgtagctaacagttgtgtgagggttggaaattcagggtgctgttaggaaggggaaatggattggggtttaaggtagggggagtaaaaacaagaaaccatccactctgtatattatataagactgtgatcgaattaagaattttagtttacagtttagcataaacaaatagtagtagaaatgaatgcatttattcattccttccttctccaatagtgtttaagtacaatctttttatttgcattttattgatgattgattgtggttgaaaggagtggtgatattatttcgaggatccactgtgtaagaagactgttggcagtggaaggctcgagttgattaagtgacaaagaggtaaagcagacatgcccaagcttggttatgctctgatttcctaccctgttactttcatccataatttatagtacatccattttgtgtcattttgcttcaggtatttcttgtcctgactgtcttcttttttatgattttactgtttcttcacactaatggctttgtcctctgactttgactctttgtgagattcttctgagcagttaacctctaggataatgtggcttgaacacattacagaactatgttttgacttgttagtattattcacacattcatgacaattgagcctctctactgtgagaaatgttttagaggccagtttctaggcatagctgtttttctcccatgagtatgcaaatcaatagttttaaccattgttaaaatgcaatcatagtgacttcagaaaatttggaaaatacagaaaatatagggaagaataaaattaacccacagttctgtcacctaaaggtaactgctgccaatgttttcatgtatttcttttctgtctctccaatgcatttttttacatagttgtgagcgttagccaagttattttcatgttgttatgtaatcaatatttttcaatagaagtattagaggttttttttattgatataaaaataacaattacagatcctgatatatagaagttattcaaaattatacagttttcaaaaaatcaagacaagtaggcccaatacaaactactgaatcatcttctaatttccctctaaaatatttatagaaatatgtaagtagaaaaacattcatcctttcctcgtctaattatgatcctgccatattccaggcacaagagaaagctctggggcttgagtcttaatagggctgatagtccaaccaggggacagggtatcataaagagataattcaaaactttaagattggagggtaggtgatggtagaaaattctgcggcaaacatttgttgatgctcatcatttgttgatgtcatcaaagatcaccagggcataattataatcaaaattagttttattgatgcttgctgcagcaagagagactgcacaccactggggtctatgggtgcttctcagtgggaaggtgtaaggaggggcttgctaagaatttgagcacatgtagctaattttaaggagggctcaagtgagcaagggtttcttctggattgagtgctgtcagaaagtggattgagtgctgtcagaaagtgggagtgattttgcaactgggtatcttaatttttatgttgtgggtgggaggaaaggaaagaagcaacagtcacccatgttagccacaagaagaggttggctgtttatggtttgcacagtgactttgtttttatctgtgctcaggcatgattacagtatctcattttatcccggattacagtgacctcatctgatgttagagatttgagaattgttaaatgttcagcaggagaacgccaccgcctagtgtgaatgctaggtcagaagctgctttttcacactgaaaccatttaagtatgtacaaataagttaatagtgtaaatgtaggtgtaaaatacaatgcaaaacaaaataatgaagtaagtgaattaaattattgcgaccaaatatggggatatgaaatagggaaagaaaagcattaagttacttatagtccataaagggactacattattatgttactctgataatcccataaaacaaagttttaagaatgtttacagtaaccatgaatggaattagtgaaactattcatatcaatgcaaaaaaaaaaaaaaaaa

SEQ ID NO: 154696 - DNA, 450 bp, Homo sapiens
tttctttgatgccactggccactgtatctgcttttgtaaaaacctccaaaaagttatacatcaggtatctctagtcagcttcctccgctgcccacctcttgccacagatgagtgatcactgtgaatggtggtgaccaggtgggcagggcaggggcttgtctaagtgccttagcccaggcccctggcccatcgacctcgaaaacagcaatatcgcctccttcttagatccagttaccaagtcagtctagctgggtgggtagtgctcagacagaaaggctggatgggaaggaagtcacatcctaaaagtccaggagggggccaggcgcagtggctcacgcctgtaatcccagcactttgggagaccaaggtgggcggatcacctgaggtcaggagtttgagaccagcctggccaacatggtgaaaccctgtttctactgaatatacaaaaaa

SEQ ID NO: 154697 - DNA, 1142 bp, Homo sapiens
  misc_feature (1)...(1142): n = a,t,c or g
acattatataattatataattgtataacatatacaatataattatttaattgacccctttgaaagtcagttgcagattcgtgaccctgtgttcctagaaacttgtatctcctaggaacaaggtcctttgtcttacatagtctgtcgttcatgacgttgacatttttgaggagagcttacttgctggttatttggtagagtgtccttcagtttgggatgtctgtttcctgaggtttagattcagataagactaacacatattcctttcagtgcgtcacattagtaagcacattatgtcagtttttcctcctgttggcaactgattctgatcacatggttaaaggtcgtggctgcaaaggtttttccatggtagttaccattttctctttgtaactgataactaatttgtggggtattatttaatcttgtctgtcaataaactttcacctgggccaggcgcagtggctcatgcctgtaatcccagcactttgggaggccaaagtgggcagatcaccttaggtcaggatggtctcgatctcttgatttcgtgatctgcccgcctcagcctcccaaagtgcttttaatatatcccactgatttttttagtatttcgttattttctgacaagataatgctctaggcttatcttgtaattttccttggcccagcccaggaatcagcagtttctccaaggagtttctttaataggtatgtagtagtagtatatagtagtttcttagtttcttttagtaggtatgtccatttagaaggctaaaattggcactaggtattcacactgatactggatatcantgcctttgaggcatttcagcagacagaactaggaaaatttatggcaaataagtgtgtgtatatatatgtgggacacatgtatatatgaatacatatttatcatacttttaaatcatgagttcatactgaaacttttaatccaacaccatgggtgcttctttgccttcccccattctgtattggctctcttaccacagcagtaataaccctggctcccattattctcaatatatttcactcatttgctcagtgctaccataaatacaagtttcagaatcactacagctctatcaacaataaaccttctaaagttcacgacttctttgtagt

SEQ ID NO: 154698 - DNA, 1338 bp, Homo sapiens; identical to SEQ ID NO: 151232

SEQ ID NO: 154699 - DNA, 1455 bp, Homo sapiens
ctttttttttttttttttttttcaactttttatttagaaaatttattttatttaaaaggtatatatatacataagtcccaagatataaagttctaaacatagatttaaaaagagcaaaatggaaaaaatataaatatgttgctgttcctgtttatatcttttgtgcatttattgtcttttctaaggttgggcatttttctttattttgcaatttgatcccatacttacaggtaaaaaaaaatctaaatattataggaaagggtattaaaggcaaaaggtagggaattccccttcactccatccttctcctcaggatattggggggaatctccctccccaaactttcaaccacataggatgcatttttggtttccaaaccaggaaaggccattaaccactaacctccttttaaagggctgcgggctggaattgggcgagatggaaggaatttatggtagattaaggctggctggtctcccctatagaatttttgaaggggaatccccacccttttttaaaagccacatccctcccctggtccccacacactgaaacctgcccctggtttgtcctcaaacttgccttttaaactattaaggccctgtttgggcagagggcaatattaatttttaaaaaatggtaagatgtttaaaatgcccatttagcctttagcaccctggaatttgaggcagaaaggtatgaagttaggcaaacctttcctggcccataacccccagttttgacaagccctcaaacacaatgtacaatatttaaagacacaaattcattagggtatggggctcaggaacagcttgcctcttatttaaatacttgcgtgcttgtggttttgcacaatggatgggtaattagagtttgcccttggaatacttggcattgattaagactgttcctgaaatttggttatgccttagtcaaaaaattctgtttattgttcttcagcaagaatagatgtaaccactttaaaaatagttacattgctttccagattaagtaaatatttcagttaggagaatacatatttttatttttattttcagtttttgagatggagtctcactctgtcacccaggctggagtgcagtggtgtaatctcagctcactgcaacctctgcctcccaggttcaagtgattctcctgcctcagcctcccgagtagctgggattacaggcaaatgccaccatgcctggctaatttttgtatttttagtagagacggggtttcaccatgttggccaggctggtctcaaactcctgacctcaaaagatccgcccatctcggcctgccaaagtgctgggattacaggcgtgagaccactgcgcccagcatgtttctgcagaatctcttagctttggtgccaatgcagcaacgttagtgcaacaagctgcaggagtggctaggccctcagctcagccacccgctggttatgggcagtgt

SEQ ID NO: 154700 - DNA, 1524 bp, Homo sapiens
tttcgtgccacggcccagaggctgtgttgaggctaatggcggtgcccacggaactggatggagggagtgttacggagaccgcagtcggaagaggaatcgccagttctggcacctggcgccgccccgttcggaaattttcctcattattctcgcttgcaccctccggagcaacggctccgcctcctgcccccggagctgcttcgacagctctttcctgagagtcccgagaacgggccgattctggggctcgacgtggggcgtaactccggggatctgagtgtggctctatacaaacacttcctctccctacctgacggggaaacctgctcagatgcctcaagagaattacgtctcctctgctgcgacatagatccagtcctggtgaagcgagccgaagaagaatgtccttttcctgatgccttgacttttatcaccctggacttcatgaatcaaaggacccggaaggttctcttgagctctttcttaagccaatttggacgttcagtttttgacattggcttctgcatgtcaataaccatgtgggattcatctgaatcatgggagaccatgggcctaatgggagttccctggcccatctttcctccctctgccactacctccttgtggagccccaaccctggaagtgttaccgggcagctgcaaggcgtctccgaaagctgggactccatgattttgaccacttccactcccttgccatccgaggtgacatgcccaatcagattgtgcagatcttgacccaggatcatggcatggaattaatatgttgctttggcaacaccagttgggacagaagccttctgctcttcagggcaaaacaaaccatagagactcatccaatccctgaatcactgatagaaaaagggaaagaaaagaacagattaagtttccagaagcagtgagatgggagggcaagaagaccaagaaagatattgaaagggttttatattgagaattatgttcattctccttaattccttaacaatcaggcagccgcaaaacctggcaggagcttttggtaaaatgtccaaggcacataattgaaagaatcagtatctgttccccattgtttggaacaaatcttgaggaagaatgaatctgtggagtgatgagctaggatatctggattgagatggcctaggaaaagtggtcctggttatgggttatggagagggctgcttttggggattatttataaagatcaagactaggctagtcttaaaatatgtcagttcctgggctctctgaatcctacctggtttcttcaggcttctggacttgctaggccctgcctttgggcaaaaccttagtaattcaggtctggaatggggcttaggaatctattttctgtttttttgtttgtttgtttttgcattcttctattgtaatatatacataaaatttaccattttaaccgtttttaagtacagtttttcagaacgtggaaatcccatcaaaaaattggattaaaaaattaaaagataaattgataatttttttaaaagt

SEQ ID NO: 154701 - DNA, 667 bp, Homo sapiens
  misc_feature (1)...(667): n = a,t,c or g
tttttttttttttttttgagtcagaaaattattttaatagttacaaaaatttttttttttttttttttacagaatcagtataaaatagcagttgatttctccataattatcagaattatttatacttgaggtcttggctaagtggggctgaaatcaacaaaaggtcttggactgttggctcagaaatcatcctagaaagcccgccctgttgatatctgtcatgcttagctcttatgagatgacccagtccttannaaanaaaaaaaaaaaaaaaattttaacagaatcggtataaaatagcagttgatttctccataattatcagaatttatacttgaggtcttggctaagtggggctgaaatcaacaaaaggtcttggactgttggctgagaaatcatcctaggaagcccgcctgttgatatctgtcatgcttagctctcatgagatgcgccagtccttccacctctaaggagttctcttgtgctcttttactccagtgttggctccaggaccttgggtagagggtgctggtgatatgaggtggtccaggagcaggcccgtaatgctccttcccaaaggaacccagaatcaggtttccgtacactagatccagcaagtttgttcccttcttttgacacccttccagggtggcacagatttcttctc

SEQ ID NO: 154702 - DNA, 1235 bp, Homo sapiens
tcttgaatacgttaagaaagtcttgtttgtgtagaagagtttcaaatcatgtgagtgatgaagggacccttctgttgaaccttggtgtgcattttaggtccattttgggtttactcctttgtgctgcttcatgatgccttaggacaaggacaaggcctaggcctccttgtctcagttccctcctgctctctctgttgccctcctccttccacctggagcatggcccagcatcaggttggcgcatgctgtgatcagctacctccatgcaccacaccaagcaaagctctctgggtgacacagttgccaccaccagggcactgacccttactctgtgttctcctagctcctcctgagggtgctgtaggagacatctgcaaaaaagaagatgctggcaatatgccatcaacctcagaggggagtatttaccttgaaatggctcacttcctgaggaacaaacttgctggatctagtgtacggaaacctgattctgggttcctttgggaaggagcattacgggcctggtccaatatggcggcacccagtggcggtgtgaactgtgaggagttcgccgagttccaggaattactcaaggtgatgaggcctatcgatgacagaatagtacatgaattaaacactacagttccaacgccttcctttgcagggaaaattgatgccagccaaacctgtaaacaactttatgagtctttgatggcagctcatgccagtagagacagagtccaaaaaaattgtatagcccagacttcagcagtagtaaaaaacctccgagaagagagagaaaagaatttggacgatttaacgttattaaaaccaacttaggaaaagagcagacaaagttgaaaatgggtgcagtcagaactgaatgttgtagaagtggtaaatgacaggagctggaaggtgtttaatgaacgctgcccgaattcacttcaagcctccaaagaatgaataaagagagattctttttttttttttttttttttaaggactgggtcatctcataagagctaagcatgacagatatcaacagggcgggctttctaggatgatttctgagccaacagtccaagaccttttgttgatttcagccccacttagccaagacctcaagtataaataattctgataattatggagaaatcaactgctattttatactgattctgtaaaaaaaaaaaaaaaaaaaaaattttgtaactattaaaataattttctgactc

SEQ ID NO: 154703 - DNA, 360 bp, Homo sapiens
ccagcattcccaaattgatgaacatcaaggttgttccatttttcttttcctcgttaataagacagcaataagcttctttgttataataacgttgaccctttcattgtcttaatcgcagctcccaccacagtgtttaattcgtatgaggtacgtgtacaaacattagctaaattgaatacactttttaaaaactgtttttcaagccacgtttcgtaatactagaattaatgaatcaaacagtatgaacttcttatggttcttataacataatactttccaaaagaataatgtcattttataatccacaagatatgagtgcgtgatctcgcccattgcaatacatgccagaattagggttaa

SEQ ID NO: 154704 - DNA, 622 bp, Homo sapiens
ggcacgagtaaactctaatactggcatgtattgcaatgaacgagttcacacactcatatcttgtggattataaaatgacattattcttttggaaagtattatgttataagaaccataagaagttcatactctttgattcattaattctagtcttaagaaacgatgcttgaaaaacagtgtttaaaaagtgtattcacgtttagctacatgtttgtcacgtacctcatacgaattagacactgcggtgggagctgcagattaaaaaaatgaaagggttaatgttattagaagaaagatgtttattgcagtcctattatagaggaaaagaaaaatggaacaaccttgatggtcaacaaatttgtgaatggtgttaaattaatattttggcatattatgcagctttaaaagtgataattgtacatactttaggaaaatgtagagaaaatttaagtaaaaaaaattaattacatcagcactagaattatgtatttaaaaagtcttatagaccagggacagtgctcatgcctataatcccagcactttgggaggttgaggcgggagaattgcttgagtccaggagttcaagaccaccagggcacatagctataccctcatccctacc

SEQ ID NO: 154705 - DNA, 560 bp, Homo sapiens
catctaaagctgttagaacaaagaaaatccccgaaagatacatattttaaaagttaatagctttctaataatagagattcccatgctgacagcaacatagatataaaacagccaagaaagaattaattaaggtatatataaaacctagacaaaaagaagaaccaagtataatgaaaaaaatcaagaaacattgacaataatggagactaaatccctcgatggaaagaattataatcataaatgtaagccttaaagagttaactttagatgtagacaagtcaaactgaagcactaaaaacatgttcgaccttatataacacattccttagggggaaaaaaagattttttaatattggaaaaaatatggttaggcatagtggctcatgcctgtaatcccagcacattcagaggccaaggcgggaggactgcttgagcttaggagttcaagaccagcctgggcaacatagtgagaccttgtctctacttaaaaacctaaaaagattagctcgagtatgggtggcatgcacctatagtccccggctactagggaagctgagggc

SEQ ID NO: 154706 - DNA, 1108 bp, Homo sapiens
ctcagtggtatataaaacaatgatacaacttcaaagaatgtgtaaagattttttaaatatttcttttctttttttctctttcttatatcaccatgcctgtggacagaaatgtcttaagatttaacaaaaatacatttatgtcatgtaagcctaaaatgatggtttgcctaggctgaatgtaatcatattttcaatacagtaagtgtgtgctctgtatatctgaagagcgaacctcttttatacccagtacgtaagatgttaggaaataattttggattttcctcagatcattttatgttataaggaaacatttaataggacatttccatccctggcccagggttctcaaatgctaaaagcatggtggatggaaggtccacggagggccggggcaataaaggcaaaaggggacagggaaggagggtaggaagggacttcggggtaggagggaactaaccgaggaaggggccaggccactcttctcttcgggaccagtggaaagcacacagattgtgccccttccgcagcctccctatgtgggtgccgctgcttcctgagaaagccagaaggacaggagtatcatcaggggcaggctagctctccatccacaggaaggcagaggggctgttctaggaagcaggtggagaaggtaaaggagttttcttaccaaagaccagtggtttcggcaggcacagcggacaagatgaagagagaacccaccagcaaatgcagataaagtctaaatgagggcgatggggcagctggtcgtaatcatgagtgaaggaaatggagcataatgtacctctcaggttccaaccacagcctggtgagctgcgaagccaatgggaatgttctctggaaagttctcaagccaggggcgcatgcccagcccgagtcctggtggaggagccctgtgctcgaggagatcagggcggctgtggtagtggagacctccccaaactgctggccaggagacatcagcagtcagtggctaccaaacaggcaagaccaggactgtttctaagcaggctgcgtttggggatgtaaacagagaccagatgcagaaatccccggaagaaaatctctcagtattaaattatggtgcaat

SEQ ID NO: 154707 - DNA, 369 bp, Homo sapiens
  misc_feature (1)...(369): n = a,t,c or g
ccccgcagaaatgcaagttacagacacatatgcttggggcaccaatttgaatctcccaccatccaaggccacatgaacacaaatgcgcagtctcctctgcgatcggtagataaggatgttagcccatgattggactaggatgggagatgacctgagacctctggattctgtaggttgtagttgtctcttcccacccccaagcaacaagtgatgnnnnnnnnnnnnnnnnnnnnnnnnnnnnnnnntcctgtagtgactaacaggatctccctccaggggatttgcagaaaggggagcagaaaacatcccaggggcctttcacagctacttccttgagccccctttcagactgctgtctagacctgtcgc

SEQ ID NO: 154708 - DNA, 593 bp, Homo sapiens
agcctggtcctgagcccgctgaaactgcagttacaggcacacatgcgtggggcgccaatgtgaatctgccaccatccaaggccgcatgaacacaaatgcgcagtctcctctgcgatcggtagcataaggatgttaggccatgattgcactaggatgggagatgaactgagaactatagattctggtaggcttttgttgtctcttcccccccccaagcaacaagtgatgaacacacacacacacacacacacacacacacccacacacacaccctgtagtgactaacaggatctccctccaggggatttgcagaaaggggaagcagaaaacatcccaggggcctttcacagctacttccttgagccccctttcagacagtgctgtctagacctgtcgcagcccaaacatcatcaccctgatatgcagaagctggcatccttacctgaaattcaacaccaagaaatgatctcttctactcaacactgatagaaatacctctaagcaacgtcctcattggcaggggtggagtggggagtttcttaaaaagggagcctctgcctaccacctagagaacctggaaatttccatctgtg

SEQ ID NO: 154709 - DNA, 757 bp, Homo sapiens
ctcattgttttgtctacatatagaactaaaattctgtttacttatgtgagtctttggctagagacatagaatttcagtcttgactgtgtgagcttaatttctggcatgtgggtttttattggctgcagaggaaacatctctagcagagatgacctgtccctcaaatgtaggaaatacctgtgtaaacctaacacctgtgactcagaatagaaatggtaccaagtgagtggcttcttagcccatcagtaaagttatcacaccttggcctcccaaagtgctgggattacaggcctgagccactgtgccaggcctttgccatcagtttttaaaggaaatagtcactgagcactggatgctaggtggcaggttttttctttcagcttttttttttttttaaagccatcatactttaatatctttcagcactgtcaggttatcttctggcttctattatttctgttgagaatttagcccaggcatgggggcttatacccgtagtcccagcactttggaaggccacagtgggcagatcacgtgagcccaggagttggagaccagcctggccaacagggtgagaccttgtagctacatgtggtagccctttttcagtacattggccagtccagctcagctggatgtcatttacatatgtgtcttatattttagatacaaaagacttcttaaaagcttagagcataacacaaatatttatttgattgcgccatctaacaaatctgaataaatacatttcacgtct

SEQ ID NO: 154710 - DNA, 799 bp, Homo sapiens
accgctccggaattcccgggtttgccttttgttttgtttttgatgccgcatatagtgaaggggtgaggatattctatacaaacaaaaattgaataatttattcacagaaactattaagattgtattgtggagctcacagcaaggctcagtgggcagcagctgcaacatctcaccggggaaattattttatttaacgtgagtgatgatgtgggccggagaaggtagctgaagctatttataaaacgttgtgtaccttcttccgagctctctcccctttgtgaagggcgcagcaactatacccttgatggatgggagatttacgcaatgtgttttactgggtagagtgacagaccttgggctgtccctgggagtttgaggaatctgggaccttatttcccagggcagagaccactgttcctcagaaatgggacttctgataatgaaacaggttgtccaacattttctaatacgcattctacagaacacaggttccaggaggcatcaggttggtgtgatgcagactaagggttttgtggtcaaatatccttaagaaacaaagttaagtcagtttcctttctgcaaggacttttcagccttcaatgtgtgctgtgcatggtgaatccccaaaaataatccttgagtctgtagcatttcctgaacttacatgaccaggatactctattttgcagatcaccccacagagctagggttccaccgagtatactttgcttaggttgacttagcatatctgaggtcttcaaggataaaaactgccaccccaacacccttccattaaaaa

SEQ ID NO: 154711 - DNA, 837 bp, Homo sapiens
tcacagggtggtggatggcaacttcctcactcgccgctgggccaggatggatgactcgatgggcttcagctggggggtgggcttggagctgttgagtgcggagtacgtggcagccatggctcccttcacaagctgtaggtcctggtgggacagctggctttggggaagcttgtctttctgggtgacccatggatgctgcagaacctgcttagctgtgaggcgctggtggggatccacgtgtagcatcttggacaccaggtccttggctgtctctgaaactgtgttccaatttcccccactgagggtaaacttcccactgccgatccgggttaggatttcctctggtgtgtcactgggaccgttggcaaatggagtatatcctgccagcatggtgtacagcagaatgcccaggctccagatgtcgcagccttcatcgtagccctggcgcttcagcacctcaggcgccacaaagttggctgtgtagcaaggtgtcatgaggagcccattctcagcccgcagctgtttggcaaaaccaaagtcacagatgcgcaggcactcgggattcccggactcgtccacatacaggatgttgctgggcttcaggtccctgtgcacaaccctaacatgggaggcacagccatcatctgttccagcctcactgtccattgcatccctcaggtgccctgagctcaggccaccaggggctccttcggtaacgatcataaccctatgtctgtggaatgcccgttcaccttcagcacccagtgcagggcctgtaatcccagcactttgggaggccgaggcgggtggatcacgaggtcgggagatggagaccat

SEQ ID NO: 154712 - DNA, 1050 bp, Homo sapiens; identical to SEQ ID NO: 147321

SEQ ID NO: 154713 - DNA, 387 bp, Homo sapiens
  misc_feature (1)...(387): n = a,t,c or g
ctttaactagaggctattaaatcattaataatgtttttgaattatgtaagtctttcaaaacccaggaaaggtaaagtataatccataccatttcaggtggaaaccgtctttggcttaagattattaaagcatggccgggcgccgttcggttgctcatgccttgtaatccccagncactttggggaggccgaggccgggtggatcacgaggtcaggagatcgagaccatcctggctaaaatgacgaaaccccgtctctactaaaaatacaaaatattagccgggcgtggtggcaggcacctgtagtctcagctactccggaggctgaggcaggagaatggcatgaaccccaggaggcaagagcttgcagtgaagccgagttcgagcca

SEQ ID NO: 154714 - DNA, 786 bp, Homo sapiens
tttaatatttttatttttttttttgaatatcatcagcttacttgtctggcaagggcagaagcctggggttggcctgaactctgccaaacaaatatcaaagtgtatttaatagttaaatttgtgccctttcccttcttgctgcacccatgttgtcacttaacccccaggagttatttattatctttttgttaaagtcaggctcatttggggtaatgtgatgactgtttaggtttacatgaccctcctctcctttccctacccccaaatatgtatatatacatatataaaatatgtatatattttacctatataaaatatatatatatatacacatatatgtatctatattcctttgtttctttgcctgcttatactggccataaaagagggagctgccttcaatgtataaagtataaggaagaagtgcccagggaatgccataaatggaggcttttggatctgaatttggaccatttcactaaagagaacatgagtttgctcagccctttcctcaccagaaggaagggccccggttccccagacttctccacgcgctggctccataaaggccaggctttggccgggctgccacaggggcctgaggagctcactctgggcctacctggtttcagttagagggtcctcctgttatttttccatttaaaaagtatgtcctcagaaaactgtactggaaggatgggtggcaggaacttgtatagttcagcttccaacactttggaacagattaaaaagggaatcttttaaataaaaaagaataaaaataaa

SEQ ID NO: 154715 - DNA, 2167 bp, Homo sapiens
cttaatatttacagtttatactctgggaagagaccttgttaagagaacaaaaagacaagccacatattgaagaaaatatttgcaaaatacagatctgagaatttgtattcaaaatatataaaaaattgttaaaaactaaacaataagttaaacagcccaattaaaaatgcacacagatctgaacagacgcctcaccaaagaagatctacagatggcaagtacacttacaaaaagatgctcaacatactagagaactgaaaaccacaaaaagataggcacagctggttctatatctcttagaactgctaaactctttaacaaatgacaaattgctggaggaaaaacaagaactcttttcattggccggtggaacacagtgtataagaccaaaatatgccaccccaaaatataatggtaggaaaccagaatatgcaaccccaaaatatgtccctttggcttaagaattattccaagctaattattttgaaaaaaaaaaatgctaacaaaggaagttgtgaaaacagagtagaagttacttgtgtaaggaaaatttacatctataaaggaaatcaccatttaaaagctacctctctcgacaccaagaagagaaggataactaaatcactaaagagtcttatcaatggagaatgcatggacttaagtctgtataacgcaccttacccttgtctaatgtgcttttgctggttagctccccactactgcacctcaaatcttctttctttaagttgaagatagtatttatgcttcgaattgaaagccacctgttggagatttactcatttttccctgagtatctcccatgtaaccataagatatacatcgtttttaaacttttctgtttttctcattttaatctgtcagtttttacagagcatcccatctaagaattccaaaaacagaaaattatttttcctccccctattacaagttgaggcatttttttccaaagctaaacaagtctcaccttacaatccaaaaataacattcctaaggtattttgacaactactttgatgttacttccaatcaaaagctaccatgcaattatttacataagccctattcataatgaccaaaggagaaaaacggaatcagaaagtcttacaatagatgactgtatgggaatccactcagacatcaaaagttgttataaagattatttaaatgaaaacatttgagatactgaagataaaagaagaaatcttaccagaacttactttatccaattaaagcagagctcccagaaaaatacagctgccattaaccccatccaaggagtttcttgcaaattcagctgccatgaagacagcgtactctttcgcattagcattgataaatgaaaattaaattctaagctcccaactgactgaacagacccactcttggctgaggggaccccagagtaactttcaaaactgagttctcagctttgctaggatgggatgatggggttaagatacacatcgttataccccctcctttgctaaccatgatgaggctttcttccctaaggatttaacaggaaaccagccctttcaaaagcctccactaccggatatcaacctctcctttcttgcctaataagagaccacccacgatggagaggtttctggcccagcgtacagaggatgcacagagcgagttttcatgtcctcatgcttcaccttttaatgtcagagggctgaaaactccaccctgggatcatgctaacacatgccattttttgtacatgggacccatgaagaagccagaaactcaattgtgcatgcatgcatttctccttccataaatattcatgactcctccctagagcttattaaaataaatgtatttggcccattccaagtcagcataaaattgctatttcctttacctcctccttgaactagtctgtttctggcttctggctggaggctatgcttcccagcctgtcagaaggacaaccctgcaggctacaaccctttataggaaataaatctctcactggttgggtggctcatgcctgcaatcccagcactttgggaggctaaggcaagtggatcacctgagctcacgagtttcagaccagcctggccaacatgatgaaaccctgtctctactaaaactgcaaaaaattagccaggtgtggtggtgggcatctgtaatcc

SEQ ID NO: 154716 - DNA, 1323 bp, Homo sapiens
ggaatgcctaataatagcaacccttgtctccctcttctctcctttgcaaatggctcagtgactggaagaggcggactaatagccagagttaaatataaatacaaattaataatacatagagaacagcaataccagaaaaaaagaattctggtaaaatgatgtgaaaaattgacagctccctcactcttaaggttgctgctatatacagtctaggttttctgtttggaaataggtagggtaaaatctaagacctgcacaagggcagtgagagacatttacagcctcctctctatttgtttttttaaggaaaagtcaactcctgaaatgtcccttagctataatcagaaaactaagaatattattctgtgtcaacaatgtatttatggagagaagtaaaaataagttccacagcaacacatttacatgaattatgaactaggattcttggatttcataatcactccaaagctttttggggatggtgtgtgtgtgtgtgtgtgtccgtaattgttcatcattactttttttaacctatctttttgcttgcttaatcttctctgccccagttcttcctgagtatatgaatttgatttctaaaaacaatttattcaacactctatcacccgtattctctctctggctctgctgcaggtctctgcactcctgattttgctccatacttttaaataacaataataaatatacagttttcatttctcatttaaaaaataggtggaaaacaccaaattcactttctgttccattttaattaggtttcagaagtatcttggaaatcaaggtatgctgcaagaggatattaaaataagaatgttagagagtccttttagaaaggcagtcttgggaatttggaaaaggatttttaaagcagctttcatcagctagactgttctccagcctttctttacttcctctttgaaaggacatagccctggtttctttttgacacaaaggaaagctatgccaaatcatgatctgtatgtagaattggtcacaagtatgttgttgcataggctgtacagttgggaattagaaaccaaatgctacccagagacctaacccaattaagctctttgtatttctccttcaagaaataaatcttccttccttctttcttcctctttcttttaattttaaaaaaattcatcctgatttttttattttctatcttatttaaaaaataaaaataggccaggcgcggtggctcacacctttaatcccaacactttgggaggcgggtggatcacttgatatcaggagtttgagaccagcctggccaacatagggaaaccctgtctctactaa

SEQ ID NO: 154717 - DNA, 1888 bp, Homo sapiens
  misc_feature (1)...(1888): n = a,t,c or g
attacgaaaaaagggggccaccgggattttaataaggggccccgccaaaaaagggacaatatagcaaatctttgttcaaagggttttattataataaagagttagacgacacatatttttattttatatttatttagggatggtcagtgcattttattgaatcagcacagtacaaaaataaataaaaataagggaccagggaattaaattacagccaaactgagcttcatgactttgtcagattataaaccacacatactcacaaacacactacacatacatacaaaatgagacaaatataaattaatattaacaatacccacagtttgggtcaaagaataggctacaggaaggaaattgcactaaaaaaccaacatacatcacacgtgtgttaattaggcagttttcaaatattacagctatggaattaattctgaggtggaaaaaatgggccacatttccctttttcattggcaggttttaactggttggaacaaaactaagttctaataactggcatgggaaagaatatatcaakccccccaggtttacaaggaaaaagagaaaaaaccaaatcctgaactattattcctgtggcttgttctgtgcatgggtgtaattttcacagccatctgttctaagattatttttcttaagacacggaaatgcvccctggtttgcatgcacaatatcaccgtaaaagcaacaattaaagaataaaggtttttttgtaggtttttttttattgttgatctaaaagtagtcttcatagcagcatggcaaatgggttctttgcttgcacactcaagtatatcaggtgttcctttacacaatactgatgaccagtgcaaggggagagaacacgacaggcttcacactgagggaactagagagttcttcccttagtccccaccacttccgaaatgtccacctcctccgaagaataaaaaaataaattacggagaaagagaaggaaacagacacacaactgggaatcctgtgggatggcaacggtaactggcacagtttcggcagccgggtttccgccagctgaggggtgattacacacatggcggccctccctcctggggatttgggcacttgaccctccctcttccctggccagcaggggccttccaccttctggtcgcacgcggcaagcaggatctgaaagacaggctgtgtggaaacccagcagaagaggaggtgctgtgtgaagtctgtgccagccagccgcaggctccttccaccgctgcaccgattatctgacagtcccaggaacggctctgctgggcctcaggtgcagcaaggcagatgttctccggccgggcaggctcttttccccacctctgggaatgccttccagccaccaggttctgcctccagggactcttaaattgggacttcaatttcaacaacttcctttttgtgtaaatttcaataatgcaatgtgctgaaatcggtagccacctcgaacttaatcctatgtaaagtgaccctctgcctccccaccccaggtccccattccagcacttccccagtggactgggcctggaagacagaatcctctgtagtgtcttcacattggtctttgttctccacagccgagtgatgggccatggagaaaggcttgctccctcttccaagtcccaagccaccaatgcgggagaattagaaagaaaatcaataaagtacacatttgtgtttttacagccagtagggtaaggtggaaaccaaaaccagcagctgcaaatgatcagttgtagaaatcagcaggcttccagagcaatcaggagtctcactccccgtcttgtaattgtctccaagatccggctgtctcactggtccttgctgggcaaggcttcctctttagnagaaactcagacag

SEQ ID NO: 154718 - DNA, 2490 bp, Homo sapiens
  misc_feature (1)...(2490): n = a,t,c or g
aaaaaaaagccccatgtccaagaccacgtttttacaaatttttccccctatagcccccggcnnnnnnnnnnnnnnnnnnnnngagagagagagagagaaagtgaggagggtggagtggttataactgaagactggctataattctcgtacaatgtttatagtttttaaagcaaaataatgttcatgttaaatacatttaattgtgaaattggaaaataacttgcatcttctgtccaaagaaaaatccaaccagaggtctgggatttggcaagaaggctaaaaatctggttttcttcccacggcattatgtagaccaattcaacttaagagctaaccattaaataattatcttgagtatcttagggttgtgttattaaaataaatttggaagtaggtggggtttatactcaatgaaattcattggcgttcacaatgacttttccatcatgtgttaatttcttgtacccttaatatgttattttccaaggacttgaaagaaatggggtaataaataaaagctgcatttctagagaagcctaaccaaaaatagaatattaattttctttaaaaaatttaactatttgaaaaatgtaattcacagcatttaagtagactgcataggtcctcagtgaaaggaccctgaagaagcatttttttaaaccctcatcatagttagcagtgcaaaacatagacttatcagacaaaaatcaactaaaatgttaattttgaaataaataactaacatataaaataaaatgaggccattgttcctctactccgtagatccttagagtctgcaggaaatgtaatgtgacagagcacagcacagttgtcacggagaagtttgcctcatctgaacactgggtgcattgatctgcaacttgaaacttgatgtcagtgttaatcatgatctggcttcccaggttcacagttcaatgatgacaatgatggaaattttctctaaactctacatgaaccgtaggagttgagaattcatttgttttcaatgtactatttcttttattttttttttccagcaaaagataatcccaaagcaaatttgtgctagggttctttgaacttggctcttttacctcatggttgaagatcttgaaagaagtatgtaggataccactgggtgatgtacttgtcaaggccctgaaaagtagcctaccatgccattctcccccactctcaagtaggcacttttatgttatgggaatcaaggggtgggaggtatcattattcctgggtagttatgggtttttaataaatatcattactggcaatatcagacttcaatcttggccagaacttcaaaaaacattattccaatttatgtcttacggaaacacttaaaaaaaaagactatcacttgagaattttctttgcaatttcctgtaaatgaaaacatttgtttaaaaagttcatctatgaaaaagttctcacatatcttaaaaaaaaaattcttctgtacacttgttcccataattatgttgaaattaatggaaaatttaaaaagccaatgtaagacaaaggaaggtaaatactgtacacttgctgagaacctcttccaccataagattcactgttttcccagttctgatcatagaagccatttcagtcttgaacttgcagtagtaaagaagctgtgaaaggcacaaccttgtttgactggagaggccacaggtgcactgaagtgggattcaacacgcatgactcagcatcaaactgttggaccaatcagatcagcttctagtaccccccacacacgctcaccccacggtgttcctttaagtatctataatcctatatggatgttttataaacttgctgtctcacattaaaaaataagtgcatcaagtatctttgtacattcaagtcacttcctaaggcaaattgtctaccatatgtactcccaactgctttggtatttgcttcagttaattggggtggacttgggtgttgctgcatgcaggttaatcgactcagagtggactaagtgggtggacaaatgctgggagcatgccttagatcaatctacttgtgtgtttagagtctgagagttctgaatggggcccaaaccacttgcatggccagtctacactcactacattatgtcagtgtgcagccttcaaactgaaggagcttaattaagatgtgaaaatatcacatgccctcataacaagtgttgttctttttactttcttctagccaacttgttttagaaaattaagactctttttgatgactcagactgacaaaaaatggaaaactttgcctatgtagactaaagaatgcctactgcctgagaaaatgcagacctaattgttggtttattttctcctccttaccccaccctgctctctctttttctctctgggtatctcaccagaactctctgtcattacatctccttctcttgcattccttttctttctcattctttctctctctctctcctgcgttatctttgtgctctcactctct

SEQ ID NO: 154719 - DNA, 1423 bp, Homo sapiens
aataatctgaaccagatatttcatgatcgaaagcattgttggagacagacaatcaacttgtgttttgcctgtagtagcttttcaataatatgtcccaattgttatttaaaacatggcttcatatgacagaacaaggcaatctatcaaatttacaggaagaatcaacatgctggtgagagtcactgatggcttctaacaaatagaaaaagaggaaactttaaatccacggcatacacgtacacacacacatgcacacacacacacaccaaattgaacaaactggaaactctcactctgtgaaaagttgtattctacacatttctgcacagaccacaaggcagtgttatttccctgatgtttgagttgttttgttcttttgtgtgttttgtttatttgtgtgttgtttgttggttttcgtttcttgagtttttgttttgttttcaccacatctgttatttccactagtttttttttggctgtgtcatgacaggcctcatggatggctaacagaggattcttcccttctttttttcccaaaagcaccaaaaaaaaggggctggaggtagtctctgtaggcatctccccaaagtgttaaacaggctacataaggtgaagccaagggaggggttttcactagctttcattttataattatttaaagtcttatgtgtggatacccaagagacaaaaagttatcttccaaaataaataatcacagaagtacttttttaatgaagagcctatctgtttgcattctagaaaattaatttatggtttccattgttttgcatggaagacttttaaagaagtcaatctgcaactaatgctggggactaaaactaactgcataaattgtacttttgaaaacactccttgtaatgcctttttcttcctgatattaaaaaaatgctcatgtgtataaaccatactttgacttcccaaaaatggtgactaggaatggattttgagcctaagacacttttgagctatgcccaggcttctcagccatgcctcagtgtagacacatccatctgccctggaaagagcatggtatgagctgttcaatattccactggaaattccagttgaaatattctgcactaaactattgtttttattgaaattttaagtttaacatttctttgaagattgatgcaagcacaaagcttgattttttaatgcaaaagtatcttactttttggggggaaaataaacaaaaatgaactttcaatttgcattttcatttagtttctcttggccttgaatttcccttgtgacattctgtacatgtgctacaaactgcagtctctgcaggtgcattgatatgttctccctccttttatgagtcactccacttttgtggattacacaaatagagcagcatgacttggaactgttcaaagctgcatgcacattttgtaaa

SEQ ID NO: 154720 - DNA, 1334 bp, Homo sapiens
gggtaaaaggggttctatttgcttaaactcatgctcgtaggcaattttagggctctctggggctctgaatggtttctccaccaccacctttcttccaccaatagaaagatgttgtccttacaaggccatgtctgagaagaccatggtttaactagtaaaagaagctcacattgcagagagctgaataataccaggctcttgactttgtactgtgtgtcacagtcatgattgggacagaaggaaccagtctgctgaaaagtcaagccagcacaaatatttggaaactaattccactgaaactcttgtatcattaaatcatactattgtagtttcagttaatgtaattatttaatatcaggcactaaattaaatagctttgcacaaaattttagaaaagatcaatcttgtaacaaaatttaatattaacagtaaaaagcacctgagaaaagaaaatatcgatctgttgtggtttatatacttgagttattcttagaactttgtggagattgacaaagctctgataaaaaggaagaaaatgttttgaattcaagaatgctagactaatagaaatagcccagtctctctgggccactgctcttcagtatggggtgctctctgtccctccttaacagatggggttgtttggaggctaaaatgagctaagggaagaagctatactgtgcctccaatatcccttatgtgtaattagagtgccgatctgggctgcaggctttattcaatgattcctttcccttacttgaggctttctctgtagagctgttatttctgagcctccattctgggatttacaaaggaaacagaatgatgaagaagtaacaatcagcattttacacacacgcacacacacacacacacacactttttctaatatatgaggctagtctgcagagtccacagcccaggtgtccatttatttccacttcttcacctcccaaagatttagagctccatgatctaccaaggtgaagactgccaatcccaggttggagaagacccgtcagagtgtggaggtgccaaactgagaggcacaggaagcagacagccacatcaaacttttttgatgaactactgcaaattggtgtttgttctaggaaagaaagaggaagaaaaattacacaatgtgaattgaacataagagcagtgctctttacagagtatgagaagggaggatgggggagaatctgattaaaaaaatgattcattccttcacagacactaacaaacatggctaaaaagcacatgtcagaacacagaagcctaggtagatggttgacatttttataacttccttaagtgagtagttaaaccagcag

SEQ ID NO: 154721 - DNA, 801 bp, Homo sapiens
tttttttttttttttttatttctggaatggctaatttttatttaattctgtaagttckaaaaaggaaacatatttgaaaaaaacaaatttcaaacaaaaataagcataaccaaatggaaataaaagaataaataaatgtcaatcatgaagtgtgagtgtacacaacggaaagtcatacccaggcttctccacccataacttagacagctacagggcctggttccgagcaatagaaagatgtcaaacatgatttttaaaaataactactaccagttttgaaaagatccctggcgaaagaaaccccaaaatcaacttaataaataactgtacaccaaagggaaagggttgtgttttctttgatggtgtattctctatggcaagagagttttaatattttatcaactgctaagaagataagcataacctctttcctttaaaaaaattccccctcaaagtgtcttctgtccagaatcgatagaagaaggttaagtcagagagtgaagcccttgtgaccagacccctgtagaagagggaatgcttcctaaattccggaagtcgctgcaaggattcagtttaaactttcatgatattctaatcttaccatctcaaaagtagttctgtatcaggggatctaaaacaatgtatatctggccaggcacagtgtctcacacctgtaatcccagcactttgggtggccaaggcgggtggatcacttgagatcaggagttcgagaccagcctggccaacaaagtaaaaccccgtctctactaaaaatacaaaaattagctggtgtggtggcgc

SEQ ID NO: 154722 - DNA, 1732 bp, Homo sapiens
gtatttttggaagagatgggtttcaccatgttggccaggctggtcttgattgaactcctgacctcaaatgatccacccaccttggcctcccaaagtgctgggattacaggcatgagccaccatgcctggccagaagatattttaaaaataataataaaaaagataaccttttatcccatcatacacataaaaccactgttaatattctaccaatattttcttcctgtactgatgtatttttacataatcatgatgttgaatgtaatgttttttcactagatttagtaaacatttttcaaagctgttaaatattcttcaaaaacatgatccaatgggctgtgcaatagttcatgtggggatcatccattacactattactagacaaattgtttccacttttcaccattataagtgaagacgctgtgtgaatcgtgtttggaatctgatttttctcaggtgatctacctataagtgcaatcattggatcaagggtagaaatatcttttagtgatcttgctaaatactgcctaactggcctacagaaaatttgctaatcatagtccctctaattgtatataaaagtgcccactttgttatactcttttaaaaaattcttttcactccgttttaaatcaggaaggggctttgtccagttgggtctctggaaacagtgggtcttgcacactgtatttttacatatgtgtattttccagtatgggataaggttcgggctggatatgggtttgggctgtgtcccctaccccaaatctcatcttgaattaatagctccccataatccccacattgtgggaggggacccaagtgggaggtaaattggatcatgggggtgggtttccccccatactgtactcatgggtagtgagtctcatgatatctgatgggttttataaagggcatttcccctgcacatgttctcttgcctgctgcccatgtaagatgtgcttttgctcttcctttgcctttcaccatgattgtgaggcctccctaaccatgtggaactatgagtccattaaacctctttttcttttcaaattactgggtatctcttcatagcagtatgaaaatggactaatacaacagcattcaccagggaagtgactagggaacacagagcttcaagctttgtgagggcacaagggtactgggggccatggataccaaatgggcctcctgggaagccccagcagggagtcccagggtgggtgtttcagcagcaaaatgagtcgtgggccctggggaagggaccctcaagggcttacacagccctgatgatcagtttctgaggggacccctctgggggaacagctccctcctctttcccagagctgactggaaggtctgtctcattctacacactgcatttgttacagaaagggaccaagtggggaaaataaagaacatggaacaggctgagagagagggcagctccattcaaaggacctaggtgtatgccaaaaatgagaatgaagattgaccagcgacttctttggcagagacctgggcaggctggctgatggagagctggggcctgtgaatacagtaagggtggggtccacactgccaccgcctcccctcaagatgccgcttctctggactcagcagcactgggcagtctgcccagttctgcccgtggcttctgctccagagaagcccagtgctgacagtcagagtggaggagtgaggggctgtcccagcataagccctggctgct

SEQ ID NO: 154723 - DNA, 552 bp, Homo sapiens
cccttctcccatgtgatttggtttctggcagtcctgctgaatgatccggtggatctttctgtgcaggtctttgtcttctctggttacatagtataggttatcaaaaccatcatctttctggaaaacaagtcctttttcctgcagcagttgtatagcattcttaaatatactatgaattgccttggaagtggtgtccttcttaaaattcacttggtcggagcaggcactgtgaatcacaggctgattggcaagggacagcaaagactccaccatttccagctcctgctggtaaaagctctgcactctgttctccatgaggaattctttggctttttcactcagcaaactcgtgagactggggaggtccagggcgcctggattgcttagtgcctcttctttctctagggctgagctgtgaaaaggctggtcataaactttcctgtagatagtgggcagctcaagcatccttgcaatttgaatgttccacactgggtcgtccactttatagtaagcggccgcatgaatctctcgctcttctctgtatgtgaggat

SEQ ID NO: 154724 - DNA, 2429 bp, Homo sapiens
ttttttttgtcacgctgtggatctcctgtttattcccatctctgggcaggcctgtaaagagcatcgacccaggtctcaaccccactgctggtaactgagccacagaaactgtaagcaagtgacactcatccagggagaactactcccctaaaccggttcttagccagcaagagaggcccacaggaaggtctctgataacctgaagttttgaaaagcttagacctgtgtgatcaggccatatgcccctcagttcccgaaatgttcactaccctgtggtgtccctttgccatggaaggaggactccaaccacacacatcagttaaagctgccaacactgtttcctccccatttctgctctgcgaacaacgcacagtccagccaggagctcaacagggagggttttcttgttgtgtcatggctgagatcaaagtcattgtacaccaaggacatagtggacagaagggagccaacaacatttatgccaaatcccattcccaagatgactatattttatagtttattatgaggtaactgcctccagacagataagcccctgcatgatgctgaaagtcagagcctgggggtgaatgccaccttatctttgtcctcctcagctggtctgcggtgtctcttgctcagaacgctgtgtagtagtgctccattcgtcgctgacaatgtcactctcggtcctccaggagctccagaacttgctgcagcacagcctcgctcaggccggggcgggatgctcaggcgagcacaggccaagatgtgcaggaagtgacagcccttctccatgtgatttggtttctggcagtcctgctgaatgatccggtggatctttctgtgcaggtctttgtcttctctcggttacatagtataggttatcaaaaccatcatctttctggaaaacaagtcctttttcctgcagcagttgtatagcattcttaaatatactatgaattgccctggaagtgggtgtccctcctaaaattcaccttacggcacctgagaacaactcctagaccaactggttcatgaatttgtccaacaggccttttaactgctgagtcaaaaagatcctggtatgtaccggcttggtcggagcaggcactgtgaatcacaggctgattggcaagggacagcaaagactccaccatttccagctcctgctggtaaaagctctgcactctgttctccatgaggaattctttggctttttcactcagcaaactcgtgagactggggaggtccagggcgcgtggattgcttagtgcctcttctttctctagggctgagctgtgaaaaggctggtcataaactttcctgtagatagtgggcagctcaagcatccttgcaatttgaatgttccacgctgggtcgtccactttatagtaagcggtggcatgaatctctcgctcttctctgtatgtgcggatactgcctttgactcggatcgtgtccccgatctctatctttgttttctgctcaatggtcctcttgttagcttcttaagttgtgacggttaagctgagctcttcttgctgcacttggagcagctgatacagactcagtattcaactttttccagcagatgcagtttataactccagtgctgtcatccactccataactgtagaaagcatctctttctctcactccaatgacagttcccaagacatctacctgttttattggatgtccattgtacaaaaatacacctggcacctggcgggactccttcatgtccaggatatccctgatgtagagttttgcaaaggctagaaacacaggatccaaaccccacaagagggaaggggtctcctcttcacaccggctggatccaggctgcatcaagaggcagggctgtggcttccagctaactctgaaaggttctgcatcactgagtcaagcatctagatgggacacagaaatgaggatgcaatgcgtttaacgtgggtcaaagtggcccgggccctgacgctgctcccaggtgggcgtccaggactccaggaggggtgaacgcagggatctagggccctgtcaaactccatgccacggggcgtgttaagaggcgttcctcacgtcaggacgcatgcgttccttacggctctcccgctgttctccttcccacaaagctccaacttcggaacggctaaacatcaactttcactctgggaagatacgtctgtacaggcgtagcagaaaccgcttggggtcccgggaggaacgggcgccctcgcagccctgcacgtgttggggcatagtggatgggtctgactgtcgctctgccataaactttccgcttttggggatgagccaagaaaaggaggaaaaaagatactaaaaaatgcacccacttgtagcccctcccgccgcctgcagctccaggagccctgcgacctggcccttccggcgctcggagcacgaaa

SEQ ID NO: 154725 - DNA, 321 bp, Homo sapiens
aaaatggcaagttacctggctttccttctgctcaactttcatgtctccctcctcttggtccagctgctcactccttgctcagcacagccctaccccgccccagtatcatgcgatggtcccccacaccggttccctgaacccctcttggattaaggaagactgaagacttactttcctcctccctgtgttaactggggctgttggggacagtgcgtgatttctcagtgatttcctacagtgttgttccctccctcaaggctgggaggagataaacaccaacccaggaattctcaataaatttttattacttaacgctgaaaa

SEQ ID NO: 154726 - DNA, 980 bp, Homo sapiens
  misc_feature (1)...(980): n = a,t,c or g
atttgaagacttcgtagacatctggccagngcggnggaattccaattaataaaaaattggcttctccgatactcctcctgtcaagaatgattcctctgggttccctgaccttttgttctaatcatagctgctgctcagcgctctggatccctaagtgcgagcagaaaccatgtgttactcattgctgcacccctgccctaatctgcatgtgttccatgttaagtagctgctgaattgcaggggtcggaattgaggtctttgcttaatgcaagcatctgtcttatttcctgccctgtagatcgcccacatcacagaaatccgtaatcttattctccacagcttgaacaaccctttgtggctggaacctaccaggattgaaaagttttcacccagggggaaagtgacaagcctccatccaagggtaaagaaaatgagccctagctcacccaagaactcccaccccccagaggaagtgggatctgcttcttccagttttttgagggagcccagcccaggggggtcccagcacagcccctaccccgcccccagtatcgatgcgatggtccccccacancgggttccctgaaccccttttggaattaaggaagacttgaagactaagccccttttctggggaattactttcctcctcccttgtgtttaacttggggctgttgggggacagttgcgtgatttctcagtgatttcctacagtgttgttcccctccctcaaggctgggaggagataaacaccgaacccagggaattctcaataaaatttttattacttaacctgcaaaacanaganttaataggggcaggggggggggcctttttaggggatccttgggggggccaaattttaccggggttggcaaatttttatttttttccttttggggggcctttttaaaacctttttggggatttttgggagggacctttttttttggggggggaaatattgggccaaattccct

SEQ ID NO: 154727 - DNA, 1404 bp, Homo sapiens; identical to SEQ ID NO: 126723

SEQ ID NO: 154728 - DNA, 771 bp, Homo sapiens; identical to SEQ ID NO: 114661

SEQ ID NO: 154729 - DNA, 1173 bp, Homo sapiens
ttactgaataccaagagcctgaaaaactgcttgggtgatttgactaataatggccagtccgttatcgggctgtatagaggtgggaaggccaaaccgaggaattatatctgtaagacttgtctggtttttggacagataaaatgggggaattgtaaggagagttagaggctttaaaaggccatgctgtaacaggcgagtgataacaggctttaatccttttaaagcgtgctgcgggatgggatattggccttgagtggggtaagggtgattaggttttaatgggatggtaaggagtgcatgatcagtcgctaaggagggagtagaagtagaggtatcccatacttgtgggttaaagtggggagatataaggggaggatgtgaaggaggctttggactgggggaaaaggcggcaatgaggtgtggctgtagcccaggaatagtcagggaagcagataatttagttaaagtgtctccaccctccgtattgattaagaaggggacggacttaccctccactgtgagagttacccgaagatcggcatccgtgatggtcttgactatgcctttagctccagccacctttttaagaggaaattgctgggcaggtgggggagggctagtcacggaatgaaactgtaagccggaccaggtgtgaggaggagagatgataaaaggattatagggtggaggagcagaggctgtggaagaattgagacctagctcggcctggcgaggaggagcctggggaggaggggagaggtcagattggtctggaggagtggtacactcctgcccaaatactgtgcttttcccacagtcttcacaactgccagaccaggagatcccctcccatgcctggctcagtgggtcccatgcccatggagccttgctcactgctagcgcagcagtctgagattgacatgggatgtgggagcttagcaggtgaggggcgtctgccactgctgaggcttgagcaggtggttctggtctggattccaggtttctcatgattaacatgaggattttgattgtatgctttctgagttcttttacagatttaacgcagaatgttggtatgtctataaaagtagtatggaagagtggaaagaacatgggctctgcatcgaagagaaaagttgagggcaaatctgggagctctgtgactttgggcat

SEQ ID NO: 154730 - DNA, 3315 bp, Homo sapiens
  misc_feature (1)...(3315): n = a,t,c or g
ctaaacgctatccgatttgggataaagaaaaggagcattaaccttgactatgcatttagctccagccacctttttaagagtaaattgctgggcaggagggggagggctagtcacggaacgaaactgaaagccggaccaggtgtgaggaggggaggtgataaaaagattatagggtggaggagcagaggctgaggaagaattgggatctagctcggcctggcaaggagcagctgcccgctttccagtcgggaaacctgtcgcgccagctgcattaatgaatcggccaacgcgcggggagaggcggtttgcgtattgggcgccagggtggtttttcttttcaccagtgagacgggcaacagctgattgcccttcaccgcctggccctgagagagttgcagcaagcggtccacgctggtttgccccagcaggcgaaaatcctgtttgatggtggttccgaaatcggcaaaatcccacattgttgcctttggcttgcggcactgcgaagtgagagtaagtgaatgtcacatcgtttggatcaagacccatttgcagcacaagccctgttttgttcagcggcttgtaagggccggttaaagagtttgatacataaccaagcatgtaaatatcgtttgagttaataccatcgatcgtcatttttgaaccgcgtgaatcagtgaacaagtaccatttgccgttcattttgaaaacattcgcgcgctcgatttcatcagttaccgtgtttgaagtgatcagcggcttcattacttttttcaatgtgtaatcattatttaactctatgataccgagggcgccgttcgctaactcagcatcgcgttttttagcgctctgctgaagcttctggctttctttacggaagaagttcgtgccgccgccgtagtacgctttgttaaataaagattcttcgccttggtatccgttttctgttcccgtgttggcttcgaatacaaggtatttatggcctttgtcttcaacgtagtgagggtctctcagcgtatggttgtcgccggatgtataattgccttcatcgataaactgctgaacgttctttgcagtgagtgttacagctcttaaaggtggcaagtccagagttgtttgttcctccccgtgggtttgtgatcttgccggcttcaggaatgaagcctcagaaccagttgaagagcgttgatcaatggcctgttcaaaaacagttctcatccggatctgacctttaccaacttcatccgtttcacgtacaacattttttagaaccatgcttccccaggcatcccgaatttgctcctccatccacggggactgagagccattactattgctgtatttggtaagcaaaatacgtacatcaggctcgaaccctttaagatcaacgttcttgagcagatcacgaagcatatcgaaaaactgcagtgcggaggtgtagtcaaacaactcagcaggcgtgggaacaatcagcacatcagcagcacatacgacattaatcgtgccgatacccaggttaggcgcgctgtcaataacttcatcaaatttgcccattaactcagtttcaatacggtgcagagccacacaggaaggaataatgtcaagccccgccagcaagtgggctctattgcataagtgacatcgtccttttcccaagaagaaggcaggagatgtcttctgctgatatgaagaactgtaccctccgcgaacattgagctgctcctggggtcggtactctanagaatcccctgttcccgtgttggcttcgaatacaaggtatttatggcctttgtcttcaacgtagtgagggtctctcagcgtatggttgtcgccggatgtataattgccttcatcgataaactgctgaacgttctgatatgtttttccgtctccgtcaaaaatcgttttgtgatcttccactccgttgattttgagtgtgtcatcagattttgacacatttacctgcgctgttgtcaggctttgtttgccgtaatgtttaccggaatagtcagtgtagaataaacggatttttccgtcagatgtaaaggttgcagaaccggaccattcttgcgtctgatctttcaggatcggatcgttggcgtcgaacttatcgctgtctttaaagacacggcccgcgtttttccagctgtcgattgagttgtcgccgaccttttgataaaacatgtagattgatgtgtcatcagcgtctttcgggcttcccgcaagagcaaacacaacgtgatagccgttgtattcagctactgttccgtcagcgttttgcagcggccagctgtcccacacatcaagtccttttgcagactcaatatttttaatcgttgattgatcgaattgaggcacttggtatttttcgttttgctgctgtttagggatctgcagcatatcatgggcgtgtaatatgagagacgccgtacgtttctttgtatgctgcttggttattttctttcgcgaaggcttgagtcgctcctcttgccccttccccagaaaagcgggacttgctgttaagggtgaaggaccaaggcaggcgtccctgcgtggtctgacacctttgaaacatgggtgaataatcagagaggtgtccgtgaaatgattaaacaccaagggaaggctgccttcccagtccgtgaccggcgccggagttttgggtccacggataaaacgtgtcttctttgtctcagttgaagagcgttgatcaatggcctgttcaaaaacagttctcatccggatctgacctttaccaacttcatccgtttcacgtacaacattttttagaaccatgcttccccaggcatcccgaatttgctcctccatccacggggactgagagccattactattgctgtatttggtaagcaaaatacgtacatcaggctcgaaccctttaagatcaacgttcttgagcagatcacgaagcatatcgaaaaactgcagtgcggaggtgtagtcaaacaactcagcaggcgtgggaacaatcagcacatcagcagcacatacgacattaatcgtgccgatacccaggttaggcgcgctgtcaataactatgacatcatagtcatgagcaacagtttcaatggccagtcggagcatcaggtgtggatcggtgggcagtttaccttcatcaaatttgcccattaactcagtttcaatacggtgcagagccagacaggaaggaataatgtcaagccccggccagcaagtgggctttattgcataagtgacatcgtccttttccccaagatagaaaggcaggagagtgtcttctgcatgaatatgaagatctggtacccatccgtgatacat

SEQ ID NO: 154731 - DNA, 344 bp, Homo sapiens
tcagtcttcagccgctaagccgagaagatctgggaaggagtcagtcagagagccttgggccagagttccaggggctctgggagtggctgccaggtgagttgaacagtccgatttgcagtggggtcccacacagatgggacgtggcttaggaggaatcctgggctgccggcagtccttggcctggtggtcagatttctggcacttgtagcaagctcctttgaaacatgggtgaataatcagagaggcgtccctgcagtgatttaacaccaagggaaggctgccttcccagtccgtgactggcgccggagttttgggtccacggataaaacgtgtctcctttgtct

SEQ ID NO: 154732 - DNA, 431 bp, Homo sapiens
cttgactatgcctttagctccagccacctttttaagaggaaattgctgggcaggtgggggagggctagtcacggaatgaaactgtaagccggaccaggtgtgaggaggagagatgataaaaggattatagggtggaggagcagaggctgtggaagaattgagacctagctcggcctggcgaggaggagcctggggaggaggggagaggtcagattggtctggaggagtggtacactcctgcccaaatactgtgcttttcccacagtcttcacaactgccagaccaggagatcccctcccatgcctggctcagtgggtcccatgcccatggagccttgctcactgctagcgcagcagtctgagattgacatgggatgtgggagcttagcaggtgaggggcgtctgccactgctgaggcttgagcaggtggtt

SEQ ID NO: 154733 - DNA, 471 bp, Homo sapiens
ggattttgccgatttcggaaccaccatcaaacaggattttcgcctgctggggcaaaccagcgtggaccgcttgctgcaactctctcagggccaggcggtgaagggcaatcagctgttgcccgtctcactggtgaaaagaaaaaccaccctggcgcccaatacgcaaaccgcctctccccgcgcgttggccgattcattaatgcagctggcgcgacaggtttcccgactggaaagcgggcagctgctccttgccaggccgagctagatcccaattcttcctcagcctctgctcctccaccctataatctttttatcacctcccctcctcacacctggtccggctttcagtttcgttccgtgactagccctccccctcctgcccagcaatttactcttaaaaaggtggctggagctaaatgcatagtcaaggttaatgctccttttctttatcccaaatcggatagcgtttag

SEQ ID NO: 154734 - DNA, 866 bp, Homo sapiens
cgttgacacagcagcatatcctgacagccgacactaatctcttatgcaatgattatggtgcaggaaatggaaaaatcaaaagcattggttttgtggtgcacgcctgtatccgagctactcaggaagatgcctctagccatgactcaaccattcgcttcctaatttgttgcttccaaaccactctaggagctggaaagcaaaacaaacatgtgaaaacacttttaaagagagatacaccaccaggccaaggcaagactaatggtgaagtggagagaaatctctcttttcctacctctcctggaaacagaggcagctgcaatgggtggtggggtaaaacccagaaaactgggttcacttcgctggagtatgggaggagcctctctgtcattaggtcttttctggggcaagtgacagcaactccctcatctacagaaactggtgccaatgcacttcagtcttcagcagctttccaggtaaaaaacatattcaaagcagtaaatggtgtcagcggttattttgaagggaagccgacagtagagccttcagtctgtggtggaaggcttgagagcccctggcaaaccgccggtgtaagtccaacagtccaaaagctaaagagcttgaagtttgatgttcgtgggcaggaagaatcagtatgggagaaagacgaagcctgcctgcacccaggtgaaataaacagccatgttgctcacacaaagcctatttggtggtctcttcacagggacgcgcataaaaagaaacacagaggacaccctgccggttccgaagcagtagaagtcaacggcgggtctgcgaaggcagcaaacagcaatggtggacagcgagccaaagctcagctcaagccataa

SEQ ID NO: 154735 - DNA, 1583 bp, Homo sapiens
  misc_feature (1)...(1583): n = a,t,c or g
tctanagaatcccctgttcccgtgttggcttcgaatacaaggtatttatggcctttgtcttcaacgtagtgagggtctctcagcgtatggttgtcgccggatgtataattgccttcatcgataaactgctgaacgttctgatatgtttttccgtctccgtcaaaaatcgttttgtgatcttccactccgttgattttgagtgtgtcatcagattttgacacatttacctgcgctgttgtcaggctttgtttgccgtaatgtttaccggaatagtcagtgtagaataaacggatttttccgtcagatgtaaaggttgcagaaccggaccattcttgcgtctgatctttcaggatcggatcgttggcgtcgaacttatcgctgtctttaaagacacggcccgcgtttttccagctgtcgattgagttgtcgccgaccttttgataaaacatgtagattgatgtgtcatcagcgtctttcgggcttcccgcaagagcaaacacaacgtgatagccgttgtattcagctactgttccgtcagcgttttgcagcggccagctgtcccacacatcaagtccttttgcagactcaatatttttaatcgttgattgatcgaattgaggcacttggtatttttcgttttgctgctgtttagggatctgcagcatatcatgggcgtgtaatatgagagacgccgtacgtttctttgtatgctgcttggttattttctttcgcgaaggcttgagtcgctcctcttgccccttccccagaaaagcgggacttgctgttaagggtgaaggaccaaggcaggcgtccctgcgtggtctgacacctttgaaacatgggtgaataatcagagaggtgtccgtgaaatgattaaacaccaagggaaggctgccttcccagtccgtgaccggcgccggagttttgggtccacggataaaacgtgtcttctttgtctcagttgaagagcgttgatcaatggcctgttcaaaaacagttctcatccggatctgacctttaccaacttcatccgtttcacgtacaacattttttagaaccatgcttccccaggcatcccgaatttgctcctccatccacggggactgagagccattactattgctgtatttggtaagcaaaatacgtacatcaggctcgaaccctttaagatcaacgttcttgagcagatcacgaagcatatcgaaaaactgcagtgcggaggtgtagtcaaacaactcagcaggcgtgggaacaatcagcacatcagcagcacatacgacattaatcgtgccgatacccaggttaggcgcgctgtcaataactatgacatcatagtcatgagcaacagtttcaatggccagtcggagcatcaggtgtggatcggtgggcagtttaccttcatcaaatttgcccattaactcagtttcaatacggtgcagagccagacaggaaggaataatgtcaagccccggccagcaagtgggctttattgcataagtgacatcgtccttttccccaagatagaaaggcaggagagtgtcttctgcatgaatatgaagatctggtacccatccgtgatacat

SEQ ID NO: 154736 - DNA, 516 bp, Homo sapiens; identical to SEQ ID NO: 122299

SEQ ID NO: 154737 - DNA, 1398 bp, Homo sapiens
ttagaccttagcctctagagtttctgattcactaggctggggcagaagctctacaacgtacatttctaagcgttcatcagatgtggctgttgctgctgctctgggaaccacattctgagaaccgtcgggcagtagcttatccgtataggttattttcaggaaaataaagaaaccaacatctgtggctgggtctacatagaatatcccagtgaaaaggactgagtgtgttaagagtccattagggcgaaaaggtgcttcccacctcacgtgggctttccgggatccctgtgttttgacaaacacatttactgttccttcaggaggagcttctagagttcgattttccaccagtgggcccagagcacaacctttggccgtgcatgcttggactctgaaggaatgtaaactccaaggagcaaatccgtaagcacgatagctgagttctgaggaattgtggattaatataccatctagatataatccataactcgtgataacaccttgggccagagttccaggggctctgggagtggctgccaggtgagctgaacagtccgatttccagtggggtccggcacagatgggacgtggcttaggaggaatcctgggctgcaggaattccctggcctggtggccagatttctggcacttgtagcaagctcctggaggaggaggttctggaggaaggcctggccgctgcagttcaggcatttggaagttcttgtgtgctggagatgtggctggggttcgtctcacagtggaggcaaggaattgcaacttttttctattattgtacaccttgaaggcgaggttaattaaatccttgactatgcctttagctctagccacctttttaagagtaaattgctggtcaggttggggagggctagtcatggaacgaaactgtaagccggactgggtgtaaggaggggaggtgataaaaggattatagggtggaggagcggaggctgaggaagaattgggacctagcttggcctggcgaggagcagtcttttgataaaacatgtagattgatgtgtcatcagcgtctttcgggcttcccgcaagagcaaacacaacgtgatagccgttgtattcagctactgttccgtcagcgttttgcagcggccagctgtcccacacatcaagtccttttgcagactcaatatttttaatcgttgattgatcgaattgaggcacttggtatttttcgttttgctgctgtttagggatctgcagcatatcatggcgtgtaatatgagagacgccgtacgtttctttgtatgctttttggttattttctttcgcgaaggcttgagtcgctcctcctgccagaagtgcagtcgtaaaagtcagaactgtggcttgttttacaatttttttgatgttcatgttcat

SEQ ID NO: 154738 - DNA, 933 bp, Homo sapiens; identical to SEQ ID NO: 142245

SEQ ID NO: 154739 - DNA, 734 bp, Homo sapiens
gaactaaggggctccttccccagttaagggagacaaagaagagagtgaccattcagtgctcaatctcctcccatcgagctggggacccaggaaagaacaaggttggaagcaaagaagtcacaggatgctcgcacattaagatcagctcagttttgcaagattacccatgggttctagaaggcaaagccagtgagtgttgcacttgcatctctgggtctgagacaggcagatacaaagggtgtgagctggaagatggacactgtttcctgtactcacatgtaatagggattgaagaacagaagcagagaggtgtccctgcaatgattaaacaccaagggaaagctgccttcccagtccgtgaccggcgccagagttttgtgtccacggataaaacgtgtctcctttgtctgtctcagaaaatgaaaggaattgaaattaagagaagggagagattgaagagtggaaaggagaaagtgtggttgagggacagagagaggctggagaagagaacgattttgagggcttcagtatttaaaggagaaaagccggctgcaggagaaagagggaaggtatggtcatgtgactcaatccacgtgttgcaagagaaagggagcaggcctcagatatcagtcctctgcatcctcaatcacaggaaatacagtcccaggttctccgtgtggtccttaaagcctccatccatgaagcttgaggtaaggaggaagtgtcagagataa

SEQ ID NO: 154740 - DNA, 1332 bp, Homo sapiens; identical to SEQ ID NO: 129192

SEQ ID NO: 154741 - DNA, 860 bp, Homo sapiens
agacaaaggagacacattttatccgtggacccaaaactctggcgccggtcatggactgggaaggcagccttcccttggtgtttcatcattgcagggacgcctctgattattcacccatgtttcagaggtgtcagaccatgcagggacacctggcttggtccttcacccttagcggcaagtcctgcttttctgggggaggggcaaagaataaaatacctaggaatccagcttatgagggatgtgaaggacctcttcaaggagaactacaaaccactgctcaatgaaataaaagtggacaaacacaaatggaaaaacattccatgctcatggataggaagaatcaatatcatgaaaatggccacagtgcccaagagaagcttctctatgccttccacaatatctcccttaaacaatcctccagcttatctctgtctcagaactttcctaataatgaaaacaatgatggcagcaaagaagatgatgatggaggtgatgatgatgatgactgtcaggcctctgaggccaagccaaactcagcctgcctgcacccaggtgaaataaacagccatgttgctcacacaaagcctgtttggtggtctcttcacacggacacgcatgaaaatgacaatggtgatgttggtgatgataatgttgatgatgatgttgatgatgatggtggtgatgatggtaaagatgatggtgatgatgatgatggtgatacggtgatggtggtggtgatgatgatggtagtgatggtggtgatgacgataatgatgatggtgttgacggtggtgatgatagtggtggtggtggtggtggttgtggtagtggtggtgatgatgttagtcaccatttattga

SEQ ID NO: 154742 - DNA, 1125 bp, Homo sapiens
atggatgaagctggaaaccatcattctcagcaaactattgcaaggacaaaaaccaaacaccgcatgttctcacttacagagaagcttctctatgccttccacaatatctcccttaaacaatcctccagcttatctctgtctcagaactttcctaataatgaaaacaatgatggcagcaaagatgatgatgatggaggtgatgatgatgatgactgtcaggcctctgaggccaagccaaactcagcctgcctgcacccaggtgaaataaacagccatgttgctcacacaaagcctgtttggtggtctcttcacacggacacgcatgaaaatgacaatggtgatgttggtgatgataatgttgatgatgatgttgatgatgatggtggtgatgatggtaaagatgatggtgatgatgatgatggtgatacggtgatggtggtgatgatgataatgatgatggtgttgatggtggtgatgatagtggtggtggtggtggttgtggtagtggtgcccactcagaacaactttgtttgtcagtttggatgcttcaccttcgccaccttccaaagagagtctttgccaggctggcttcagtggctttgtaatgcagaattaagagaatgtatagaggaaagctgtcagtcactcctgctgctgaacagcaacactgtattggctccagctgctaagcctgagggtccagaggtggcttcccctcacctgcagaaaataaccaatacagagaagtgcttaaaggagctgatggagctgaaaaccaaggctcgagaactacgtgaagaatgcagaagcctcaggagccaatgcgatcaactggaagaaagggtatcagcgatggaagatgaaatgaatgaaatgaagcgagaagggaagtttagagaaaaaagaataaaaagaaatgagcaaagcctccaagaaatatgggattatgtgaaaagaccaaatctacgtctgattggtgtacctgaaagtgacagggagaatggaaccaagttggaaaacactctgcaggatattatccaggagaacttccccaatctagcaaggcaggccaacgttcagattcaggaaatacagagaacaccacaaagatactcctcgagatga

SEQ ID NO: 154743 - DNA, 786 bp, Homo sapiens
atgactctaaaatctctttttaagacctcagaaagatcaaacgtggtatcacagaatacgattaggtcagacaaaacatcttttaaaggaattgaaggtgtacacatatcttctatatgcaacaatcagcttctaggacgtttaaaggcactgtcctcagcaatcttagcagaagctaaagagacaaaggagacacattttatccgtggacccaaaactctggctccggtcacggactgggaaggcagccttcccttggtgtttaatcaatgcagggacgcctctctgattatacacccacgtttcaagggtttcagaccacgcagggacgcctgccttggtccttcacccttagcagcaagtcctgcttttctggggaaggggcaacggctgaagactgacactgcccgattgccttggaagcccccagaccatcatagacgccgagcttcgggtaactctcacagtggaagggtacagcctccctcccggctgccttcgtgggctcatgttgagtgtctcaggcttttccaggagcacggtgcaagctgtcagtggatctaccgttctgggatctggaggacagtggttttcatgtgcgtccgtgtgaagagaccaccaaacaggctttgtgtgagcaacatggctgtttatttcacctgggtgcaggtccattatccactctatgagaataataaaacccagttaagagcacttcgaatgattcacgtagagtccctagcttgtggtgtaagggagtcttcaacaaatgacaactattattga

SEQ ID NO: 154744 - DNA, 618 bp, Homo sapiens
tcagagaggcttgggccagagttccaggggctctgggagtggctgccaggtgagttgaacagtccgattttcagtggggtcccacacagatgggacgcagcttaggaggaatcctgggctgcgggcattccttggcccagtggccagatttctggcacttgtagcaagctccttgactatgcctttggctccagccacctttttaagagtaaattgctgggcaggtgggggagggctagtcacggaacgaaactgtaagcaggacccagtgtgaggaggggaggtgataaaaggattatagggtggaggagcagaggctgaggaagaattgggacctagctcggcctggcgaggagcagcttgtcccttcctcagaaaagcgggacttgccgctaagggtgaaggaccaaggcaggtgtccctgcgtggtctgacacccttgaaatgtgggtgtataatcagagaggtgtccctgcaatgattaaacaccaagagaaggctgccttcccagtccgtgactggcaccggagttttgggtccacggataaaatgcatctcctttgtctctcctgagatcaggagtttgagagcagcctggccaaaatggcgaaaccccat

SEQ ID NO: 154745 - DNA, 1771 bp, Homo sapiens
atgggcaaggacttcatgactaaaacaccaaaagcaatggcaacaaaagccaaaattgacaaatgggatctaattaaactaaagagcttctgcacagcaaaagaaactaccatcagagtgaacaggcaacttacagaatgggagaaaatttttgcaatctactcatctgacaaagggctaatatccagaatctacaaagaacttaaacaaatttacaaagaaaaaaacaaacaaccccatcaaaaagtaggcaaaggatataagcagacacttctcaaaagaagacatttatgcagccaacagacaaatgaaaaaatgctcatcatcactggccatcagagaaatccagatcaaaaccacaagacaaaggagacatgttttatccgtggacccaaaactccggtgccggtcacggactgggaaggcagccttcccttggtgtttaatcactgcagggacacctctgtgattattcacccacgtttcaaaggtgtcagaccacgcagggacgcctgccttggtccttcacccttagcggcaagtcctgcttttctggggaaggggcaagccgagctaggtcccaattcttcctcagcctctgctcctccaccctataatctttttatcgcctcccctcctcacacctggtccggcttacagtttcgttcggtgactagccctcccccacctgcccagcaatttactcttaaaaaggtggctggagccaaaggcatagtcaagcggctgaagactgacactgcccgatcgccttggaagacccctagaccatcacggacgccgagcttcagaaaagcagaacggactaaaggtcttttaaaaatacacctcaccaagctcagccaccaacttaaaaaggactggacaatacttttaccactttcccttctcagaattcaggcctgtcctcggaatgctacaagactggctactggccaattgggatatccttttatcagtcaaagctatgtcctggtcaatggatttcaaactgttgaggatctatgtgaagctgcagaccttcgagtgagtgttgcagaccttcgagtgagtgttacagctcttaaggtggcgcgtctggagttgttcgttcctcccggtgggctcgtggtctcgctggcttcagcagtgaagctgcagaccttcgcggtgttacagctcataaaagcaaaaagatgggactggggcaccttggagcagggggcggcgctcatcggggaggctcgggacgcacaggagcccacggagggggtgggaggctcaggcatggcgggctgcaggtccagagacctgccccgcgggaaggcagctaaggcccggcgagaaatcgagctcagcactggtgggctggcactgctgggggacccagtacaccctccgcagctgctggcccgggtgctaagtccctcattgcccggggccagcagggctggccgactgctccgagtgtggggcctgccaagcccacgcccacccggaactccagctggcccgcaagcgccgtatgcagccccggttcctgctcgcgcctctccctccacacctccttgccccttccccagaaaagcgggacttgccgctaagggtgaaggaccaaggcaggtgtccctgcgtggtctgacacctttgcaacgtgggtgaataatcagagaggtgtccctgcaatgattaaacaccaagggaaggctgccttcccagtccgtgactggcgccggagttttgggtccacggagaaaacgtgtctcctttgtct

SEQ ID NO: 154746 - DNA, 954 bp, Homo sapiens
tggctcagcggtaagcccaaggtccagcacacgaatcaggaaactgatggttcttgggttagcaggaatccgcccagagaacagatgaaagtaacaggtaccaatatcaaaactgcagtgactcaccagaaacactacgtgcttgccactttgcttagcggtttgttgagtccaacaactgcgtgggtcccggactcagcccgcctgcacccaggtgaaataaacagccatgttgctcacacaaagcctgtttggtggtctcttcacacggacgcacatgaaaaccactgtcctccagatcccagaacggtagatccactgacagcttgcaccgtgctcctggaaaagcctgagacactcaacatgagcccacgaaggcagccgggagggaggctgtacccttccactgtgagagttacccgaagctcggcgtctatgatggtctgggggcttccaaggcaatcgggcagtgtcagtcttcagccgcttgactatgcctttagctccagccacctttttaagaggaaattgctgggcaggagggggagggctagtcatggaatgaaactgtaagcctgaccaggtgtgaggaggggaggtgataaaaggattgtagggtggaggagcagaggctgaggaagaattgggacctagctcggcctggcgaggagcagcttgccccttccccagaaaagcaggacttgctgctaagggtgaaggaccaaggcaggcgtccctgcgtggtctgaaacccttgaaacgtgggtgtataatcagagaggcgtccctgcattgattaaacaccaagggaaggctgccttcccagtccgtgaccggagccagagttttgggtccacggataaaatgtgtctcctttgtctctagtgttcctatctctgattcctcttcaatgcatgattcacgctgctgccagagggtcacagcattccacat

SEQ ID NO: 154747 - DNA, 1183 bp, Homo sapiens
atgtgggaaagtttggaacttcctggaaacattttcaatggctttgaccaaaatgctgataatgatatggacgatgaaattcaggctgaggtcatctcagatggagatgaggaatttgttgggaactggaataagcctagagacttggtgccctgcatcctagccactctagccttgactaaaaggggacaagatacagctcagaccatggcttcagagggtgcaaggccaaagcattggcagcttccaggaggtgttgggcccgtgggtgctcagaaatcaagaattgaggtttgggaacctttgcctatatttcgcaggatgtatggaaaagcctgtatgtccaggcagaagtttgctgcaggggcagggttttcctggtatgttcctgtggcagttgttggagcaaaagttcacgatgtgaacctccatatgctgtcctttccatccaagtggaagctgcacacatgcatgaaatttggtgccgtgactcagatcgtgacctcccttgggaggtcctcctgttctttgctccttgagaaagatccacctatggtcctcagaccgaccagcccaagaaacatctcaccaatttcaaatctgacaaaggagacacgttttatccgtggacccaaaactccggcgccggtcacggactgggaaggcagccttcccttggtgtttaatcattgcagggacgcctctcttgattattcacccacatttcagaggtgtcagaccacgcagggacgcctgccttggtccttcacccttagcagcaagtcctgcttttctgaaggaaaggcaagatttaattaaccttgccttcaaggtgtacaataatagaaaaacgttgcaattccttgcctccactgtgagacaaaccccagccacatctccagcacacaagaacttccaaacgcctgaaccgcagcggccaggcattcctccagaaccaccttccccaggagcttgctacaagtgccagaaatctggccaccaggccaaggaatgcccgcagcccaggattcctcctgagccgtgtcccatccgtgcaggaccccactggaaatcggactcttcaactcacctggcagccactcccagagcctctggaactctggcccaaggctctctgactgactccttcccagatcttcttggcttagcggctgaagactga

SEQ ID NO: 154748 - DNA, 1609 bp, Homo sapiens
ctctgagcccaagctaagccatcatatcccctgtgccctgcacgtatacacccagatggcctgaagcaactgaagatccacaaaagaagtgaaaatagccagttcctgccttaactgatgacattccaccattgtgatttgttcctgccccaccctaactgatcaattgaccttgtgacaatacaccttccccacccttgagaaggtgctttgtaatattctccccacccaccccacgcccgcacccccgcacccttaagaaggtattttgtaatattctctccgccattgagaatgtgctttgtaagatccaccccctgcccacaaaaaattgctcctaactccaccgcctatcccaaaacctataagaactaatgataatcccaccaccctttgctgactcttttttcagactcagcccacctgcacccaggtgaaataaacagccatgttgctcacacaaagcctgtttggtggtcttttcacacggacgcgcatgaaatttggtgccgtgactccgattgggggatctcccttgggagatcaatcccctgtcctcctgttctttgctcagcacaagaaacatctcaccaatttcaaatccggtaagcagactctttttactctcttctccaacctccctatccctcaacctctttctcttttcaatcttggcgccacacttcaatctctcccttctcttaatttcaattcctttcattttctggtagagacaaaggagacaagttttatctgtggacccaaaactctggcgccggtcacggactgggaaggcagccttcccttggtgtttaatcattgcagggatgcctctctgattgttcacccacgtttcaaaggtgtcagagcacgcagggacgcctgccttggtccttcacccttagcggcaagtcctgcttttctggggaaggggcaagctgctcctcgccaggccgagctaggtcccaatgcttcctcagcctccgctcctccaccctataatctttttatcgcctcccctcctcacacctggtccggcttacagtttcgttcggtgactagccctcccccacctgcccagcaatttactcttaaaaaggtggctggagccaaaggcatagtcaagcacgctttaaaaagattaaagcctgttatcactcgcctgctacagcatggccttttaaagcctataaactctccttacaattcccccattttacctgtcctaaaaccagagaagccttacaagttagttcaggatctgcgccttatcaaccaaattgttttgcctatccaccccatggtgccaaacccatatactctcctatcctcagtacctccctccacaacccattattctgttctggatctcaaacatgctttctttactattcctttgcacccatcatcccagcttctcttggctttcacttggactgaccctgacacccataaggctcagcaaattacctgggctgtactgccgcaaggcttcacagacagcccccattacttcagtcaaacccaaatttcatcctcatctgttacctatctcggcataattctcataaaaacatacatgctttccctgctgatcgtgtccgattaa

SEQ ID NO: 154749 - DNA, 1114 bp, Homo sapiens
tcaagttttggcttcatctctattttgaactccaatgggaataaaagcaaactgacttttatttgcagccactttggcaaacagggcttgagacaccttggcccttttcatctcctgttggatctcgtcataaatggcagctgtgatgttgatgttggcgccgtccaccttaatagggaggtctgttgtcggtgtcgaggttttggccactccaacctcaatcactttctcctttccactcttcaatctctcccttctcttaatttcaattcctttcattttctgggagagacaaaggagacatgttttatccgtggacccaaaactccggtgccggtcacggactgggaaggcagccttcccttggtgtttaatcattgcagggacggcctctctgatcattcagccacatttcaagggtgtcagaccatgcagggatgcctgccttggtccttcacccttagcggcaagtcccgcttttctggggaaggagcaagctgctccttgccaggctgagctaggtcccaattcttcctcagcctctgctcctccaccctataatccttttatcacctcccctcctcacacccggtccggcttacagtttcgttccgtgactagccctccccctcctgcccagcaatttactctgaaaaaggtggctggagctaaagacatagtcaaggcttctttggcaccagccttggctcaaggggtcccaggtacacctcaggccactgcttcagagggtgcaagccttaaatcttgggagtgtctatgtggtgttaaccttgcaactgcacagagtgcaagggtgaaggaagcttgtcaggaagcttgtcagtctctacctagatttcagaggatgtatgagaaagcctgggtgcccaagcagaagactactgcagaagtggagctctcacagagagcctctactagagtagttctaagaggaaatgtggggttggagtccccaagcagagtcttctctatagcactgtctagtggagctgtgggaggggttcactgtccttcagaccacagaatgatagagccagcagctttcaacctcagtatgaaaaatccacagaggcaaagctgcctaagggcttag

SEQ ID NO: 154750 - DNA, 1463 bp, Homo sapiens
tctgacctaaaatctaagcatcttattttcttctgcaatgccgcttgaccccaatacaaactcgacagtagttccaaatagccggaaaatggcactttcaatttttccatcctacaagatctaaataattcttgtcctaaaattgacaaatggtctgaggtgcctgatgtccaggcattcttttacacatcagtcccttcctagtctctgtgcccagtgcaactcgtcccaaatcttccttctttccctcccacctgtcccctcagtcccaaccccaagcagtgctgagtctttataatcttccttttctacagaccaatgtgacctctcccttcctccccaggcatgctccttgccaggccgagctaggtcccaattcttccatcagcctctgctcctccaccctataatctttttatcacctcccctccctcacacctggtccggcttacagtttcgttccgtgacttagccctcccccacctgcccagcaatttactcttaaaaaggtggctggagctaaaggcatagtcaaggttagtgctcctttttctttatccaacctctcccaaaatcagttagcgtttaggctctttttcatcgaatataaaaacccagacaagttcatggctcatttggcagcaactttgagacgctttacagccctagaccctgaaagaaaacattcgtttatgcactcttttttagttatccccacctgcccagttcccttattaggccaagacattttaactaagttatctgcttccctgactattcctggactacagctgcatctcattgccacccttcttcccaaaccaaagcctcctttccgtcttcctctcatttccccccaccttaacccacaagtatgggacatgtctactccttccctggcaactgatcacatgccccttaccatcccattaaaacctaatcacccttaccccactcaatgccaatatcccatcccacagcaagctttaaaaggattaaagcctgttatcactcgcctgctacagcatgggcttctaaaacctataaactccccttacaattcccccatttcacctgtcctaaaaccagacgtggcttacaggttagttcaagatctgcgccttatcaacaaaattgttttgcctatccaccccgtggtgccaaacccatatactctcctattctcaatacatccctccacaatccattattctgttctagatctcaaacatgctttctttactattcctttgcacccttcatcccagcctctcttcactttctcttggaccgaccctgacacccatcaggctcagcaaatgacctgggctgtactgatgcaagtcttcacagatggcccctattatttcagtcaagcccaaatttcttcctcatctgttacctatctcggcataattctcgtaaaaacacacatgctctccctgatgatcgtgtccgattaa

SEQ ID NO: 154751 - DNA, 1201 bp, Homo sapiens
ttcccggggagtcggcctcggggctctgctctcctacctcagtctgccctaccctggaatggggaaaatgcggacatgccactcagtccggccgcgaacagtgctccagaactcagagagttttccagacgggtggagatcgcgttccctgcccgccgaggtcccatcgcttccctgctgggaagacaaatgaggcgctttagccgtctccacggccagcccctccctcataacccgagattctttgtgggctcttagtccatagctgcctttgagggtggtgtagaccttgctaaccaggacggcccagtaggcagagctcatttttattcctgtctgcaatcgtgcaaaaacgcctcttatggaaaagccagagcgccgggagtcagcaaaacacactaaagattgggcagtcactggggagaacactcagcccgcctgcacccaggtgaaatatacagccttgttgctcacacaaagcctgtttggtggtttcttcacacggatgcatgtgacatttggtgctgaagacccaggacaggaggactcctttgggagaccagtgccctgttgtcgccctcactccgtgaggagatccacctatgatctcaggtcctcagaccaacccagcccaaggaacatcttgccaatttcaaatcggaagataggagtgtcaggcctctgagtccaagctaagccatcaaatcccctgtgacctgcacgtgtacatccagatgacctgaagcaactgaagatccacaaaagaagtgaaagtagccttaactgatgacattccaccattgtgatttgttcctgccccacgctaactgataccatatattcttcccccgcccttgagaatgtactttgtacacctatcccaaacctataagaactaatgataatcctaccaccctttgctgactttttttttggactcagcccgcctgcacccaggtgaaataaacagccctgttgctcacacaaagcctgtttggtggtctcttcacacggatgcacgtgaaaccacacacctgcaacgaactcattttcaacaaagctggctagtagtatcaggcccagaatccagcaaagtccacagtcagctcagtcaggacccagacataggctccactaccatagccattcatgtgatgggcacaactaggacagaggtggttgccaatacctcttctccaaa

SEQ ID NO: 154752 - DNA, 1040 bp, Homo sapiens
cctaagagagagagattaagtaacttgctgagggtggcacacggccagtgtgttcacagagctagaattggagccgtgtcccctggctcctgagtctgctcctaaccactggcccatgctgtacatcactctgtgcctcttccagcctagggctgtgtctgttcccagttttcccgtcataaataacaccgatgtgccccctctagatttatgtgcttgagataaatttctagaaatggaactgcttgcttaaggaaaaacaataaacagagcaatagatgctgacgcagccatcggaatgggttgaatttaataacgccaagatgctgctccagatcattatgctgctgcttacacttcggggctgattcagagctttggttcctcgttatgaatttataccaggctcttggcccttttcctgcctcatgcatggggtcggcaaactgtagcccacaggatcaaatctcgccactgactgcttctgtaaatgaggcctcactggcacaacctgggcccatgcatttacacactggctggtggtgctttcacacagcacagagctgagcggctgtgagaggctgtgtggccccgcagagctgggaacctttactctctggctcttttaaaggaaaccttttgctgatcactggccttaagaaaagtacaggaaggtaacaaccaagacaagtaaagctgagtccacgacgtggtttaagttcacttagcccacaattacttcctaagtgcccacaggtacgagggtcctgtgccggctaagtgcctacaggtgccaggtcctgcgcctggcaacagcggggaacagggtgattctccagctccaggtgaggtcgcagaggcagctgaaacgtgctgttctttgatccaaagtgacgccactgagtttgtgtgattcaacgtaaggactggatgagttctgatgttagaaaagtgtccacttctaaatgctacagccaacctgggatctgtgccatgagggccaaggccgcacaatgaggaattccaccacactgacaggg

SEQ ID NO: 154753 - DNA, 354 bp, Homo sapiens
  misc_feature (1)...(354): n = a,t,c or g
ggaggaggccgaagttgttcccatttatccagtattggaaaatatttgacccccttggctgaattcttttgcagaactactgtgtgtctgttcactaccttttcaggtttattggttttatttttgcatgaattaagacgttttaatttctttgcagacaaggtctatatgcggagtcagagatgggactgaatggggagggatcctttgtgttctcatggttggctctgactttcagctgtgttgggaccactggctgatcacatcacnnnnnnnnnnnnnnnnnnnnnnnnnnnnnnnnnnnnnnnnnnnnnnnnnnnnnnnnnnnnnnnnnnnnnnnnnnnnnnncatttg

SEQ ID NO: 154754 - DNA, 994 bp, Homo sapiens
tttttttttttcacatttagctgtttttaatgcttaaaagctctgtacaaaaaaaaaaaaaatcacaaatgaatcctcacaacacccctgtgaggtaggtaggcaagtattattctcccattttacagatggggaaactgtagcacaagaggtgatgtgatcagccagtggtcccaacacagctgaaagtcagagccaaccctgagaacacaaaggatccctccccattcagtcccatctctgactccgcatctaaaccttgtctgcaaagaaattaaaacgtcttaattcatgcaaaaataaaaacaataaacctgaaaaggtaggtgaacagacacacagtacgttctgcaaaagaattcagccaagggggtcaaataatttcccaatcactggataaatgggaacaacttcgggcctcctccccttttcaaatatcatgaccaatgacacatcctttttttttttttcctgcagaagtacacgagcctaaccaaagacaggctttcctggtcccagtgagccaagcaaggtggacagcctcctcactgttcagctcctgggtttcagcaagcaccagtccccagctggaagagctgcaaggctcaacgcaaacatggcacttctctgccacctgttcccagcagccttcccgctgtgtggaaacagtggatcccagcagccttttaactcagcagggtctggccttttctgctcccaccggaaggcaggctcaaagatgctcagcaaggatggcctggaacccaggtgatcccctcccaccaccctcagtgcacccttgcacacctcactgtccatgaggaccaccccagcaaccaccctcagctagcactccttggggctcctgctgcagcaggtgggggcaccaggccatcctgggctgccgggacagagagagatgccgggggacctgcagctccaggccttggcttcctctgtgcctcctgcccaggttcccagacaagtggagcag

SEQ ID NO: 154755 - DNA, 1523 bp, Homo sapiens
aaaaatgacaacccagaaccactaaaatgtgtttacatgtgaaagaatcatcacgttgatttacgtcaaagaacatcatatttgtttatcttaatgcttggcatagttggttttaaggttttagaaatatttttgaatttattattaaacaataggaacgtactgtacagaatatttcaaaactgctaccaagaaaacaagtacaaattctacctagcaatataggtttcttatcaacataccttttttcctcactggtttcaaactgacaaaggtgtagggagaaaataattgaatggtttctgaaggccacactagccctttagccaagagttctgcttctgaattacatagaacatcttggtccacagacaatggaatggatttttggagagagtgtcaatttagggctaaagaaatacagggtgagaatgaagccctcaacaaaagctccaaaagggcacagaaactggtaagtgacctaaatatggagagacaggtgaggagaaaatacatagtaaatgctggctcgttattgcattttattctctcccttctctcatccattcatcttcttaagactgccttctgtgtccttttgcagggaaattatcttaccctttaacatttgctccttcactattttaacaaaaagcctataagaaaaataataaattccaaggctattacctaaaagcttgaataaaaataacaacaagccctatgctcccaatcagtaaactcgtttccttggaataaaatcttcatttgtggaaatggaatgatgtctcttagtagacagtgttcatttagggtgtgatactttcacttttagaagcaggaaaaaattccctaaatattaataaggtaaaaagtaaggactttccttctgagggattattgctttatggacttgactttgtttatccttatagtatatcactgccttacataactgtggatatgatgcccagtttctaatgatttgtccaaaatcgtctgagaaaaccaggccaatacaaatatagtgaaaacctcttgaaaatacaattattatagacccacataaataaagtctaatctgaagtctgatagctgattttatgttgaatatacgtcttttaaaaagtgttcttattgaacataaaatgtaaaataacattctggaaacaagtataaatattacatttattctgagtccagatactttctaaactgtagaagtgcaggatggatttgacttatccattagtaatacagactcatgaaaagttatgctgcaaaaaatgctgaacctcctctgataaatgatctttaagatggagagactgaggaagctaagtgaatgttcatgttcactgctgtaaattttccttataattggtaaaaaggctacccataatagaattcacattttcaatgaatttatagtttatcatcaaatagagtaaatgaattaagatttcatttttaaaaataaagagacatatttatttgtaataactctctttttttggtaataa

SEQ ID NO: 154756 - DNA, 607 bp, Homo sapiens
acccacgcgtccgcggacgcgtgggttaagtttaccaaatgtaaacaaaaattcatgaagatgagtattgccctctcccaaaaaaggtttaaagattagttgaacttccctcaactacacctaaagcaaaggggaattttagtaagtgtgtgtaccttgtttctttcagacacatctagaatgtttttctttcaccgtacctccaaaagaggcaatttagaaagtattaagtagtgacttttgttcagttccattttgtgtgtgtgtgtgtgtgtgtgtatgtgtgtgtgtgtgtgtgtgtgtgttaaccttgctttaaaacagtagcatatactatggtcattgaacttaatctctctggcgttagaaatttactttacaaaattgtgttaagacttttggaaaaagaaaatgaaactgctgtggtaaaaaccaagtttgtttcaaaaaagtaggcaattatttggctgttacattttctttgaaaactgcaataatttatatatttgtattgctctgcttgggaactgtatatatgcttgtctactatttttaattttacaacaataaaataagtattttgttatctgctaaaaaaaaaaaaaaa

SEQ ID NO: 154757 - DNA, 726 bp, Homo sapiens
ttttttttttttttgccattctggtatgaattttatttcggagtaatcaaatggtcctagaggatgtgaaaaaggttttctgtacagaattagagctaataaatgaggaaaaattaatagccttagaaaatcaccattctgtaatccctagtgaaacaagcaattcataaaatgataatcaacggatagtaaaacaacttggtgaaaaattgaccggaaactttatgatgctgggatgaggctatcaccatctgaaaataaaagaagcctgggagctggagtggacagtggaggagagctgtccaaccagaaacacccgtgccatgtagaataagttaaaaataaatctgtggtgttaaatcactgaaatatgggagcaattcattacagaagttggcttaccataaaagtataccatttatatatattaaaacacataggcacataattacatatattttcaaagatacatacatatccaaacatatactgacacagggagaggaatgagaatagggatgagggatcaaaagaagaggccaggcacagtggctcacacctgtaatcccagcactatgggaggctgatgcaggaagacttctcaaggccaggagttcaagaccaggctgagcaacacagtaagacccaatctctaaaaaaaatttttttttaattagctggacatgctcgtgtgcacctgtagtcctactcagaaggctgtcgacc

SEQ ID NO: 154758 - DNA, 1031 bp, Homo sapiens
ttttttttttttatttctgttaaaaagtttatttattaaaggaaccattattgcttttgtggcctttcctgaacccttgttttgcattgtgggtttactttgctctgcactgcttcatctttaactgtcttctgggaattttactgggcagtcacacaccattgctctgaaaacttcctattgtaacttagacggaacattgttgtaaaggttatccttgtgctgccatattagttaagggcaggttgattgctgtaactgacaatgaccaagtttcagtgacaatgcaatagaaatctatttcttgatcacataatgggccaatgctaccagatatccctgccccaagtggtgattcagggacccagagtcctcctatctgtggcaccaccatctgtgttggggtagaggagagggagagagagaaagagacatacacacattcacactcacacacacacagcaaatttgtttgtctctgtctttctttattttttatccttcctgctccattgtgcgctctgtctctcttgatggatgtagaggtgcagtgctaatcctatccttcccactggtccatatgcttcccagactttcatgattctcccatcatgcaccactgtcatctccctaccctgtcattggctcctcttcccccagtatagtcagacactctacagtctgtttactgaactaaatgggcagattactgttacctcagccaagattacttacacctccaaaatctgatctcgtagtcaaaactggagtacaggacgttgaatatgttacaagtgtcttcatgaagctctcaaataagggctcacataatgggggagaccaaggtattttcagactctgctatcctgagactctattgtcactgttgtttttggttttaggagtgtccaatccagctcatgtctttttgtaaccccgtatacagcccttgtaatcaataaaatatgcgcacaagatatctagatagacctggatggtagtatcttgctggcctcgaattgaattactga

SEQ ID NO: 154759 - DNA, 2934 bp, Homo sapiens
  misc_feature (1)...(2934): n = a,t,c or g
gggctcgtcagatatattaattttacacttcagttttgattggtgagaaagtacccattctcttcaaataatcaaagataattattattttgttttgtttttggaatcaacagggaggcgcaaagtataaagttgctgctaacatatatacatatacatccatattttataagggtgtctatgtatatatagacagtgtgtccacacaaaaaatagatacagttatcagtcagtcagttcttccatgatttagtttttttaaacgtagaaaagctattgtaaacgtctctttccatttattcttaattttttgacatattggtatttctttaaagggaaatgaggaatgcacatcagtgattgattgtcaaacctcaccccctgatttcctacctaatctacccccacctaaccaatcaatcacatccacaaattgttttgtttgtttgttagtcaggcttccaacagagttcaatatttctaacactctagtgcaataaaaattattattaaatagctaagaggtgtgcatgtgggaaaggtcagtgcatatccctttaggaggggagaatgttgtaatatatcagctatcgagttgtttaaaaaaagtgtattcaatcgtatattgtctatagtatgtgctatgaaatttgcatttatgatatgtaacaggggcaaagccaaattcatgttactctgttcagtcagaaacattttgtggcatacagcattcctgggaagtgctgtactttgtttcgttttggttttagttttgcatttagagtgccttataattgatgcctattttaatagcatttctttttagcttttggttcgtatttccattcactgttcgtatctgttactttctattaaagcattatctgtttaccacatgtacaaaaactctttgaataatatgcattcctagttttcagccaagtcggggatgttagtgattgtaccagcccaaagcacttggataatcagggcccttcttccttttataatcaatcatcaacatcagaaaaagctacttgttttatttatattcccttccaaatccgctctggaacatgcggtaactgccccaaacttattttagtacccaaatacccatggccaactttggaatatatttgatattcccattaggatttttcctaaaaggggaaataaactatatatatatatgtatcttacccccaattcttccaacagaatttctataggaagccatggatgatgncatggcataagtttgccacatattacatgattttaaataatcctcaaaatacccaaggaactcttaaagagttttggtatgagtatactactttggtttaattttagcttcatggatgttctgcatggaaggatttttgttttccacattttcccattgctagcagagtgaaatccaagagaccaaacatttgcaagcattgtatttgagcacttttgtaaaaaacaaagaaaaaggaaaaaaaaggaaaatatatataatactaaaaaaaagtatctagaaggctacctcaaaaagagactctctaacctacatcagaaccagagaagaatgtgcactatgtgggtctgttatcattattttcttttaggtggtatctttttggagatttatccaagtgccagattactcagcgctataattttcttttagttaaacaaagggggtcagacagacattgcatcatcccagacatgccttgttggacatgtagaatccgatggagcactgcacaccacaatgattgggcccaatgagccagccttcctctcccctgaaaacaataactgccccatttggcaaagggaaagatggacaataatccagaagaagaaaatgaatgggatgcatacccatagacggaacgaggcggagactattgcgggaatccttactgttcaggagctgttccctagaactaactcccttactgtcattgatgtgcattcccactctgtgcttttctgtacaaccattcaagttttaatttcccaggtgaaccatctttatctgccattaccacaagctttcaagtttccagttattttcatcatcataaccagtacggggctattatttacctatgtacgtgtagttatgtataattttgtaattagttacaatggtaaaaaaaatcaaaatatataaaaagtgatttgtacagaactttattttagctcttttttaaaaatgatttgcatggttagaaaacggcgaggacagccaggggagggaagggcctctagggaactttgcactttctatacctttgtactatgcactgccctattgattctacacccaataatgatattacttgaacccatctgtaagaaactgcttcggaaattcatttgtgtgtatgtaaataacacaacatagaaacaggaagggaaaaaagtctgcagtaatgcacgtattttttttctttcctgtttattttcggttttgctttaagtccttttatttttaattccctttttgtttttctttttgggttttggttcctttttgggtttatgggtgcccctggatactccagcagaagatcagaaaggctacagattccattctatccatccgttatgtggctttgccatcccagcttggagtgtcctttacaaagataataacagttgtgttcctttgcctctcgttttggatgccatagactgaaaaattaaaacaaataacttgtaaaatggcttgttaaaaaatacaatttacctctaattaagtagtacggccgtaaatggttttacagaatgaaaggcgtgctttttattttccttacttctttacattggtggcgaaagaagtctgtatgaaaatcagttctttgctgacacaagttccatttgttacaaatgaattctaataaaaatgtcagtgttatgcaaaaaaaa

SEQ ID NO: 154760 - DNA, 419 bp, Homo sapiens
  misc_feature (1)...(419): n = a,t,c or g
naataaaacccaaaaaaaacttcctaatgcatgcaaatgtgtattatacagctgttaagtaacatacatatcaccttaataaaaatcaagatgaaatgttttagaatctattttatcaaaagtggctctgnnnnnnnnnnnnnnnnnnnnnnnnnnnnnnnnnnnnnnnnnnnnnnnnnnnnnnnnnnnnnnnnnnnnnnnnnnnnnnnnnnnnnnnnnnnnnnnnnnnnnnnnnnnnnnnnnnnnnnnnnnnnnnnnnnnnnnnnnnnnnnnnnnnnnnnnnnnnnnnnnnnnnnnnnnnnnnnnnnnnnnnnnnnnnnnnnnnnnnnnnnnnnnnnnnnnnnnnnnnnnnnnnnnnnnnnnnnnnnnnnnnnnnnnnnnnnnnnnnnnnnnagatagatcggagatgggttggagga

SEQ ID NO: 154761 - DNA, 213 bp, Homo sapiens
agggatctttgaagttgatggaaatgttctaaaatcagactgtggttgtggttgaacaagtctgtaaatttaccaaaatgcgttaatacacttaaaacagctgaatgttatgatctgtatttagtaaagctctttttaaaatatggctctactactgctagagacattgatatcaaagatgcagagtttgaataattgtttcaggaaaagttt

SEQ ID NO: 154762 - DNA, 1384 bp, Homo sapiens
  misc_feature (1)...(1384): n = a,t,c or g
ggccctaaaaaaaattgtaagtctacattattcaattataaatctaatgattttagaaaaatgcaatgcaacatgattttattttaaaaattatacttgggtaaaaacaattgcaataatcttctggcaccattgggtagctggcatttaaatataatttaagagttagtatataatattttcaaaaagctaacaacatcctaatagaactgttcagatgacaagagtgtcttcttgcttttcagatttggccactgatcgaagttttacccataagggaaataacatagtatcaagcaatagtaaaattatcagtttgacatggatgggttttgaaatacttaagacacaacataaaatttagttcaggggtctttagattgtaaagaaattgactgaaagtatgtttattatgctataaatgaagttgtttataacagcgaaaaaggttctcctttaaaaaaaaaacttatctgtagtactgaatatataaacttttcctgaaacaattattcaaactctgcatctttgatatcaatgtctctagcagtagtagagccatattttaaaaagagctttactaaatacagatcataacattcagctgttttaagtgtattaacgcattttggtaaatttacagacttgttcaaccacaaccacagtctgattttagaacatttccatcaacttcaaagatccctggtgccatttgtagtcctccaacccatctccgatctatcttgtttctatgacttgccttttctggctatttcatataaatgggatcatatgacatgtggtttcctatatctgacttttttcatttagcataacgtttttgaggctcatccatgttgtagtactcccatgccatgttgtgggcctacataatattccattgtatggatatacccacattttgccttatcagttaatggacatttaggttttgtcctactttttggcattaatagtgctgctgtgaacaatcatgtataagtctttgtatcagagccacttttgataaaatagattctaaaacatttcatcttgatttttattaaggtgatatgtatgttacttaacagctgtataaatacacatttggcatgcattaggaagttttttttgggttttattcatcctgtagtgatgtatctgtgacctcaacgagtaggcacttctgtactgtactggtttcttaaagtttcttttatcccgcccccacccccaacctcagcctcaagtatgtaannnnnnnnnnnnnnnnnnnnnnnnnnnnnnnnnnnnnnnngaaaaacaaaacccccttttgcccccaggctggaatacgggggcgtaatttgggatcattggaccctttgctttcgggatcaaggcg

SEQ ID NO: 154763 - DNA, 445 bp, Homo sapiens
  misc_feature (1)...(445): n = a,t,c or g
ctctggttaaaaaaaaacacgggtnnnnnnnnnnnntccccaccgttattcccaccccttggggagcccaaacgggatgattcccccggggccgggggtttgggnnnnnnnnnnnnnnnataaaaaaccccccttttttcttaaaaaaccaaaataacccnnnnnnnnnnncccagcccggtattcctggcccctgggggggttagggcggggaattccctttacccccgaggcccagggttccattaacccagatttggccccttccctcccccccggggcaccaaaagggaaccccctttccnnnnnnnnnnnnngatagcaaactgctttcttctttctgacaagagccttttgctggaggaagcctgggggcaggttgtgggccccagtcctcttgaacccactgttgcccctaagccaaacccaaggggcaaggcacaga

SEQ ID NO: 154764 - DNA, 573 bp, Homo sapiens
ttcagaatgtttttagctttattaaagacatattatagtagacaaacaagtagacaaacacatgctctataaaatatacattctgatgtgtgacaaaatataaacagatactaagaaatgactacactgaacaatgacttggcttgtatctctgtttaggtacatctagtattagggctgctcagactagtattatccaataggggaaaaaaataatagtggaaagtagagggtagaaataagtctcaccattgtaaagaggccacagtaaacagcaaagagacattccaagagtactcgaccatctgatgatcaatttctctttcaagatagttacagtttgtagatcactttactcctttatctgaaaacaggcacaagtcaagctgtttcttcaccttcaccctattccatcttcacacacacacacacacacacacacacacacaaaacctaccttactactgacaaaaccttcagatgattcttgggttttcaggtggtgttaagtgcagcttgtaacatatctcttagttccaaacttgttacttttgtcaatgaaccagacaattg

SEQ ID NO: 154765 - DNA, 4823 bp, Homo sapiens
  misc_feature (1)...(4823): n = a,t,c or g
atgtcttttcttggcatcctgtgcaagtgtcctctacagaatgagtctcaggaggagtcctacaatgcctatcctcttccagcagtcaaggtctccatggactggctaagactcagacccagggtctttcaggaggcagtggtggatgaaagacagtacatttggccctggttgatttctcttctgaatagtttccatccccatgaagaggacctctcaagtattagtgcgacaccacttccagaggagtttgaattacaaggatttttggcattgagaccttctttcaggaacttggatttttccaaaggtcaccagggtattacaggggacaaagaaggccagcaacgacgaatacgacagcaacgcttgatctctataggcaaatggattgctgataatcagccaaggctgattcagtgtgaaaatgaggtagggaaattgttgtttatcacagaaatcccagaattaatactggaagaccccagtgaagccaaagagaacctcattctgcaagaaacatctgtgatagagtcgctggctgcagatgggagcccagggctaaaatcagtgctatctacaagccgaaatttaagcaacaactgtgacacaggagagaagccagtggttaccttcaaagaaaacattaagacacgagaagtgaacagagaccaaggaagaagttttcctcccaaagaggtgagaagggactatagcaaaggaataactgtaactaagaatgatggaaagaaggacaacaacaagaggaaaactgaaaccaagaaatgcaccttagaaaagttacaggaaacaggaaagcagaatgtggcagtgcaggtaaaatcccagacagaactaagaaagactccagtgtctgaagccagaaaaacacctgtaactcaaaccccaactcaagcaagtaactcccagttcatccccattcatcaccctggagccttccctcctcttcccagcaggccagggtttccgcccccaacatatgttatccccccgcctgtggcattttctatgggctcaggttacaccttcccagctggtgtttctgtcccaggaacctttcttcagcctacagctcactctccagcaggaaaccaggtgcaagctgggaaacagtcccacattccttacagccagcaacggccctctggaccagggccaatgaaccagggacctcaacaatcacagccaccttcccagcaaccccttacatctttaccagctcagccaacagcacagtctacaagccagctgcaggttcaagctctaactcagcaacaacaatcccctacaaaagctgtgccggctttggggaaaagcccgcctcaccactctggattccagcagtatcaacaggcagatgcctccaaacagctgtggaatccccctcaggttcaaggcccattagggaaaattatgcctgtgaaacagccctactaccttcagacccaagaccccataaaactgtttgagccgtcattgcaacctcctgtaatgcagcagcagcctctagaaaaaaaaatgaagccttttcccatggagccatataaccataatccctcagaagtcaaggtcccagaattctactgggattcttcctacagcatggctgataacagatctgtaatggcacagcaagcaaacatagaccgcaggggcaaacggtcaccaggaatcttccgtccagagcaggatcctgtacccagaatgccgtttgagaaatccttattggagaagccctcagagctcatgtcacattcatcctctttcctgtccctcaccggattctctctcaatcaggaaagatacccaaataatagtatgttcaatgaggtatatgggaaaaacctgacatccagctccaaagcagaactcagtccctcaatggccccccaggaaacatctctgtattccctttttgaagggactccgtggtctccatcacttcctgccagttcagatcattcaacaccagccagccagtctcctcattcctctaacccaagcagcctacccagctctcctccaacacacaaccataattctgttccattctccaattttggacccattgggactccacataacagggatagaaaggactgcagatcggtggaaaaactgataagccagccatgggtgggtttggcattgattatctctcagcaacgtcattctctgagagcagttggcatcaggccagcactctcgagtggcacctggacaggccatggcccttccatggaggattcctctgctgtcctcatggaaagcctaaagtctatctggtccagttccatgatgcatcctggaccttctgctctggagcagctgttaatgcagcagaagcagaaacagcaacggggacaaggcaccatgaaccctccacactgaggccaaagtggcaacctgggaatgaaggctccataaaccatggcatgttgggtttgcaggactggcccacacagtcccctgcaggtggcagccctcttttctgtttctcgctgtcaagagggtgtaagtattccaccagcccgctgagtgtgcccgaaattgttccaagtgcaacaaaaagaaaaatccatcaggaaactgctccgtccccccggggccctccggagggagagagagaggaactgctgtttatctcactcagttacttggtatcaccgcctctcaccttctccatcgtgcatgtccccagccacatgggaagtgaaagctgagaagggaaggcagatgggagaagccaatgggaacttctcagtccttttttcctctttggggaataaaataggaatccattaatgattgctttgctgactgagaatgtagttgaaattattcttaaacatcttttattattattactctcaggcgcaaaatatcacactgaattctttcatactcccgtgtgcttctagtcaatgtgcagcaaggaaagccccgttcactgctcctgtgataagcttgtggtgacaggatggggaaccgacctcttcacccagtggaaatgttccataagggagagttcaaggcctgtcagcaggctctggtaggccttcctctggccaggagactccagcagggaatgcccttccactctgtaggttgctcgagccccaatcgaggataacagtgtgggtggtggtgctgggctggactagcaggtagactgctgtaggattttcaaattacgttttttgatttcctgtaccattttacagtccgcacagcaagcagtcttcacagaaggcaggctagtcccatttcacagccttgacacgttcttaatagggtaggaagctttccagttgttggttattttttttctttgggttggtttttgtgccccccattctacttcccaccctcctgccccatctccatcccttcttttacccaatgctgtatgctagtaattgtttttattcctaatgtgtgcaacatcacatctccccaaggaaggcaacagcatggggggtccaggcagttggggggcccaaaaggacagttttgaaggagggaagggaagcagccagtatctgcggtagcccacagaggggccccagggcccctggcccagctggcagttttcccagccttccacttttcagagtgaaatttcaaaggcagcacgggacatgtggcccatcaggcacaggaaggaaaacacgacgtcgtccattttgggaaggaggacggaaagaaaagggaaaattaaactctttgtatgatatttattaggaggaaagaggactgaaaatgttcttgtgtagaaacagaaggacagcatttctgttagtcatttcctgggaaaagttaatattttaagtgggaaaattatggaaacaatctaattgttcaattgctgtgctagtggtagggtttattttctgggaggtctctcctttgtgtgtctgtatgtttgtgtacacacacgtgcccatctgctgtcccagaggggaggggttgtgtgtgcgagtgtatgggagttagtgtggaacttaagagctggaagacagctgttagagcaaagcacatccagggagccccagttgtcactgcagtctgggcaaccccagcaatgaaaaggggtgagataaccgctcattgctcttcagagagagtggttgggagcccccccccccccccccgttatgccttacattattgcctcttttagtttgacatggtgtttgggttttgtttttttgaaaggtctgaaaaggtgaagccccctacccaatggccaatatgaaaccttttgtgcttctcttcagccccttccctgtgtccacctttctctccctctttccccaagccctttccccctacctacccttaacccccaagattggtgtggtttggaagctcctggcattccagggcaagcctgccaaacatccccagtgtttggaaactggtcaactgaattccttggcgcccccaagaacaaagcctaacccaggtttaccccatcctcaactccccagtaaataccccagctccctatcctaaagncccccattctgccatgaagaatttggtgtttggaatgttttactgactcttggggcgggattcctcgccttatcatcctcactgtgggagtaatgagggggaaggagaatctttatcagaaactggttttgtgtagtaaacttttttttgtgggttttttgttttgttttctggggtttgttttttgttttttgtctgtggcaagaccctgcagctgctggaaaatcagctttgcctttaattaaaccgatgttctctccaaccaaaaaaaaaaaaaaaaa

SEQ ID NO: 154766 - DNA, 803 bp, Homo sapiens
ttttttaaatttataaacatttaaattttattacagaaatttaaattttttgattctgaaaaagtcatatatgtatgcaacattttttatcatttatttatatatttatgcatctttccttttagttttgacagagattttctattttatcattatttcaaaagaactcttacctgtatttatttatcaagtatatttcccttgttttttcctaggatattaatttatttacttatcttctaaaaatcctccatataatctgtttattttgcttcctttctataatttcttcaataattagttctgttctattttccattaaaatatttaaatcttgtatgaatttttgtcagattagaaatttagggcgtttcttaatttctctatactctagcttttgactttttttttctgacctaagaggtatttatagcacattttacattttttattttgactaatcatttaaaacggatactaatcatcaatttaaataaaaaactggactatagtgacaaaaattacaaatgagcctaactaatagagtatcagctgtgtttatatgtataagcatgcacagattttggtaaatatgcacataatatattggcgaccttatttttatcattcttaactcattgggcagcctaaacgttggggaaaaaataaaatacaataatcagatggtgtgaataagaaaattgttctaatgtttgtaaaccaagcaactgttttaactgctcccctcttcctgattgacttctaaaagggagtgatccatattgggtcctatcatatacgtc

SEQ ID NO: 154767 - DNA, 1081 bp, Homo sapiens
gcgatttttcatttggcaaatggcataattatttgaaagtgacaggaatctcctcagaatgaagaatagagcctaataggtctctaactgttgaactcatgaaagaagatagtgtatgagacttaagccatgagtttttgtatcattttcaattagaagactactagcctgtgagctcagagtttaatgtaaatgaatctagatgattttgaagaaatgattattcgttcaccagatcactcattgtacattctaaaaagctcaaatgagtcttctagatactcttactcatcctgtctggttgctatgtttaaaattatgtggtgctgtgtaggtgaaactttaagaatatttttgaagcatatgtaatatatgcactgctatttgtgtgtgtggtgtgtgtctttgtatatatgtaacaatgtgtgtatgtgtgagagcaatagagaggaaactcaaagaggagtgtttgtcttaagacctgttcatactgggatattggtgagacttctcacttctggttggaggtttcacatatggctcaactcaagtcattaatctctttttaatttttactcttgaattccttaaaactccgctcattaatgaaatggttttaaaaattatgacaaaaaattactctgtctaaccacttggccttgtctgctaccagtttgttaaaaattattccccccaaccagtaattccaccagtactacttgatttgtgttatatttcctatgtacatgtacagcctttgttttgcttgcttgtctatttttactttcccttttttgggtcaaatttttcttttgctttgtttgaagaaggaatatacagaagtaaaatcttgtcttctctgctgattctttaattaatatgagccggatactttccactgtcttcttggcactttcaaggatttcttaaatgctgatatatggactcttagaatggaatttttgaagaaaaatctcaaagcctgtatcgttcttgaaggtcacatgtacctattgtgaaaatgtgaagctgtatttctgaagctgaaataaattataacatttgaaggaaaaaaaaaaaa

SEQ ID NO: 154768 - DNA, 980 bp, Homo sapiens
gatagcctggcacctttccctcctgggggatttcccggacacccctaagggcttcttgcttctctcaaccctaacctttgaggagggactaatgattgggtggggaagcttaagtcttgctctgttgcaaagcccaggccccctgggctgttcgtctatctatggtttaagatgctttcaaaaaactggggcattctccctccccaactccagaggggtggcttgaagaaagagaaaccaacgaaggggccaactgtataaatctggggaacccatgaatagggtcaaaggtgtgagcccccgcccctgcccccatcctttggatgagatagtggctaggagcctccattcccacctgctttccagaaggctgggggccctgcctcccccagcccagggcccccaggcccccactaagaccccacaggccctgcaagtgaatggaaaatggcaaccatgggcaaccgtcctccagagatggtttcccaggcttgaaatgggctgaagatgaagcatctgcgagagggtcatttttttttaaactttggagcaaggagaacccgaggctgggccctcagtcagcacagctggcttttctgccctggtctccaaggcaccgccaaaattacttactgttcacaccagctgcgggcaccggaggggcgcacgcggggctggggtgggttgggggttgctgggcatttccttgggtttagccctgagggatctgcccagctggggactcaggaaaaaagtctcaggctaaatggggacagtctgtgagacacgagcagggaacaatcacgagaaccggcacaagtcatgcaacaaaacgaggagagagagagaaacatgattagtggagagagagagaaagagagaaaatgtgaacaacacggaaaagaacacccatgcctggcccctggcgtcacttcatttctccgctacttcccccacagcccacctgaggacaacaaaga

SEQ ID NO: 154769 - DNA, 1140 bp, Homo sapiens
ccgcccctcagccccccccaaagtgccgggaatcacacccgttccatttgttaaagccaatttgcctaaaaactgaccgaggtttattccattgcctatacagccagtgtttgattcagataaatatccttaatagagtcacatttccttcatgtcatgccctttaaggttgttccccaaatagtcataaagaacagaggatacctcaggtatgtaagatcttagagcccaagagagagtatggaaatggatgttcagctggtatttactgtcataagtgggattaggaattgtgggtttagggaattaaaaacaaccaacaattctacttggcttttaatctcttcagttatgagtgaagcatatttgcttgtaagggaagagataaggtaaaggaaatgaaataaagaaaaaaaatttggtggttggtatggggaattcaagaaagataaaattttgtagaaataaaaggcttgatgagctggattagaaacccagcacagttggaaaaattgacagttttcaatcaccaggcatatctttaaagtgaataaactgagattcaattaggacagggaaggaagtgaacaggagagataatggtatagcaaaagggagtccaaggagaagaagtctcagtgggagttttggaaaaccaagagaggcagcaagataccggaaagagcgtagacggtacaatgaacggtaagcaaagcataatttcccaaaatagtcttgatcagtatttcctgtaaaaatgtttgatttaagcattttggccctttccataagcaccatttaatggtcctctttaaaatacagaatgtactttttaaagatggaaatacgtttgaggtcaggcgtggtggctcacgactgtcatcccaacactttgggaggcccaggagggcagattgcttgatgagctcagtagtttgaagccagcctgggcaatgtggtgaaaccctgtctcttaagaaaaatacaaagattagccaggcatgatggcacgtgcctgtggtccaagctacttgggaggctgagttgggaggatcacttgagcccaggaggttgaggctgcagtgagccattatcatgttactgcactccagcctgggcgacagagtgagaccctgtttc

SEQ ID NO: 154770 - DNA, 930 bp, Homo sapiens
ttttgtatttttcgtagagacggggtttcactatgttggccagactggtctcgaactcctgacctcgtgatccgcccgactcggcctcccaaagtgctgggattacaggcacgagccaccccgcccagcctatgtagagtatttttacagtgctttactgtaggcaaagtccttgtacttctactctcttattttacttgtgagtgatttcaaatcagtgaaaaagctaaatagccacatatacacctggctatatcattaaaataacacagaatgttaaaatttctcctctgttatatttcatttatttaattggataagccatttttaaccaagtttaatttaattatggtgatcataattaatagtgattggaagaatacaactgtaaaacagttctatggtttgtataccttatttgtcttatatgtgttaatagaaaacatctcagtaatttcaaaactagtaatacgatatgggaacagtatgttatagcagaaagggccctgggcttgaaatcattattcagttcatgtttgtattcctacttctcttataatttggactatttaataggtattatcaaaattattttaaaaagtatttatttttatatgacatgtacacacacatgtgcattataaaaagccacacaatacttcaattatcttccactgatggatatattatctatagtgattgttacagaaaaataaatcttcaaaatgataaaacaagagtacagcctactcaagtcatagctatagaaatcaggtatatttacttaattttcagattctcagtttcaatcatccagtatatagcgataaaaccctggtttacagctttccagagttattgaaatcacatgagttggcagtaaattgcccctataagcgaacgcgtgggtcgtcccgggaattacggacg

SEQ ID NO: 154771 - DNA, 464 bp, Homo sapiens
  misc_feature (1)...(464): n = a,t,c or g
attgtacagttcagtcatacgtangnncnnnngggnnganccacgcgnnccgccacgcgtccggggggctcatgtatgcaggaggctttggcttttgtcctctgcttgagcactcagggggacggggaccccaaaacctggcccgggggatagggggtggggagcaaggtggctcctcccaaacagtagcttacaagccccaagactcatgacctgcagttacttgtaaaccacctccaggcccggcacaaacccctccccactcccactcccaccttataaagatccttctaatttgattttgagtctaagcctgttgggaggggcagggcccaacagaaaggctggggaggcaaacagagggatctggggaaagggcaccagactggggccagggatcccaagaccaagtcctggcaaaagagaggggcctgctatgagggtggtggagaccagatgccctt

SEQ ID NO: 154772 - DNA, 3438 bp, Homo sapiens
attttatatttggcttatgaaatgtattaatttgcttcttctggtcaaagataaagtggaaggatgatgagatttttaaaaaattaatgtatcccttgcttctaattctacctacaaagtggaatagtgtgctagttactatatagttcccagtgtatagcttttgactcttttgaagtggtaactagtagttttgttttagaattttgctttcagcttttatcctgagagtggggctcactgaacctctctcctttctaaaatctgtggaaattacttttggtaactaaggcactgcagtgatctcaggtaagagagtaaaaaatttgcctttatttgtttttaatgttttgggacgtttcaggttttggttgggtggaaacagagttggggcaaacaaaaagaggctggttaagagattcagaggcaaaggttggttggccatgctaaatttcaggtgcctgttgcacctccatgtaccaacagtaagtagacagatagcagattcttagggaagaagttaagctagagaagcagtgtggtgtggtgtaaagaattctgggcattcaattaagaggtgtgggctctgagaggctaacactactactaacttgctctgtgactttgaccaagtcatttgacctctctgggccccatctttattggaaaatgtcaagtagatggtctctaataaatttttgtccagttctaacattatgtgattctaaatgtatttatactgaccttcttaacttgaactctttgttttttcagcatttagtatgagaacctatgtttgccatatttgtagtattgcttttacatctttagatatgttccggtcccacatgcaaggaagtgaacatcaaattaaagaatccattgttatcaatctagtgaagaattcaaggaagacacaagactcttaccaaaatgagtgtgcagattacatcaatgtgcagaaagccagaggactagaggccaagacttgtttcagaaagatggaagagagttctttggaaacccgtagatacagagaagtggtcgattccagacccagacatagaatgtttgaacaaagactcccatttgagactttccggacatacgcagcaccatacaatatttcacaagcaatggaaaagcagttacctcattcaaagaagacatatgactctttccaagatgaacttgaagattacatcaaagtacagaaagccagaggactagatccaaagacttgtttcagaaagatgagagagaactctgtggatactcatgggtacagagaaatggttgattctggacccagatcaagaatgtgtgaggcaaggtttttcacatgaggcttcccagacctaccaacgaccataccatatttcaccagtggaaagccagttacctcagtggctaccaacccattcaaagaggacatatgattctttccaagatgaacttgaagattacataaaagtgcagaaagccagaggactagagccaaaaacttgtttcagaaagataggagatagctctgtagaaacacacaggaacagagaaatggttgatgtcagacccagacatagaatgttgggagcaaaagcttcccatgtgagactttccagacctatttcaggaccatatagtattttcacaagtagtgggaaaaccagttacctccattgctttaccagctcatggattagcaaacagagacttagattctattagctactgttcaactcaccagaggactgtttccccagaaaaaacccagtacccttggagcctttaatcagcaagaaaataactctgggctcatacagtgtagaatctgaagtttacaagcacctctcttcagaaaacaatactgctgaccattaagccaggtcataaccgggaaacatcagaagagaaaacgacacctagaagaaggcaaagaaaggccagagaaagagcagtccaagcataaaaggaaaaagagttatgaagatacagatttagacaaagacaagagcatcagacaaaggaaaagagaggaggatagagtcaaggtcagttcaggaaagcttaagcatcgaaaaaagaaaaaaagcccatgagtgtaccctccgagaaagaagaacgtaagcacaggaaagagaaaaagaaatctgttgaagaaaggacagaagaggaaatgctttgggatgagtctattcttgggattttaaatgtttagttttgtttacccaaggttgaattgaaaaaaaaaaaacagtcaatatggatttatggaaaaggaacacctgatgaagaaaaggagaggtagatacagtcagtgtcacttcaggacacttaggttttttttggataaaaatttaaattgaattaaaagaaggaaaaaaaaagcccagacttaacctctgagaaaagaacataagaactcaaggagaacataagagaaaaggaaacctgttacagaaaagacaagaatctgtgttttggaatgagtctattcttgggtattgaacttttagttttgtttgcccaaggattaattgagggaaatcagctaaggaaaatggactttagacaaaagcaagaggatccagatgaaggaaaggagaggtagatacagtcagtgtcacttcaggaaagctatttaaaaaaacttgaaatttaattgaaagaagaaacaacaacaaaaaagcctaaacctagcctctgaacaacactaacatgagaacacaagaacttaagagaaaaagaaacctactcaagaaaagacagaagagacagtgatttgggatgagtctactctaggattttcaactttttagttttgttccttcaaagttgaaggaaaaaaagtttggttttataaaattcatgttattgtaatttttctaggtggatggctattttaatctctaaaaaagccaagtgaagtaaaagtattcagtatgccttttcctcaagttactttccttcattttcttaaaaaagaaaaaaaattattaaatgtttctcacatatttcacatataaagtaatttccctaaatgaagttgtctctacttctgctcatcaaattgctgtgatagtgaattatttattcatgggagataatttattttaaaggacagaattaccaagcgttacaaaatcagttctttccttggttttgtgttagtgttggtggtattttattgttgtttttctggtgtttatggtgtctcagctttctccaaggaatatgtatgaaataacttaaactgattttttctttgttaaatctaatttgcagtgtatttttgcattttctagttctgaaagtggaaaatgaaacagtctataataaacttagatgatatatagttttaaaacggtctcaaaaagtactgatataaggtcagtctatattctggaaatgtttatattaaagtaatttaatttctaa

SEQ ID NO: 154773 - DNA, 430 bp, Homo sapiens
  misc_feature (1)...(430): n = a,t,c or g
accggaagcgctccgctgtacctggatcctgctcctctgggttgaaacccgggcgccgccaagatgccggcttaccactcttctctcatggatcctgataccaaactcatcggaaacatggcactgttgcctatcagaagtcaattcaaaggacctgcccccagagagaaatgaagctgataggaccttgatatatataactctctacatttctgaatgtctgaagaaactgcaaaagaagtgatgagagcctatttacaacagctaaggcaagagactggactgagactctgtgagaaagttttcgaccctcagaatgataaacccagcaagtggtggacttgctttgtgaagagacagttcatgaacaagagtctttcangacctggacagtgaagggagcccgggcagccaccgtctccagagccct

SEQ ID NO: 154774 - DNA, 549 bp, Homo sapiens
atgccggcttaccactcttctctcatggatcctgacaacaaactcattggaaacatggcattcttatctatcaaaagtcaattcaaaggacctgcccctagagagacaaaagatagagatattgtggatgaagccatttattacttcaaggccaatgtcttcttcaaaaactatgaaattaagaatgaagctgacaggaccttgatatatatacctctctacatttctgagtgtctgaagaaactccaaaagtgtaattccagaagccaaggcaccagtccagttgctggggtcatagtggactgtgaggttcatggcagttccagctcccatggaacttatgttctgatttctgacttacacaagagcctagaacagaaagaaagtaaaatccagcagctagcagaaactataaagaaacttgaaaaggagttcaagcagtttgcacagttgtttggcaaaaatggaagcttcctcccaaacatccagaataaactgctgcagtctctgtaccccagactgagttacagcatgtcctacaaggcatga

SEQ ID NO: 154775 - DNA, 592 bp, Homo sapiens
ggcacgagaaaaaagcagctgcacatctcagagtggggcttgtgccttaggacagggtgcagacggaaaaggagactgaggagactgtgcatttggagaatgggagttttgatgtgatagtggctgtcctaccactgcattcagcagataatcagaagacaaagatggaatgcatacattgcacatcattgttatgttttgataactgtttttaagtcttctttttctccctgtagaatgaagctgataggaccttgatatatataactctctacatttctgaatgtctgaagaaactgcaaaaggtaattaaacttggatgattgtatatcatgaaaacaaattgctgagaggcattgaccctcccagtcatctgggatttgttgagactttaaagacaagtagaaaatatttcctctgacttacagcatggacttaagagaaaaatttgaatttagttacctgaacttgtagtataattgactgacacaaagataaaagtagtggtgttttaaggctttgaatatattttctcaagacagaaatcttgacagaggaattccttttaagccctttgattcaaaggttcttg

SEQ ID NO: 154776 - DNA, 902 bp, Homo sapiens
gcgctacctcgcccaggcttccagaccggatgcgctccgctgtttctggatcctgcgtcctctgggttgaaacccgggcgccgccaagatgccggcttaccactctttctctcatggatcctgataccaaactcatcggaaacatggcactgttgcctatcagaagtcaattcaaaggacctgcccccagagagacaaaagatacagatattgtggatgaagccatctattactttaagggccaatgtcttccttccaaaactatgaaattaagaatgaaagctgataggaccttggatatatataactctctacatttctgaaatgtctgaaggaaactgcaaaaagtggcaattccaaaaagcccaaggtggaggaaaggaaatgttttacgctggggattcactaatttttcccatttcctgggagagcctgggtttttcccactttaacggcaattttttgccaaacctggcaaacaaacaggaagatgaagtgatgagagcctatttacaacagctaaggcaagagactggactgagactttgtgagaaagttttcgaccctcagaatgataaacccagcaagtggtggacttgctttgtgaagagacagttcatgaacaagagtctttcaggacctggacagtgaagggagcccgggcagccaccgtctccagagccctgggcagcattttccagcaagatgtacacaatcttttgcctttatttcgtaaagttttatacagaagagagaagagcatgtctttacttgaaaaactcttgatcaagaatttgggtgggagaaaagaaagtgggttatcaagggtgatttgaaattttctgcagcattaaacgtggcgcttaataagaataagtaataataaagaaatttctaacaaa

SEQ ID NO: 154777 - DNA, 872 bp, Homo sapiens
gcccaaacaccagtcctattacaggtttcgtttaccaatttcttagttcaaccaatattatttggagagccaaataaacttggcttgcacctccgtgcaattctttcaagatttcgttgtctatttttcactcaattgcaactcagtctctgaactcagggaccgatccagtttataatgttatcagtcacttactagcagtacagatctcaggatagctccttcaaatcccagcttctcaagaagagatagggctctagtctaaattagttatatttttcttatgcgtcatctttctgctggtggtgtcacacagaggcacttggcttactctggctttgttggtaaggttattgtgtctgcttggtgaaacagagggagctgacaggtccaatgggtcttttgttggcgctggcactcttgccgttgtaacacacggtacccaaagtcttaaggccttggcactttatagcaatgtagaggggtcagaaaaacctggcagagtcctcttgatcgtggatccaatgaagtctgtcttgggaggacattaatcaggacccaattgctgtgaagaagctgatgctcagttggctgaagagtctgggaatgcgtcacatacctcgtttactgtttgagtgaggcccaggcgtgcgtgtcacgcctgtaatcccagcactttgggaggctgaggtgggagaatcgcttgaagccaggagttcgagaccaacctgggcaatacagtgagaccctgtcgaaattctggcgaagttttaaatcgtaaaactgttagtatcaggagagcccttcgagtattctctccgctccacaccgctcggctgcacccagcggccgccgctcgtgccgctcgtgcc

SEQ ID NO: 154778 - DNA, 375 bp, Homo sapiens
ttacgaatgaggcaatttattaacccagcatggtttgttctaatgcttcttgttggcagctgccacctgtgggaaaagatggaagaataaaagttagtcaagggggtctctgctggggcactttgtaacagctacctaactacccaccacaggtgggcaccccgattttgtggtttcaaatgcatctatctcatctaattctcactggggggtattcccccatttcacagacgtggaaactgggtctcaagggagtggccaggcacagtggctcacacctttaatcccagcactctggaaggccgaggcaggtggatcacctgaggtcaagagttcgagaccagcctgaccaatatggtgaaaacctgtctatac

SEQ ID NO: 154779 - DNA, 800 bp, Homo sapiens
  misc_feature (1)...(800): n = a,t,c or g
cacccaaaggggccctgggtctcttccttcaaaccccaaatggaacctgtttgccttgggaaggcccgactggctgccgggtaaacagccacccaatcaccctgggccccctcacccaagggaagggaggaagcgcctcttcctcatgcccctgaagaacaatcaagagacccnnnnnnnnnnnnnnnnnnnnnnnnnnnnnnnnnnnnnnnnnnnnnnnnnnnnnnnnnnnnnnnnnnnnnnnnnnnnnnnnnnnnnnnnnnnnnnnnnnnnnnnnnnnnnnnnnnnnnnnnnnnnnnnnnnnnnnnnnnnnnnnnnnnnnnnnnnngagacccagaccaggattacgaatgaggcaatttattaacccagcatggtttgttctaatgcttcttgttggcagctgccacctgtccggcgattctgtccagatctctttgtccctgaggtgtcagtttgcggccgccatcttggtccttttccaccattttcagcccctccagggcttggaggacccggcgggccacactcttggagcctcggctgaagtggctgggcatgacgccgtttctctgacgtcccccatagatcttggtcatggagccaaccccagcgccaccccggaggtacaggtgccgcgctgtggaagcagctcgcgtgtagaaccagttctcatcgtagggagcaagctctttgtgcttggccagcttgacggtatccacccattcggggactttcagcttcccggactttttgaggaaggctgctcgtgccgaattcctgcagcgcgggtctagggc

SEQ ID NO: 154780 - DNA, 537 bp, Homo sapiens
atatgtgtatatatataaaggtattgaaagcagagtctccagagctatttgcacaccctccatggcagcactggtagacaaaaggtggaaaaaacccaaatgtccactgatgtatgaatggataaacaaaatgtgatatacacatacaatggaatactacacagaataaaaaagaaaatattgtagcacattgtcacatgctacaatatgagaaaatttgagggctttatgctaatgagataagccaatcacaagaggacaaatacggtatgattccacttacataaggcatctaagctagtcaaatacataggtatacaaagtacacagtggttagcaggggtgaagggagggggcaaaagggaattgttgtccaatgaatatagtttcatttctgcaagataaaaaagttctggacatctgtttcacagcaatgtgattatacttaacactactaaactgtacacttaaaaatggttgagatggtaaattttgcaacacatgtttttttaccacaataaaaagcaaaacaaaaac

SEQ ID NO: 154781 - DNA, 875 bp, Homo sapiens
cccaaaaaaaaaaaagggaaatatttacataatttccatggaatgaagccagcagtcgctcccatcccacccctcgcttggcgctgcacccagaaataaggccagacatttttttttttttttttttttttttttttgcggaggaaacgaggttgagggtgtgagtggctctggagatgcaccccagtctcaaaataaaattaaaaagaaaaatttctgttcaatctttgaaaaaaaaaaaaggaaaaggacctgtaatcccccgttcaataaatagaaaaaaagttcccaaatgatggggttttttgcccttaatatacaaaaagggaaaagatgggggggggacttgggggggggatgttctcccttctccctccctgggtcaaggtgggggaaagaaaggatggccaaagagagagggcggcagggacttaggtgcagagagaaaggcaggtaagtgccgggaaaaatggaaacagagtaagatgaaggggcgaagcagaaagacaggaggcgaaagggtgaaaaagccagaaaaacaccaagatacaggtctctttcctttccagatcgggggtgggggtctccggctctctcgcgtctgtgtcccccaaccccaggttggaaggggcagtgtgagcctcgctcagttcctgagttgtacgtccagtgactagcaggtgagaagagagggcagcgaggacttccccaaccctgagcccaccctgggaccctagtgcccaaggaaatgggggtcctggccggataggataagggggtgaggtatgaggctgaggcctgaggcctcttcaattccttcagtgggggtgagccaatggtcctggctgggcagccactttggaggtggcataatg

SEQ ID NO: 154782 - DNA, 1964 bp, Homo sapiens
ttttttttttttttttttttttttgcaactggacttttattgggcagttacaacaacaaatgttttcagaaaaatatttggaaaaaatataccacttcatagctaagtcttacagagaagaggatttgctaataaaacttaagttttgaaaattaagatgcaggtagtgcttcctgaactaatgccccacagctccaagggaagacatgtcctatttagttattcaaatacaagttgagggcattgtgattaagcaaacaatatatttgttaagaactttgtttttaaattactggtccttgacattacttataaagagtcccctaactttccgatttcctaaaactatgtaatacaaaagtatagtttccccatttgataaaaggccaatgatactgagtaggatatatgccgtatcatgctacttcattcagtgtgtctgtttttaatactaataaggcagtttgacagaaattatttctttgggactaaggtgattatcatttttttccccttcaaaattgtgctataagtgctgatagccacaggcagattgcaaagaactgataaggcaacaaaagtagagaattttaggatcaaaggcatgtaactgaaaggtaacaacagtacataagcgacaactggggaaggcagcagtgaaacatgtttgtggggttaagtgagtcattgtaaataaggaatttgcacatttattttctctgataacctgcttccatgttgccacctggaggctctttgttgtgctggtagaagcccatttgcccttactctggatgttccaaatgtttccctttccaggagctagtcagtctttcagtcatctgttttatatgtctcctgccttctcagacagtccttctactctcttttattgttcatgaaagaccttcaaattgaagtaaagcccatatttcaatataaagatatgaaagaaggctaatatcctatcagtgatattctcatccatcttgtcatgaaggccataccatgataactatcacatgtaatgtaaatttgtttattcatctctcttattcatttattcatcttttttcatttgtttattcatctttctcccatttgctcctgtcttgatttatccactagctcactgattatgcaagccttgtagttcatatatgtcatgggttaacatacaatacagcatatatttcagacataagtgtttcagaaatattgtacagaagatattgtactctattaaaatgtgattcagggacaagggagtggtgcttggtgataaaagtatactgccatagttgctgaggaagggcagcaacagaaatcagacttctagttgatatggatctggcaggcatctctgtcacacccctgggaaatagtggcccagggcacagaaggaacctgaaattaaaatatttagatacaaccaaaactcacttgtctgtccctatgtatactgaaaaatttagtggggcatgctgctttacctggctttgtgttttcaccattgtacttattttatatacctaattgtacattttaagcagcagatgaccttgcagcaaaaatgtcttggtgtgagatgcaaaatgaatgaaaaacaaccacacctaggcttttgtcactcaacctaaactactcttcatgacctggaaatgttttatacttatgggaaactttctgcccttaaccttataacttcagatccttgtatgaatgggtttggttgtttttctattatataaattgtagattgcaagtacaatgggacagtacaaatcccgggactcggtaaaattagagttgaatgatgaggtgtccaaaggcaacgaaaacatggcatatttcaaataatgttttccttgcttatgtaacttggagaattcactctatttgattgtgggtttcaaagtattagtgttaaaattagaggtagattttctgcctgcttacaagac

SEQ ID NO: 154783 - DNA, 561 bp, Homo sapiens
cacttccctctctcagcagttgatttcatctgatgctctgtccaaacagaatggtagaaaaaaaacatcagagaaatgcagtgggtatagaggcaaatccaaacaaagtgcaggtgatagtggtgacattccgccttctcttgatcagaaggtgtcagcagctggagcttatccccatatgaaccccagggtcaggtaaatggaagacttaagaacacgttacccaacttacctctgcccttctgggttcctcaaggagggggtctgctgtggttaagtaaaacgtctgcggagctagtttccttcatggcagagagatgcgcaagctagtctcacttcaccagcacctcttatttaccccaaagcaacaccttttaggaaacgtcctttcaggaggcagctttggaataaggggctaattcaaagtaagttaacacaaaggctgtacacagtggctcacacttgtaatcccagcactttgggaggctgaggcaggcagatgacttggggccagaagttcaagaccagcctggccaacatggtgaaaccccgtctctacta

SEQ ID NO: 154784 - DNA, 377 bp, Homo sapiens
  misc_feature (1)...(377): n = a,t,c or g
acaagttccatagtaatttatggatgcccaggttacatttaaactatacatatacataatatatacatacgtgtgtacttatatgtatatatacacgtatgtatagatgtgtgaatatttgtttatatacatatatgcacgtatctatatgtatatataaatgcattattacacatacatttctctcaccccttaatgcatttttctcaatgcagaatatttagatgctaatcaaaaaaatgatctcttacttgcacttgagactatggttgactaatgctctataaatccgaagagagttcggactataagtatttaggctatctattatgttgggcaaaaataagtaacccaatggtagataaatgaattcaacn

SEQ ID NO: 154785 - DNA, 566 bp, Homo sapiens
agaataaaatacctaggaatccaacctacaagggatgtgaaggacctcttcaaggagaactacaaaccactgctcaacgaagtaaaagaggacacaaacaaatggaagaaaattccatgctcatgggtaggaagaatgaagagcttgaaaatggccatactgcccaagaagaaaacgtaggcaataccattcaggacataggcatgggcaagggcttcatgaataaaacaccaaaagcaatggcaacaaaagccaaaactgacaaatgggatctaattaaactaaagagcttctgcacagcaaaagaaactaccatcagggtgaacaagcaatctacagaatgggagaaaatttttgcaatctacccatctgacaatgtgctaataaccagaatctccaaagaacttaaacgaatttacaagaaaatatcaaataaccccatcaaaaagtgggcaaaggatatgaacagacacttctcaaaagaagacatttatgcagccaaaagacacatgaaaaatgctcatcatcagtggtcatcagagaaatgcaaatcaaaaccacaatga

SEQ ID NO: 154786 - DNA, 600 bp, Homo sapiens
atgagtgaactcccattcacaattactacaaagagaataaaatacctgggaatacaacttacaagggatgtgaaggacctcttcaaggagaactacaaatcactgctcaatgaaataagaggacacaaacaaacggaagaacattccatgctcatggattggaagaatcaatatcatgaaaatggccatactgcccaagctatatgtagaaagctgaaactggatcccttcctcacaccttatacaaaaattaattcaagatggattaaagacttaaatgttagacctaaaaccataaaaaccctagaagaaaacctaggcagtaccattcaggacataggcatgggcaaagacttcatgactaaaacaccaaaagcaatggcaacaaaagccaaaattgacaaatgggatctaattaaactaaagagcttctgcacagcagaagaaactatcaccagagtgaacaggcaacctaaagaatgggagaaaatctttgcaatctacccatctgacaaagggctaatatccagcatctacaaagaacttaaacaaatttacaagaaaaagacaactccatcaaaaagtgggccaaggatatga

SEQ ID NO: 154787 - DNA, 570 bp, Homo sapiens
atgggcaaggacttcatgtctaaatcaccaaaagcaatggcaacaaaagccaaaattgagaaatgggatctaattaaactaaagagcttctgcacagcaaaagaaactaccatcagagtgaacaggcaacctatagaatgggagaaaatttttgcaatctactcatctgacaaagggctaatatccaaaatctacaatgaactcaaacaaatttacaagaaaaaaacgaacaaccccatcaaaaagtgggcgaaggatatgagcagacacttctcaaaagaagacacctatgcagccaaaaaacacatgaaaaaatgctcatcatcactggccatcagagaaatgcaaatcaaaaccacattgagataccatctcacaccagttagaatggcgatcattaaaaagtcaggaaacaatagaaacacaaccaccagagaatattatggacacttctatgcatatcaaccagaaaatctagaagaaattgataaattcctggacaaatacatcctcccaagacagacttcaggaagaattggaatccctgaacataccagtgatgagctctga

SEQ ID NO: 154788 - DNA, 31296 bp, Homo sapiens
atggaagagcagggccacagtgagatggaaataatcccatcagagtctcacccccacattcaattactgaaaagcaatcgggaacttctggtcactcacatccgcaatactcagtgtctggtggacaacttgctgaagaatgactacttctcggccgaagatgcggagattgtgtgtgcctgccccacccagcctgacaaggtgccccggggacagggacgggcatggcattgtgtggaccccgggagctagaagaggcctctccctgctgatctgagtgaagagcgtgggagtttagtccagcgggcagggctgcattttggggtactaatagcacacaaatgcctgggttagcaggttgcacagtcaggtattttacttctgtgtttgtgtctggagcaaaccctgacatctcagttctcattgctgtgtgtattggttcccagacacttcatttttagatcccctttaaattaggagggaaaaagaacataagcataagagcatccccagcagcgatgttcattcagtgcctctgaaggctggagggctgcttgttgctgggtgagactcggaggggaaccgactcagggtcaggaatgatgacatcccacggtgggtccacagtgaagaatcttccccgctccactgtgggacgccttaacagcccttacttccacttacgctttgcgttatctcctgaaaaataaaatggagaccacaaattccttcttggttagaggaatgacacaactcatttatgacatgaccccgctgggactcagaagagaccaggacggtttctgggggaagcagtagcacactcgtgtgctttgttctcttctcttgatttgttttcccacatttttaacaagaaaaaaagccgtttttaatatatggcctatcgccctcctactgtgtggcccaggtgcctacctcattatgcccaaggggtggttctcacctctccactctcattcctgcacagcagttgtgtcaggttaagagggacaaggagaaggctgggcaccgtggctcacgcctgtaatcccagcactttgggaggccgaggcaggcagatcacctaaggtcaggagtttgagaccagcctggccaacatggggaaaacccgtctctaataaaaacacaaaaattagtcgggcatggtggtgggtgcctgtaatcccagccacttgggaggctgaggaaagagaattccttgaacctgggaggtggaggttgcagtgagccaagattgtgccattgcactccagccctccagcctgggtgacagagcaagactctgtctcaaaaaagaaaaaaaaaaaaaagaggtagagaagtccatggctatttgtctgtcctttttatttttaggctcatggaagcctcctggtttcttagagctgagtggttttatttcttgctcaggaggtcatttcacagattttcgggctccaatatgttgactgtcacagcagctggggggatggcatagctaccggctgtactaagaactcagagccctgccctgagcctgcctgagggtccttatggtaggaggatgcccctcatgccagcccgtgccctcatgcttgtgtcacctccaggtccgcaaaattctggacctggtacagagcaagggcgaggaggtgtccgagttcttcctctacttgctccagcaactcgcagatgcctacgtggacctcaggccttggctgctggagatcggcttctccccttccctgctcactcagagcaaagtcgtggtcaacactgacccaggtaggagtcagccccagcaagaccgcaggcaccagtgcaagcagggccctggggggtttggtaatggctgggccagccctgagtgccacctcaggaagcaggcccaggtgctattttgattttagaaaggaacagctgaatcctgtctcccaagtgcagcccaggtggctgcgattgaactgcccacacctcgatggtctggtttatagaggggcctttggaagtatgggaatggcctgtgttctgaccccttgctttcttcctattctgacatatgtagacattttaatggttgcacaaattcaaggttgtatttttttttcttttaaaaaaatctttagctggacatggtagcacacacctgtagttccagctactcaggaggctgaggcaagaggactgcttgagccccagagtctaaggctgcagcgagctatgattgtgcccctacactccagcctgggtgacagagtgagaccctgtctctaaaaaaggaaagaaaaaaattaaaaagccttgccaggtttgattctaggcaaagtattctgtcaccgttgagtgccagtccttatttccaaactaatggaagaccccatcagttaactgattagttcaataagtattttttgctgtatccaccacatgccaagaccctacactgtgctggatgtcagggagacagtggtgagcagacacagacagggttcctgccctcagggagcttcaagtcagctggaagagaccaccagtcagcaatctcaaaaatgtgtcaggacagcggcagtccaaggcatgtgagaacatatcattagggccaggatctgctctggggcaggagtcttctttccctgcttttgaactctccactttgagacagctgttggtaacataccagcaccaaggacctaagtcctgccttttaaagaatccaatatgttgttggaaacagaagcacaagacaggtgtgtgcttaggggaaacaaggccagccggcagagtgtcagtgctaggctccagcttccacagcccctgcaggtgcctgccagccactgctagcttctgactctgtctgctccttcctgtctccccttgtttccttcccccatgaaaaaaaaagaaagtattcccatgaggaatcattctttcgaaagacttctctgttggttccgttagccagctactttactagcttttacagtgtaattcactctacaagcagtctcacacaaaagactacatattgtatgattctgtttatatgaaatgtccagaaaaggtaaatctatagacaaagcaaatcagtagttgcctacggcccagggattggctacaaataggctccagaaaactctgggaagatggtagagatgttctagacctggactgtggtgaggtttgcacaactttgtaaacttactaaaaattactgacaaatatataacactccctaacactttgggaggccgaggtgggcagatcgcttgaacccaggaatttgagaccagcctgggcaacatggcgagaccccgtctctacaaaaaaacacaaaaattagttgggcttggtggcatatgcctgtgtcccagctacttgggaggctgaggtgggaggattgcttgagcctgggagtttgagactgcatgattgggtcactgcaccctagcctgagtgacagagcaggaccctatctctaacaacaaaaaagcagtgttggtggaggagggccagcgtggccatctggcctggccctcgagtgcgaggggcttcagtgtttagctgcagttcagtgatgacactgtgcggaggaataagggtggcctgtctcagacactgatcccagctgaagtttgtcaccttctttctggcaaatctgaggtcaagcagagagatcaaagcctggggccctcagggtcaggaatgctggctctgtgacgctccccaggtcctgcatctgaggagtggctgcgctggcctcagggcccaggttgtgaattttgtttatgcactcgcctctcctctttgagacctccctgtttgatgctgtttctgcctctctcctcaccctgctgctgtgccctgccaccccctccctccagtgagcaggtatacccagcagctgcgacaccatctgggccgtgactccaagttcgtgctgtgctatgcccagaaggaggagctgctgctggaggagatctacatggacaccatcatggagctggttggcttcagcaatgagagcctgggcagcctgaacagcctggcctgcctcctggaccacaccaccggcatcctcaatgagcagggtgagaccatcttcatcctgggtgatgctggggtgggcaagtccatgctgctacagcggctgcagagcctctgggccacgggccggctagacgcaggggtcaaattcttcttccactttcgctgccgcatgttcagctgcttcaaggaaagtgacaggctgtgtctgcaggacctgctcttcaagcactactgctacccagagcgggaccccgaggaggtgtttgccttcctgctgcgcttcccccacgtggccctcttcaccttcgatggcctggacgagctgcactcggacttggacctgagccgcgtgcctgacagctcctgcccctgggagcctgcccaccccctggtcttgctggccaacctgctcagtgggaagctgctcaagggggctagcaagctgctcacagcccgcacaggcatcgaggtcccgcgccagttcctgcggaagaaggtgcttctccggggcttctcccccagccacctgcgcgcctatgccaggaggatgttccccgagcgggccctgcaggaccgcctgctgagccagctggaggccaaccccaacctctgcagcctgtgctctgtgcccctcttctgctggatcatcttccggtgcttccagcacttccgtgctgcctttgaaggctcaccacagctgcccgactgcacgatgaccctgacagatgtcttcctcctggtcactgaggtccatctgaacaggatgcagcccagcagcctggtgcagcggaacacacgcagcccagtggagaccctccacgccggccgggacactctgtgctcgctggggcaggtggcccaccggggcatggagaagagcctctttgtcttcacccaggaggaggtgcaggcctccgggctgcaggagagagacatgcagctgggcttcctgcgggctttgccggagctgggccccgggggtgaccagcagtcctatgagtttttccacctcaccctccaggccttctttacagccttcttcctcgtgctggacgacagggtgggcactcaggagctgctcaggttcttccaggagtggatgccccctgcgggggcagcgaccacgtcctgctatcctcccttcctcccgttccagtgcctgcagggcagtggtccggcgcgggaagacctcttcaagaacaaggatcacttccagttcaccaacctcttcctgtgcgggctgttgtccaaagccaaacagaaactccttcggcatctggtgcccgcggcagccctgaggagaaagcgcaaggccctgtgggcacacctgttttccagcctgcggggctacctgaagagcctgccccgcgttcaggtcgaaagcttcaaccaggtgcaggccatgcccacgttcatctggatgctgcgctgcatctacgagacacagagccagaaggtggggcagctggcggccaggggcatctgcgccaactacctcaagctgacctactgcaacgcctgctcggccgactgcagcgccctctccttcgtcctgcatcacttccccaagcggctggccctagacctagacaacaacaatctcaacgactacggcgtgcgggagctgcagccctgcttcagccgcctcactgttctcaggtgaggctgccaggcaaggggagcaacaggtgggccgggcgggccaggctcggagggcatcgggaatggcatcatggaccaggatcccccaggactcatgaccatggcccttggaatgtccagaccttttctttcttagcagggcagaggtcaaggtgcaaagcttcgaggcaggtggacctggatcagccacagctgggtgcccttgaacaaagtgcttaactctcagagcctccacgccctcatctggaaaaagaagatgctcataatcctatcaattatggccacagggaccaatgttagttgagaatgggtgaagtgcattacaaatattacctaatggaatgctctttacaaccctgtaacttaggtactgttattgtctctattttggcagataaggaagtagaggcacagagaagttaatagcttgctttaggtcacacagctcagacatagcagtgccagaatgcataaagaaccttccttttaagattaatgtaaggctccgagatagccctcaaaaagtttctggaatatgggagcttttattactgcagagaaagcagaccttgtgccagttggcactggtgactttctgtgatcaacgctagcagcccttcacactgctagagacctcagttaaaatgctgactcgtggttgttttcctgttccatagtttacgggaaacagagcccagtctgttttcttctattagcatttcctatgtaaaataaaccttgtaaatctctacagggggttaaatttgccattacttgactcatgcatttctaaaaagcagtagggatttggaactgactcccagtgcctgtcacaccagtgtcagagtgtaaataattgcatggggacatggggtgcagggggtcgaaggctgccctagcctgggaattggaaaacctggagtctgttctctgtactctcagccagtgactctccctctgtagccccaggcagtctcacactcagtgccaccctctgtccatcttttttttttctcccccaaatggagtcccgctctgttgcccaggctggagtgcagtggcgtgatctcagctcactgcaacctccgcctcctgggttcaagcgattctcttgccccagcctcctgagtagctgggattacaggcacacgccaccatgtccggctaagttttttgtatttttagtaggacggggtttccccatgttggccaggctggtcttgaaatcctgacctcaggtgatccgcccgcctcggccttccaaaatgttggggttacaggcatgagccgccgcacccgacccctctgtccatcttttcaatgggaaactccacaccagtgtggtggccctgcccttcctgctgtccccaggtgaagctttccttcacaccagtgcaagaaaaaacagcttgtaggaaagcagaggatatgggtaaccacgggaagcacactcagttctctggctgcatcagttaggattagttttagctgagagcgaaaaccccaaatgttggtgagttacaagcttatttctctcatgtaaaagtctagaggtaggtagttcaggactggtatggagtctccatgaccctccggagcccaggctctcttctgccttcctgttctgccatcctcactacccggctttcccatcttggcccaagagggctgctcaaactccagccatctagtcgacactctagctatcagtaagaaggaagggcaaagattgagagcatgcctcaatcttttaagaacacttcttggctattactaattatattgctgcttagatttcagaacttaatggtatgggcagaatttaatgagatgggcccagctaaaagatgggggaatctattgctaagaaagtatagatattgggaatgtctagcagcctgtgctgtcttgggctggccatgccatgtacatacacactatttcccagcaccaagctggggactctgagggaaagggtccagagtgtctgacttgatcattttgatgtggcctaaaaatcaagcttttaattgttcagccttttacttgttatcaaggtcagcttgtgggtctaattgggcccaaggcttgtgtttctaagtaaagttttattggaacgcagccatacccatttatttacttactggctgcttcacactacacagttgagtagctgtgacagagaccacatggcccacagagcctaaaatatttgctgtctgacactttacagaatgacatgagcagtctcctttgacagtgggactcacagccttttccagtgacaaatcagggttagcccatgtgtttctggatggggggaagctgttggcattttgggtataacagttcttgtgagacctgtccagcattttgcaggacacctaacatcattggccctgcctgcaagatgacagggcactccctcctccagtcacaaccactaaaagcagcccctgacatttccaaacccatgccctccaccatacgagaaccaggtacagggtctggctgacacataggtcacacgcaaagggtggatgtcagaggtggctggcctcacacgtcctccctgtgtccttcacggtcgtgtgaggagccaggggctgtgctgcagcctcgctcatgggctggtgcaggatgggtctggcggccccacgttggccaggctttgtaaggggctatttggctgattgctgtggccattctccaggggcgtctatacctgagaaaactccagggcctgaaggcttctggatctttgtaagattaatggtccttcataatgagtgcctgccctgactcgtaatttttttgctgttttatttcagactcagcgtaaaccagatcactgacggtggggtaaaggtgctaagcgaagagctgaccaaatacaaaattgtgacctatttggggtatgtctttctccagaacactgggccaactacctagtaataatacagagctgcagggaattcacattcccataggtccctggatgatcggcacggatggcccagggctgggaagagcgctggcccaggagttgagagtcctgggttctctttgtggctcggccagtcatgaagtcttgctgagcctcagcctcctcacctgtaaaactgggatcccagtataggcaagtaggcttacaactggttattgggggatgcaacgagaatataaggggatatatttaataaatgctagaatcctgtttacatattagtctggactattttgggtccataatccctcatccagagcctttggggcaagacccgaatggggattctgagtgcatgctatggcatgacgtggccgcaggggtctaaggcagtgccccattttcaaacactttcatatttctcccgcagaatgtatgaaacagtcaaaccaagtgtggtaagaaagactataagtagctccacatcagttgccaaaagaattgtgagaaactttgggcattcagagcctttgaggttttggagtctgagagaagggattgcgggccagccccacacaactggtggctctgcaagctggagcagttgttcagtttcttggggcctcagtggccttcgatgttaatgaggacatggacgcaaacgaccccgggccacactcggctccagggctctgtgtggctgtggaaccctggaagcctgagcttagctgcctttcaacttccatctgctgtactattgaattggcattgagcggtgagatggctgaaaggtagacatcgagaagttttaatattcagaatcttttcttctcaagacgctgaatgtaatcttagttgtaaatacccatcacctgccagtcaccgagcactcatgcaccagggctttgcgttatgtcctaagatcctcataaccaccctgcaaggggactatcatcattacctctgtattacagatggagaaactgaggcacagagaggtaacgtgacttgtctcaggccataaagctggggaaagtagtggagctggttttgaacctgagctgtgagacctcagagccctaaactctggtgcctgtgtgttcccctttcaacccagactttggaaatcagtagacaccatatgcttcaaaaaacaggggctattaaaatgacatcaggagccagaaagtctcatggctgtgctttctcttgaagtttatacaacaaccagatcaccgatgtcggagccaggtacgtcaccaaaatcctggatgaatgcaaaggcctcacgcatcttaagtaagtggggtaggcaccaggttccttagtatattctcttgatcacccccttctgttgttcaaagattaaatgtcacagtaaagagctttcatcctaaagccttccacttgtcccagggccatgttggtcaagtaaagatacctctgtgtgatctgtgaggcttggattctggaagggcctcccgttattggtagggggaaaggttggcattttgatttcattaactactaggccgaagaaaggactaactctcaccctttctggtggtctttttgccccaagggagtttcctgtcgggttgcaaggaagagcttgggcccttgccctgctgtaggtgtgccctgcgcagggggtgacagtgcgccaggcttggagcctctggtcctgccctgacagtggccacataccttgacccttggcagtcaaagtgggacctcccaggtctcccgagggaagtcagtgatgctgctgaggtcaattagaggaccccagggagggctcaggtccctgagcttctgcagagactgtggaccatctcctggagaggaaccctgactgactgtcctcagggcttcagttccctccctgacaggaggcccaggccatggctcttgtggatcccagaagaaagtgtacggttcccaagatggggctggaaggggctctgtgctggggaggagggtgacccacattggagcccctgcatagctggaggctgactgtgtgtgactctctctgcagactgggaaaaaacaaaataacaagtgaaggagggaagtatctcgccctggctgtgaagaacagcaaatcaatctctgaggttgggtgagtagaaggggatggatgtatgtggtacaacctgctgtgtgtgtggggggcgggccttgctgttcttttcatacatcagtacaccagaaggaccactggggctcgctgtcggggagagatagtggagagctttcaccatgctgcgaaactgaaaccgtgcccattaagcaataactccccggtccccctcccccctgcctcttgcagccaccctgctacttactctctctatggttttgactactctacctcatgtaagtggaatcatacagtatttgccttttggggatggctgatttcactagcatcatgtcctcaagattcgtccacatggaagcatgggacaggatttcctttttttttttttttttttttttttttgacagagtctcgctctgttgcccaggctggagtgcagtggcatgatctcggctcactgcaacctctgccttctgggttcaagcgattctctcgcctcagccacacgagtagctgggattataggcacccgccaccaatcccagctaatttttgtatttttagtagaggcggggtttcaccatgttggccaggctggtctcaaactcctgacctcaaatgatccacccacctcggtctcccaaagtgtcaggattataggcgtgagccaccgtgccccgccaggatttccttcttttttaaggctgagtaatactccattgcatggctatgccacattttgtttactcattcatccaagaacagacactggcttgcttctatgctttggctgttgtgaataatgctgctgtgcacatgggcatacaaatgtctcttcaaggactgccttcaattcttttttttttttttttttttttttagattctttttttttttattatactctaagttttagggtacatgtgcacattgtgcaggttagttacatatgtatacatgtgccatgctggtgcgctgcacccactaatgtgtcatctagcattaggtatatctcccaatgctatccctcccccctcccccctccccaccatagtccccagagtgtgatattccccttcctgtgtccatgtgatctcattgttcaattcccacctatgagtgagaatatgcggtgtttggttttttgttcttgcgatagtttactgagaatgatggtttccaatttcatccatgtccctacaaaggacatgaactcatcattttttatggctgcatagtattccatggtgtatatgtgccacattttcttaatccagtctatcattgttggacatttgggttggttccaagtctttgctattgtgaataatgccgcaataaacatacgtgtgcatgtgtctttatagcagcatgatttatagtcatttgggtatatacccagtaatgggatggctgggtcaaatggtatttctagttctagatccctaaggaatcgccacactgacttccacaatggttgaactagtttacagtcccaccaacagtgtaaaagtgttcctatttctccacatcctctccagcacctgttgtttcctgaactttttaatgatcgccattctaaaactggtgtgagatggtatctcactgtggttttgatttgcatttctctgatggccagtgatgatgatgcatttttttcatatgtttgttggccacataaatgtcttcttttgagaagtgtctgttcatatccttcgcccactttttgatgggggtttttgggtttttttttttgtacatttgtttaagttccttgtagattctggatattagccctttgtcagatggatagattgcaaaaattttctcccactctgtaggatgcctgttcactctgatggtagtttcttttcctgtgcagaagctctttagtttaattagatcccatttgtcaattttggcttttgttgccattgcttttggtgttttattcatgaagtttttgctaatgcctatgtcctgaatggtattgcctaggttttcttctagggtttttatggttttaggtctaacgtttaagtctttaatccatcttgaattaatttttgtataaggtgtaaggaagggatcaagtttcagctttgtacatatggctagccagttttctcagcaccatttattaaatagggaatcttttccccattgcttgtttttctcaggtttgtcaaagatcagatagttgtagatatgtggcattatttctgagggccctgttctgttccattgatctatatctctgttttggtaccagtaccatgctgttttggttactgtagcccttgtagtatagtttgaagtcaggtagtgtgatgcctccagctttgttcttttggcttaggattgacttggcgatgcgggctcttttttggttccatatgaactttaaagtagttttttccaattctgtgaagaaagtcattggtagcttgatggggatggcattgaatctgtaaattaccttgggcagtatggccattttcacgatattgattcttcctacccatgagcatggaatgttcttccatttgtttgtgtcctcttttatttccttgagcagtggtttgtagttctccttgaagaggtccttcacatcccttgtaagttggattcctaggtattttattctctttgaagcaattgtgaatgggagttcactcatgatttggctctctgtttgtctgttgttggtgtataagaatgcttgtgatttttgtacattgattttgtatcctgagactttgctgaagttgcttatcagcttaaggagattttgggctgagacgatggggttttctagatcaacaatcatgtcatctgcaaacagggacaatttgacttcctcttttcctaattgaataccctttatttccttctcctgcctgattgccctggccagaaattccaacactatgttgaataggagcggtgagagagggcatccctgtcttgtgccggttttcaaagggaatgcttccagtttttgcccattcagtatgatattggctgtggttttgtcatagatagctcttattattttgaaatacatcccatcaatacctattttattgatagtttttagcatgaagggttgttgaattttgtcaaaggctttttctgcatctattgagacaatcatgtggtttttgtctttggctctgtttatatgctggattacatttattgatttgcgtatattgaaccagccttgcatcccagggatgaagcccacttgatcatggtggataagctttttgatgtgctgctggatttggtttgccagtattttattgaggatttttgcatcaatgttcatcaaggatattggtctaaaattctcttttttggttgtgtctctgcccggctttggtatcagaatgatgctggcctcataaaatgagttagggaggattccctctttttctattgattggaatagtttcagaaagaatggtaccagttcctccttgtacctctggtagaattcggctgtgaatccatctggtcctggactctttttggttgataaactattgattattgccacaatttcagctcctgttattggtctattcagagattcaacttcttcctggtttagtcttgggagagtgtatgtgtcaaggaatgtatccatttcttctagattttctagtttatttgcgtagaggtgtttgtagtattctctgatggtagtttgtatttctgtgggatcggtggtgatatcccctttatcattttttattgtgtctatttgattcttctctctttttttctttattagtcttgctagcggtctatcaattttgttgatcctttcaaaaaaccagctcctggattcattgattttttgaagggttttttgtgtctctatttccttcagttctgctctgattttagttatttcttgccttctgctagcttttgaatgtgtttgctcttgcttttctagttcttttaattgtgatgttagggtgtcaattttggatctttcctgctttctcttgtgggcatttagtgctataaatttccctctacacactgctttgaatgcgtcctagagattctggtatgttgtgtctttgttctcgttggtttcaaagaacatctttatttctgccttcatttcgttatgtacccagtagtcattcaggagcaggttgttcagtttccatgtagttgagcggctttgagtgagattcttaatcctgagttctagtttgattgcactgtggtctgagagatagtttgttataatttctgttcttttacatttgctgaggagagcttcacttccaagtatgtggtcaattttggaatagctgtggtgtggtgctgaaaaaaatgtatattctgttgatttggggtggagagttctgtagatgtctattaggtctgcttggtgcagagctgagttcaattcctgggtatccttgttgactttctgtctcgttgatctgtctaatgttgacagtggggtgttaaagtctcccattattaatgtgtgggagtctaagtctctttgtaggtcactcaggacttgctttatgaatctgggtgctcctgtattgggtgcatacatatttaggatagttagctcctcttgttgaattgatccctttaccatcatgtaatggccttctttgtctcttttgatctttgttggtttaaagtctgttttatcagagactaggattgcaacccctgcctttttttgttttccatttgcttggtagatcttcctccatccttttattttgagcctatgtgtgtctctgcacatgagatgggtttcctgaatacagcacactgatgggtcttgactctttatccaacttgccagtctgtgtcttttaattggagaatttagtccatttacatttaaagttaatattgttatgtgtgaatttgatcctgtcattatgatgttagctggtgattttgctcgttagttgatgcagtttcttcctagtctcgatggtctttacattttggcatgattttgcagtggctggtaccggttgttcctttccatgtttagcgcttccttcaggagctcttttagggcaggcctgctggtgacaaaatcggtcagcatttgcttgtctgtaaagtattttatttctccttcacttatgaagcttagtttggctggatatgaaattctgggttgaaaattcttttctttaagaatgttcaatattggcccccactctcttctggcttgtagggtttctgccgagagatccgctgttagtctgatgggcttccctttgagggtaactcgacctttctctctggctgcccttaacattttttccttcatttcaactttggtgaatctgacaattatgtgtcttggagttgctcttctcgaggagtatctttgtggcgttctctgtatttcctgaatctgaacgttggcctgccttgctagattggggaaagtctcctggataatatcctgcagagtgttttccaacttggttccattctccgcatcactttcaggtacaccaatcagacgtagatttggtcttttcacatagtcccatatttcttggaggctttgctcgtttctttttattcttttttctctaaacttcccttcttgcttcatttcattcatttcatcttccattgctgataccctttcttccagttgatcgcattggctcctgaggcttctgcattcttcacgtagttctcgagccttggttttcagctccatcagctcctttaagcacttctctgtattggttattctagttatacattcttctaaatttttttcaaagttttcaacttctttgcctttggtttgaatgtcctcccgtagctcagagtaatttgagcgtctgaagccttcttctctcagctcgtcaaaatcattctccatccagctttggtccgttgctggtgaggaactgcgttcctttggaggaggagaggtgctctgcgttttagagtttccagtttttctgttctgttttttccccatctttgtggttttatctacttttggtctttgatgatggtgatgtacagatgcgttttcggtgtggatgtcctttctgtttgttagttttccttctaacagacaggaccctcagctgcaggtctgttggaataccctgccgtgtgaggtgtcagtgtgcccctgctggggggtgcctcccagttaggctgctcgggggtcaggggtcagggacccacttgaggaggcagtctgcccgttctcagatctccagctgcgtgctgggagaaccactgctctcttcaaagctgtcagacagggacatttaagtctgcagaggttactgctgtctttttgtttgtctgtgccctgcccccagaggtggagcctacagaggcaggcaggcctccttgagctgtggtgggctgcacccagttcgagcttccccggctgctttgtttacctaagcaagcctgggcaatggcgggcgcccctcccccagccttgctgcggccttgcagtttgatctcagaccgctgtgctagcaatcagcgagattccgtgggcgtaggaccctccgaaggccaggtgtgggatatagtctcgtggtgcgccgtttcttaagccggtctgaaaagcgcaatattcgggtgggagtgacccgattttccaggtgcgtccgtcacccctttctttgactcggaaagggaactccctgatcccttgcgcttcccaggtgaggcaatgcctcgccctgcttcggctcgcgcacggtgcgcgcacacactggcctgcgcccactgtctggcgctccctagtgagatgaacccggtacctcagatggaaatgcagaaatcacccgtcttctgcgtcgctcacgctgggagctgtagaccggagctgttcctattcggccatcttggctcctccctccaattcttttgggtatatatccagcagtgggattgctggatcacatggtaatttttaattttttgaagaatcatcatactgttttccacggcagcagcaccattttatgttcccaccaacagttcattctagtttctccacatccttgccaacacttgctattttctctttttgacagtacccatcctaatgagtgtgaggtcctgtctcattgtggttttgattcttgaggctttttaaagctttttgtttcattataatttttattggattacaaaaggaacacaggtaattttatttggaaactatgaaaaataataaaaattatcttctcagaaaatgattcttgttaacatttaagctcagttaagctctctcactttctctcccttctctctctttgtacaacttttaaaaaatatagtaggggtgagactatatgtatctatactatagtaggggtgagactatatgtatccttcctttttcacttaatctcatgccttgagtagctttccactttattaaaaatgtgatgccattcaattgtatagtaaatacatatatgtaagcaaaacactgaaaactcttattctgggttccagcaagccatacctggaatggtgtaagcaggtagtttgcttggtgtgaacgtgttgttgaggcagctgccattgtgttgtgagtgggccacacgaacttgttctgttgtgtgtagacagtgtgtgctgatcctattaggaacagccaacgctttgtgtgagccacacacggttctaagtgctttgcttctgttaactcagtgaatcctcacaactccatgacggaatgctctaattatccccattttatagatggggcaactgaggtccaagagactacataatttcccgaagttcacacaggtagcagatggcagagccgggtcaggagtccaccatcttaccacgcagactgttttagccagagactctccggatctgctgtaggggacagaatacagctttatcgccgcacctgtccaccaagatggccgtagccacagagcttggttgggtaacgtcctctttatgtgacaggaacgttgctgatggggtttctgaaggtacttcctgctctttgtctcctggaagactgtgtcttcaggaatgtctctgaccctgcccagagttgaacggatgctgggaacccagcacctgcacacggccttccctccaggactctgcgcacctctgtgctccacaggagacatgcaggtgctttctctcatgagctcaggctcctgggctgacagctctccgaagctcgtggtgaggctcggtctctaactgtgccacttgccgatggcctctgttcacaaggcttcccctgctcttcgatcttgcatcaccccttgaatttgaaatccagagcagcccactcagagaccagtgtgaggaattagtgtccaggccacagatccagggactgggcacaaacatctgcctgttgagtaggaactgagctgtggccattggcaaaaaaggaggggtgagcatggctgtttcttggggagctaacattcactatcttgtctcctccctcaggatgtggggcaatcaagttggggatgaaggagcaaaagccttcgcagaggctctgcggaaccaccccagcttgaccaccctgaggtaactgtggccctgctgtctccaggggccaacctggtccctcccagctgctctaggtttgctggggaagggtgattcgtgctcctaatagaagaggaatttgcatgtgtgattttccttactcttgtcaaacctttctttgatgcataagaggccatctagtaaagcacattcttctctttttttaactttaagttctgggatacatgtagaagatgtgcaggtttgttacataggcaaatgcatgccatggtgatttgctgcacctatcaacctgtcatctaggttttaagccctgcatgcattaggtatttgtcctaatgcttgccctccccttgccccccacccccaacaggccctggtgtgtgttgttcccctccatgtgtccatgtgttctcattgttcaactcccacttacgagtgagaacatgcagtgtttggttttttgttcctgtgttagtttgctgagaatgatggtttccagcttcatccatgtgccagcaaaggacatgatctcatttttttttatggttgcatagtattccatagtgtgtatgtgccacattttctttatccagtctatcactgatgggcatttgggttggttccaagtctttgctattgtaaatagtgctacaataaacatacatgtgcttgtgtctttatagcagaatgatttataatcctttgggtaaatacccagtaatgggattgctgggtcaaatggtatttctggttctagatccctgaggaatcaccttaagtgtttattcagctcagtgaattctgcatgtgtcccacaccagccaaccaccacccccatcaagacagaggacatttccagcccctcagccatccctgcatgtcccttgctggtagagggagggtttcctaagtgcagatgaaacttaataagatgctggccagcagattcctgccccttccttgtcctcaggatgatgctggaaaagagggactcttcctctctataaatggggatgcacctacccagcccccgcttaggctgctggccaaatcttgggaccttggtatgtccacggctctgctgctgttcttcctaccactgaaaaagagtccaagaaggtggggacagtagcagaagagactttgccaggtcttgcagatggggtaccttgatggggccagcctttagaaggacagcttgccaggcctcgccagcctcctgcccatgtgcagaaacctgaggtgccgaccccagcccactgttgtgtgagcaggctgtgctgatgacccatttcccgtccagcctgcccttgtgctctgtgtgtgggctctggggcagcagcgcctgggcactactgctgcagctgaacacttctgcatcctgccccgagtgagcctgggctggggccacagccaggcagaggcttcccagctgttctgatgttgaagctaagattgaatgtagatgtgtctttaataattcaccccaagtgtgttccttcctagtcttgcgtccaacggcatctccacagaaggaggaaagagccttgcgagggccctgcagcagaacacgtctctagaaatactgtggtaatagctcgagtcatttcatttgtttgtttgtttttctgtgatagggtcttgctttgtcgtccaggcttgagtgcattggtgtgatctcagctcactgcagcctccacctcccaggctcattcgaacctcccgccttggccttccgagtcctgagactataggcatgcaccaccacacccagttaattttaaaattttttgtagagatggggttttgctatgttacccaggctggtcttgaactcctgggctcaagcagttctcctgccctggcttctcaaagccctgggattgcaggtgtgagccactgcacctggcacagagtcattttggagggtttaggtcccaggaattatcccaggggctgcacatggcctggaatcttaacagaaaaggtgtctcccaattggaaaggctctaggcctttcagttaagttgataatttcctcctagagaagagaatagccacttctacaagcataaacaggtacaggaggaggaagtgggctccgggagcctggatctgaggccttggccttctaggccccaggagaactagaacgctggccatgcaagctatccaggtatccttggataccttcagatgtgcttagcagaggccaacttccacacacttggctcaaaattttctcccttcctcctcttcatctgccttcccccaggcagcctcctccttccccaggtcttcacatcagggtttggcctttatgctccatccagctcatctgtcacttgtcacctgaagcccacagtcctcgctccctctctgcactctagggcacttactaagtggatgtggcctcctgagagtgttttttgttggtgttcccttttttatggccacttaatgttttattttgctttatttgtatttacatctctgtatcataaattccatacaggtggctgggagcagtgactcacatctgtaatcccagtactttggaaggctgaggtgggaggatcgcttgaggccaagagttcgagactagcctgggcaatatagcgagaccctctatctacaaaaaaaaaaaacattccttacaggttaagtgagggagttgtattacaaccctccctatcatctactcagagcccagtgctcatttgatcttgctaaattagttactgagaataatgacaatatcctcttcatgagagagttttgacattaggcctgctgtccagtaagtgcattttaaattctttcccctcaacaaatcatttaacattttgaaaagtagtttatgttttttggaaaaaatgtaagacactaaaggaggacatgaaagtacctcctaaagttcctgctaaaaggaggaagtgaaagtacctccctttgtgttttccaaaataacctttcctttctagccttttgttctatgtatgttcaaagatatgcaaaacagaatagcattcaagcagtggctctaaaaatattgtaatcacatactttacatgtctcctttagggtttctccatcttgatgctgttgacattttggtccaagtgattctttattatggtagggctgtcctgtgcatcatagacggtttagccgcatctctgccctgtacctcccagtggtgaggatcaaaaatgcctccggacatggccaggtgccccatggagagtgaaatcacatggatagtagtaatgtcaacacctagaagccctcaagtgctgactgcatgccatgtgttattctacactttttccctgtgttaactcactcagcctcacaaccactctatacgatctctactgttaacgttcaccagtgagaaaactcagacccaaagaacttaagcctgttgcccgaggtcaccctgctggtgggtgatacaaacctgcccaggctgagtccggagtagatgtcaatgctgtgttcttctccctcctcattctacctcattctccctacaagctgcacaacatctcgaatagatatcacaatatatttcatcagttgtttctgatctaaatttgttcagattttacattaggataataccacaatgcatgctgcaatgtataaagctttgtgtgtatatccttgcacactgtagggtaaatttctagaagtctgattgtcttaaaatgaagcacattaaaaatttgggcaggcacatccaaactgcccttcaaggaatttttttttttaaatgttctttctgttctattcttcttcctaatgattctttcgtccactggcacaagtgggtcctaccctgtttacaccaaggagctttggtgctttatccagaccacttctggttctaaggaccattgagagacttcctgaactttcagtcacttaacttgggtccctcacaagttaactgagagcaaagtactgaacacattttaatgtgcagtcagtgactgtttcaggtcttcaaactaacttggataacacactgtcagtggtgttcaagggaccctgggactagaggagaactgagaagcaggcattggccctttgttttccgtgggcccccatcttccatgaaatctgagggctcagcaaaggtggggagggagggtgggctcctctacaggtagctgggctaagaaataggagcccaggtacaggatttgcattaaaaatgagtcccattgaccttctgtggggctgacaggctgggcttggagcctggctgttttctgggttctcagcaagtgatcatctgcatagctggagagccttgggctgagctcccgctcctgtgaactctaaaacaatgtctgccaagtaggctctcttgagtaaatacttccttttttttccttaggctgacccaaaatgaactcaacgatgaagtggcagagagtttggcagaaatgttgaaagtcaaccagacgttaaagcatttatggtaactcagagagccttacaatttcagactgtgctacttttcaaaagtattttttgagataaaatttacatactgtaaaattcactctcttaaagtatacaattcagaggtttttagtgcaaccatcaccacctaattctagaacattttcactcctcctccccactccaaaaagccctggtatccattaagcagtcactccctgtcctcctccccagaccctggcaaccactaatccgctttctgtctctatggatttgcctactctgggcatttcatataaatggaatcaagcaatatgtgaccttttgtctctgtgttctagcatgtttcattcctttttatggctaaatgataattcactctaaggaaattttgcagtttattaatcagttgatgggacatttgggttgtttctactttttgactattatgcgtaatgctactgtgaacactcctgttcatgcttttgggtgaacatatgttttcatctcttttgggaatatacctgggaatagaatttctgggtcatatggcaattctgtaactttttgaggagccaccaaactgttttctaaagtggatgtactattttacattctcgccagcaatgtatgtggattccaatttctccacatcctcaccaacacttattattgtccatcttttaaaatctagttatactagtggatgtgaagtaatattgtggttttgatttgcatttccctgatgacaacaatgttgaatgtctttttatgtgcctactgggagtctgtatagcttctttggagaaatgtctccatatcctttgcccattttaaaattgggtttgtcttctaatgctgagttataggggttctctatatattctgggtgctagacctttactagatacaggttttgcaagtattttctttctttctgtggagtttttcctctttcttgatagtgacctttaaaggacaacagtttttaatttttgttttttttgagatggagtcttgctcttgtcacccagacaggagtgcagtggcatgatctcagctctctgcaacctccacctcctgggttcaagcgattcttctgcctcagcctcctgagtagttgggattacaggcatcagccaccatgcctgtctcattttgtatttttaatagagatggggtttcaccatttaggcccaggctggtcttgaactcctgacctcaggtgatccacctgcctcagcctcccaaagtgctgggattacaggcgaaaagccactgcacctggccaatagtttttaattttgatgaagtccaatttatctatttttttctttggttgcttgtgctttcagtgtcttatctaagaaatgattgcctaatccaagatcacaaagaactccacctaagttttctgttaagcgttatagttgtttcccctcacatataggtctgcaatccattttgagttaatttttgtatagtgtaaagtgagggttaacctcattctcttgcacgtggatatccagctgtcccggcagcaccacgtgttgaacagattatcttttcctattgaatggccttgacacccttgtcaaaaatcaattgaccataaatgtatgggtttatttctgaattctctgttctggtccattgatttatatgtctctcctatgccaggaccattgctgtagctttgtgtagtacattttgaaatcaggaggtgtgagttctactttgttcttctttctcaagattgtttagaccattctgggttctttgcatttcttatgaattcagactcaccttgtcaatttctgcaaaaagactagactctgctacatattgttttttctttcctttttagcctgcagaattatttgatcccattccctaagtgcaggccagcctctccagggagagcagagctaggacagggtcagaaagagagtcttggctgctttgtgcattcccaacctgcactggccctagtgaaggcagcccgagtgggtggatgtgcctggacactgcaggctttttaggggcattaggtgctctccttcctggcctcctgccacatcttggttggaggctgccttccctgccttcaaaaaagcctaagtggtgactagaaaacagcagagtgtaactgaatacagaacttggtgcccacttcctggttctatttttgtcccttttgaaagggaaggtcattacctctgccattgaacccaggggccctagcccttgtggggtatggctgggagcaccagatcctggctgcagcccagccaccagtggtcctgtgtgcttgggcagtaacagtgacaagagctcccttccccctggacactgtgcctaataccctcctcttgaaatctcacacacccagtggatggggggcactcttatagttattctcagtttacagatgacacaactgaggcacagacagatgcgtttatttcttcaaggttctgtagctgaacagtggggagggagggtttaagaggagctgcacccgctctgcaatactgcctctcacgagggagtcctcttcattcatgacagcatagggccctcgtcttcctggtaagggcttccttcttgggtcagtgccaggatttctaagggtcatgtttagcaggagcctattctacaaacagccaggagcagggaatgactctgtgatgaagcggagacactacagcctcttgatgcatttatttcctggttgggttagaagcgtagctgcccaagggagcatttcaggagaggcctggcttcctagcgatagctgaaaactttgtttcatttgaatcactgctacccagaacaatggggtgcattctcagagtccccattattaaagcttttccactgagccccatgagaactattcatgagaactatttcatggcagcataactgtttctcctccctccctcttgcatgttggtagcctcttaactttaaaacctgccttgcctttccctagctacctggaaggagacgtcagacttcctgtcccatggtgtgtttcttacaatttgttgttcagattggtggtctcccaaatatatataaaaatataaatggagtctcactctgtcacccaggctggagtgcagtggcacgatcttggctcactgcaacctccacctcccagttcaagcaattctcctacctcagtctcccgagtagctgggagtacaggtgcacaccaccatgcccagctaatttttttgtatttttaatagagacaggttggccaggatggtatcgatctcctgagctcgtgatccacccacctcggcctcccaaagtgctgggattacaggtgtgagccactgcacccggccccaaatattttgattatgcacctctgcagtgaaaaatgcaaacacacacatcagttcatgtattacattatgttcactataaaaacaaacagaaaatttaaaaaatatcaagctatcctttactctagtggatcttacctggacacttttagccagatacaaagtcacatggactcagttcttcccctgaccaacttgtctcttatcccaaaacacccttgcaactcccttacgaaggggtcaaatttgatccagtattatggattttatacaagttatgttcttctttcaggcttatccagaatcagatcacagctaaggggactgcccagctggcagatgcgttacagagcaacactggcataacagagatttggtaagatcccagcgtttgtcacagtaataacaccagtgactgtttactcaccaccactgactgtgcaaggcacaacgcagggtggtttctgtttattcctccagcaaccctgcacagtaatggtattacctctgttttacagaggtagacagaggcccagaccagtgaaataaggttgcccaaggtcactacgagagaagctagaattcagcccagaatgcctgattccatattctgtgctctcctgccctgggcccccgccctcatctaccttcattgggtgggatgggggaagtggccagtgaaatgatttcctagtggaagtaaatccccctgggactcagcaattgagagatgactgtgttggccaggagtttggagctcattcttccccttttctgggttccgtaagacatttccaggctgacttgaactgacctgtgctctttgtctacttcttttttctgctttgagaacttccttatgctaatagaagaaaaaaagtttgctttactgtgacattgagcgccatgccacttctttcttgcctcccataaggcacagacactccccactcagcagctcccttaacaacttaattgcctgggtgacgtgggactgggtggatgctgggagaggggccttattaactatgtcctcctttcatgactggggagaatttcatagccaattaaaaaaaaacaaaaaacagctccttggccaacacaggctcctcatacagtgttttttaaactttgctttagaacttgtttggaacttgtcataaaatcgatcagtttggtgaattgcaaccaacaatatttaaaaagaaaacagaacagaacaaaatatcaggatgcaatgtgcatggtatgaaagtatcatttcattcatcttagttcatgcttgcatgtgagtgggtgtgtgtttgcataagtgttggttcacaacataaaatgtaattcttatttagggttgtagacaaaaggtttttttttaaaaaaaacactgttggctaggcatggtggctcatgcctgtaataccagcactttgggaggccaagatgggcagatctcttgagcacaggagtttgagaccagcctgggcaacatgcgaaaccccgtcactacaaaaattagcccgacatggtgctatgtgcctgtagtcccagctactcaggaagctgatgtgggaggatggatgcatgggagatcaaggctgcagtgagccaggatcatgccactgcaatccagcctgggtgccagagaccctgtctcaaaaaacaaaaaagaaaaaaagaaaaacaccatcatagagaatagagcccagatctaaacagacacctgtggcctgtgtgcctgcgaagcccagcctgcccagcagcctgggaagcactggagggcactggaactgtttgcatgggtgtttgccctcaggccactccgtttctgctgattcttaagttttgaggacagcaggcagagggggagaggaaggagactgccagactacagaacagtttgcagagcacagttggcttccacttttctctgtagctggtcaggcgggtagtaaagacctacagttgctttaattctgtcaagtttcaaaatctgcattgcttccctcttgagggtcaccattcctacacaaggaaccattttagtagggccaggagacttcagcttcaaggcctgcacttgtgtcagggtggagaggggaactggccaccaattcagagagggcaggacaggcggcatgggtgctggtcttgggagtgtcttcacttaggtccctggcttgttctgggagcctccagagcatgctcctctgtgtgtgacttcatgggactgggctctgagaaggctgtggctttgttggccctgccagggactgccacaccaggccacagggttgtggttgagctggccggggagccacgttcagggagcagctctgcttggagccaacacttacagagtaagccttctccttggacttgttaactgtactgacacttatttctacctcattcctttctgaaaataacttggaagtctgaagtcccttgatgagttctgtctttaagaacagaaattagaggtgaacaatgaacactgtaaattacagaaatgtatcccactccagtataacagctttctgtgaggctatctcctccagactgtggctctgggagggtggggcctgagtcaaggtcctagggactagtgctgtgtcttcatttattccttgaataacgaaacgcttgagcatcagggactgtgctagcaccaaaaatccagtggtgaacaacatggcttcatgggttcactgtctagaaagggagaagcacattaaagaaaaaatcatttgcgtaattatttaattacaactgtgatgggtactatcacaaaggggaaggccaagagggaacctgatttagatgaggttgcagggaaggcctctctgaggaagcagcacttacactaagccatgaaggatgaataggagctagtcagctgaggtgagtattctgcgtagggaacagcatgtgcaaagggtctggggcaggagggagtgtggtgtcctggaagaactgccagaagctgctgtgccccagggttcagacagtgtggaagaggggactacaggaggctgaggagataggcagggactggaccataaaagatctgtgggtcatgatgtgcattttggtctttatcctaaaagtgatggaaagtcagtgaacagtttgaagcaggagaggcatgtgatcagatctgcaatgcaaaaagaccaattcttggctcttctaggaaactgaattggagaaggccagagtacgtggaaatgacctgtcagtaggacattgtactgatgcagggaagagatgatgggtgctcagaccaagatggccggccaaagacatagaggttccagggaggcattctagattcttaggaattaggggagaactttgtgatacaaggaacatggggatgagaaggaaggtgtccaggttgacccccaggttactaacctgctcagcaggatgagagtggtccattcactaagccaggggaccctaggaggtgtggctactttgaggtgtgggggagaggtccaagtgaggatgccaagcaggtaactgcctccacggacatacaaacaaggccgtggcattgatgagatcgggtggggaaaagggcttagccccaaacctggaggaaatctcagatgtagaggtcacatggaggagaatataggaaaggaaattgaagtagagtgctcagatgcaggagaaaaatcagcgcatataaccaagccaaggggagggagtgcctcaagaaggagggagaggagaggtcaggacagccaaaatcctgagggccaagaaagacaagacctggaaaatgtcattaaattcaggcttatggaggctacaggtgaccttagtgagacccagtgaacagagggatggcagctggagaggatccatgctaatatgaaggaactatctgcaaagggtatgttccttaatttcagggatacatgtgtattgtgtgatacacgagtgtgtgctatgaacacaccttgggaaggagtgtgcgaggatccttaacattttacctgtgtacttttgtcttcctccttttcaacagcctaaatggaaacctgataaaaccagaggaggccaaagtctatgaagatgagaagcggattatctgtttctga

SEQ ID NO: 154789 - DNA, 1865 bp, Homo sapiens
gtgcacttcccgaattgacccatgcgtccggcagtcggaatctatgaaggacagggagcagctctggtctgtcaatctcagccacctgtttgatatcacagagaagatactcggaggattgttggaatgtatatagtttagtaagaagtgggtaagaaagagggtcttaattactgagcacttattatgtattaggttctttgccagatgtttttacatatataaactcatttcagaaaacttatttaaagtaaatggggccgggtatggtggttcatgcctggaatcctagcactttgggaggctgaggtaggaggactgcttgaggccgggagttggagaccagcctgagcaacatagtgagaccctgtctcaataataataataataataataatagtaataatgaagtaaatgggataaggaaagaaggataattatctttaaaggttgattcccaccctccctccccagttacttaaggaactaagtgagtacatctccagttgcccatgaaagcataagtttgttttcctcagctgaggcaagtggtagagtatacaggataaccgaagtaacatgtaaaaggcaggaccgcacataaaggtgtacatggctattgtttcacctggagaaaccacatgattgggacctgaaggtttactgactgactacaggggctgattgtgaagcacgaggaaccccatgtgtgtggagactgtagggtgagagcacacaattattagcatcatttctgagtgatctcacagattttttttcttgtgtttgttttgctttttgacaactgcttctcccacgttccttgcaattctattctctcaccttcactttactatttgtattcgatggaccaggataattcaggcaaggttaccttgtaaacttgaattggccacacaccatgttgtcacccagctggctatgaagtgaataatggtactgaaagttatacctgaagacctttctcagatctattttaagtcttaagtctgaccaaccatggaaaatattcgacatgaattaatgtagagaactataaagcatttatgacagctcccaagaaaaatcatctactctatgcaggagatatgtttagagacctctcagaaaaacttgcctgggtttgagggtacacagtaccattttaatcttctgaaaatatctgtattcctgctctttttctgctgtcactgtcaatcctggctatattttttcactatcctattaaaatattactgtctcctttatctgttcaatgtccatattttaaaaaaatcttccttgtatgagctattctgatccaaataatttctctgatatttctctatatggctcccacaacaatttcattgttgttagcatatctatttctccatacattgtaaaactgtaatccttatggtatttctaaaacataaagaggagaattaagtcagctgcagaacaatggggctgattcttctgctttttctctggaaaatctttcattgcttttggtggaaatttacctagaggttacaaccacaggatgtagcttggtctcttatttgcctttttgggaaaccaattaagattaatacaggataaaggaaaaaagcaatctattcattatataacacagttgtttgtattacttgttccctgcaaaggcaaatctgttgaatgcttgcattttggaattcttttctaataggaacaaccaaaaaagggcttcttatggtgcagcaggaaaaaagatcatttttatagctttgcattcttaacatagcatttaaagagcggcatgaattagaggaaagacatggaacacacaggtagtcggtttgagatcatcggcttaaaag

SEQ ID NO: 154790 - DNA, 2551 bp, Homo sapiens
ggggcaaagggatgtgcttacaaccaagcgggatgatcaagcccacaagcccaatggcttaggggatgccagagaaacaagatggaaggatcccagatccctgaatgaccttgtggagccgaacagcctacgttgctccatggctgtaagacctgcccaaagcccacacaagaggccaggaaaaacgagcatcttcaaaaatcaataccatccagatctcagaagttctaaggccacaggaaaggaaaacttcaaagacaagaaaaacaagtacctggatccctgtacatttgaagaagaacggctcctctattgccgcttcctggacaacaagctattgttatcccgtggcaaaacctacatgtgtaaggagccaggctggttccgcctcatctttgcagatgagctcccccggctaaaattgggatccccattccaggtcacctcatacaacctagagaccaggccagacctaaaggaattgttagggtcctgtcactgtggcccaggaatctgtgaagagaatactctgggcctggattcagacagggagtcccctgcccccgacatcgagcgcgcacccacactctggaccaacccagcatggcctcccagcccactctcgggttccaacgcccaaacatctcgcatggctggctccgacatctcccaacccgccgccaggaatcagcgcagagggagatgcgtcttctgtgacgggtgtggggcgaggaccctgaccccagctctgggaagtgaactgtacggagaagagagctctcaatcgtcagctctgcctccgcccctcatgcggcttcacttcagtccggatgccggcgatgggagcctcacagacatagcaggcgtccagcaggacggcggcgaatccacagccagatacccgcactcgatgaggccttggaatcccgcaagtggggcggctaccgcgcacgaagaaccgaaacggccttctacagggcggaggacgtctcgcgagagacggctccaggtttccaggcagaggaagtgtgatcggcgccaagggattcgagatggaagggcagaggcttttgcaaagtgcacagagggaggcctgaacggcttcctcctctgcaaagtagtggatcccacctacttggcggagctggaggaggcggtgctggcactcggtgggcgcccatcacgtgtaggtttttctccgcccggaaacgccctgcggcgacttacgcgtggtcctcataccaccctcggggaggtaggtttcattactgccatctttaacaaggagaaactgaaaaccagaaaggctagggattttgccgatttcggaaccaccatcaaacaggattttcgcctgctggggcaaaccagcgtggaccgcttgctgcaactctctcagggccaggcggtgaagggcaatcagctgttgcccgtctcactggtgaaaagaaaaaccaccctggcgcccaatacgcaaaccgcctctccccgcgcgttggccgattcattaatgcagctggcacgacaggtttcccgactggaaagcgggcatgaatgtgaaagctgcctttgtccaaccggcgacctacccatccgtgggagtgacatctctgtcttttatcagtcgagcttccaggactacaatgcctaccaaaaagataaatatcataaggccaagaacaccttggggaaaaaggtccgaggccttgtgctaatcaaccctcagaatcctctgggtgacatctactccccagactcactgatgaaatacctggaatttgccaagaggtatgagttctaccccttgagactagagcaatgttcaaagaaagctcatgaccaatttctagccgaccttgcgagcattctaccgagtaacaccacaccgctcattgtcagtgatgctggctttaaagtgccatggtataaatccgttgagaagctgggttggtactggttaagtcgagtaagaggaaaagtacaatatgcagacctaggagcggaaaactggaaacctatcagcaacttacatgatatgtcatctagtcactcaaagactttaggctataagaggctgactaaaagcaatccaatctcatgccaaattctattgtataaatctcgctctaaaggccgaaaaaatcagcgctcgacacggactcattgtcaccacccgtcacctaaaatctactcagcgtcggcaaaggagccatgggttctagcaactaacttacctgttgaaattcgaacacccaaacaacttgttaatatctattcgaagcgaatgcagattgaagaaaccttccgagacttgaaaagtcctgcctacggactaggcctacgccatagccgaacgagcagctcagagcgttttgatatcatgctgctaatcgccctgatgcttcaactaacatgtggcttgcgggggggatcctctagagtcaactggcgggaagagaatggagactacacatatgtggaaagagtgaagatacccttggatcatgggaccttgttaatcatggaaggagcgacacaagctgactggcag

SEQ ID NO: 154791 - DNA, 1564 bp, Homo sapiens
tttcgtcacagactgcggagtgggtcaagggctgggaaggcctgccccaagtcctaccgggtttgcacggccgcgcccggttccgcccgcaagtgcgccttcctgacttactgctgggtgcgcggggctgggggtgcgagtaccacccctgaagtctcttcctgagcgacctccggggcctcattctaggcctccttaaagagaaggatctaaattaggaaaaggaagtgccccttatccacgaccaagctcttccacctgcggagctcgcttaagtctgcacctcaaccgttcggaaaagtgactgcccttgtttactgaaggaaaaactgggggctcagaaagataccatggagtagtttgaaacaggaacaaaatcttcctgaaagcttcggaagcaagaaagccttttttgggtcaacatggaggaaaaaagacggcgagcccgagtttcaggggagcctgggctgccccctgttaaaagccaggccattgctcagccagctaccactgctaagagccatctccaccagaaagcctggccagacctggaagaacaaagagcatcatctctctgacagagagtttgtgttcaaagaacctcagcaggtagtacgtagagctcctgagccacgagtgattgacagagagggtgtgtatgaaatcagcctgtcacccacaggtgtatctagggtctgtttgtatcctggctttgttgacgtgaaagaagctgactggatattggaacagctttgtcaagatgttccctggaaacagaggaccggcatcagagaggatataacttatcaccaaccaagacttacagcatggtatggagaacttccttacacttattcaagaatcactatggaaccaaatcctcactggcaccctgtgctgggcacactatagaaccgcattgaagagaacactggccacaccttcaactccttactctgcaatctttatcgcaatgagaaggacagcgtggactggcacagtgatgatgaaccctcactagggaggtgccccattattgcttcactaagttttggtgccacacgcacatttgagatgagaaagaagccaccaccagaagagaatggagactacacatatgtggaaagagtgaagatacccttggatcatggtaccttgttaatcatggaaggagcgacacaagctgactggcagcatcggagtgcccaaaagaataccactcttagagaaccgagagtgaacctgacctttcggacagtctatccagaccctcgaggggcaccctggtgacgtcagagctttgagagagaagcttcactgaaacggagcaaaccttccactgagaagccacttcaagaggctggtgctgctagatctcatgatgtggctgttgggaagatggtggggtttgtttgccagcttggagtcctattaaatgaaagccagcaactcatgttggtaataggtctactgtgggaacagttatccctaaccacagctcaaaatcgctatcatctttaggcaaattaaaatctatgtggcagtgcaaaaaaaaaaaaaaaaa

SEQ ID NO: 154792 - DNA, 906 bp, Homo sapiens; identical to SEQ ID NO: 122328

SEQ ID NO: 154793 - DNA, 2297 bp, Homo sapiens
tttttttttttttttttagtattaaatgtatatttttaataaagcccaatagtgagttttacttataggagctttaaaagatacaaaatgtagagttcccagtttggaagcattgtaacttatacacacaatgtccctgctgaatgcccctagcaaggcaccccacgccccaaccatgcaaaggacacacacgttcacacatgcacacacatgcgctttggcgacgacccctctgccaagcgcagcaccctcggaattaccaagtgttcagagcaaggcggtgcccggggaacacagcacctacatgggagaccccacacaaacggcttcaacacagtcttcacagccccatgggaggatgcaatttaggaaaatgtctttcctttaattaggaggaaaaacaaactgggaaagtggacaattaagtgaccgtcaccctgtgcctggagccatccaaggattgaccctctgtccccaaggtgaggccctttgggagaggcacctattaaaacatggggtacttccagtataaatggaaactccggaatacagggtactgtggacacattactgaaaggaaatagaaaactatcttaacaagtagaacagcccatagacaactttaacagagattgagtgtgcacaccgtgacagctaacacagacaagagccacgcagggtatgtgcaaagcacgtgcctgaaaatggtctatatacaaaacagttctttgtaaacatggtgaggtgaatgctcagaaccacggcaaaagatcataaattcaggcagcaatgcatccccacacagcacaaaagacaacacctgaggcctgggaagagcctgacaacacagtactaaaaactcaggtggctgggctcagacaccctacgggtcctctcaaattagtgtgtgtgtttacatacatacatacatacatatatatatattcttttttttttttcttgttgagacggaatctcactctgtcacccaggctggagtgcagtggcacaatctcagctcactgtaacctccgcctcccgggttcaagcgattcttctgcttcagcctcccgagtagctgggactacaggcgcacgccaccacacccggctaatttttgtatttttagtagagatggggtttcaccatattggccaggctggtctcgaactcctgaccttaggtgatccacctgcctcggcctcccaaagtgctgggattacaggcgtgagccaccacgcccagcctctttttggtatttttatatataaatttacttatatctgtagaaaaacgagaacataaatgtgttattacaatctttgctggaaaagcttatatggagttagaaagaataaaccatttattagtagttaacatatattaaaatggtttaatgatttaagaaaatataaaaaaaatattaatactgtcaaactttcataccagaaaatattatggatttttctcagactttttcaaagatgaaatatgaaaaatttaaataagttttatataaagaactttctgtaacctcaattaatatacagtgggatatgtctattctatatagatatatttattattatttctcaatttaagcaccattcaattcttctggatccattctgggctgggaaaatatccctaaatccacagggatgttatctatttaatgggcacatgttaactggaaaatgagggtgggattttttttttaaggaaaaggacccttaaattaatttctatcctacatcttaattggtttgtcttctgagccagctcacaatgtcaatgcaatttctagtgcaggtgtctctgagtgccccttgaccaaaacccccaaggattgtggcagtgtccctggcccatgtgtcggaaggatcgaagggcagcaggtgcagccttgctctgcacatgggacagcagctgggctggtccaccgccacgcaccttcagcagtgtacctccggcacaagttccaccattctgcttcaataaagctgggaaaggccgcagtcccagggtgctgctgggtggcgaggaactgtccacccccagaaaccccaggtgactgcttccaatcacaaatattcaatattttgcccattttgtataagcttaaatatagatagtgttaaacaaacctccagccagtatatctgttatcttaaaatattcaatgcattttaggcaggagatgttttaactaaaaacctacatgaaaaaaaaagctataaaatacagtgattggtgtggtcatcactcaaggtgtggaggagggaggagagggtttc

SEQ ID NO: 154794 - DNA, 718 bp, Homo sapiens
aacacaagccaccccagttctcccttctgacaacaggcaagtggaccctagtagaccttccagaaaagccttagagagcacccccaaatgctcacatttgtcagctgtaattccaccctcagttaaaacctgattctcaatgtgacttggccaacgcagcttgcaaagcaagaacgtcttcatctaaggttgaaaacatcagttgtttgggttgtgagaaaagaaaagcccacaaggtttccgaggcttggtgctgtttctcactgtcctcagctcctgattctgcagctggttctctctccaagcactagcaaaaccctgccctaggagcccccagactctgagagcccatgaccaaaaagaaaaggaaagccaagttggggaagaacaggggcccccaatctccacagccctccactctcgccagagggcccaccctgggctgcctggaaccccctaaagttgccacccccgcaacacagtagtggggcagttcctagcagcgcctgcagcccatgggctggctctgtacccgcagcaccgccaagcgtctgttatcttatttactggaatctgcacagccaggctctagctcaccggtgactaaggagctgcagccattattaccaggcagatggcagactccctaaaagcagacattaaacaataaaatgccaccacataccttgcccacaaaataaaatcaaaacaaacacct

SEQ ID NO: 154795 - DNA, 609 bp, Homo sapiens
atggccaaggtgaaagaggaggtgactagagaagaaggtgtggagggtgcttcccagctctacctggctctccccacaaacctcatgagcagcttcctcccttgtgcccacgtgtaccagtggcttagccctcttccagtgcagaacacccagaccccagagcagggaaaggaggaggcagaggcctctgagcaggcagcagcccaggagtctgtgccccaccctcccagtatccctggaaggaagaaccggatgggatctctggagggggaggagccccagccccgcgacgaggaggaagcggagctggagctgctgaggcagtttgacctggcctggcagtacgggccctgcaccgggatcacacggctgcagcgctggtgtcgggccaagcagatgggcttggagcctcccccagaggtgtggcaggtgctgaagacccaccccggagacccccgcttccagtgcaggctcccagagtccccggaagagcctgcgcagctgaagcagagtgcttctagatggagagtggtcactggggaaaaggacctggccatcaccttccaatacctgctgcctgtctccctgacccatgatctggcaagttag

SEQ ID NO: 154796 - DNA, 983 bp, Homo sapiens
tttttttttttttttttccaggctcaatattctttattgataagcattagtgaaccccttgccctgggagctcagccagtcctgctctcagattcctggccttaggtgggagagcatcttttcctcatggatcaactgtccatgtctgactgtgcctaacttgccagatcatgggtcagggagacaggcagcaggtattggaaggtgatggccaggtccttttccccagtgaccactctccatctagaagcactatgcttcagctgcgcaggctcttccggggactctgggagcctgctggttagatggaggagttgagcctctgacacaaccaggttaaacctgccaagggttcctccacagccgggctgagctgagcaggagcaatgggctctcgcttctgtcctgaggttcttgggtggtgagcaagagagctaagggcaggaggtcttacgtggtgcctcataggggatagagatcccagagcctgcactgaaagcgggggtctcgggggtggttcttcagcaccttccaccacctctgggggaggctccaagcccatctgcttggcccgacaccagcgctgcagccgtgtgatcccggtgcaggtgcccgtactgccaggccaggtcaaactgcctcagcagctccagctccgcttcctcctcgtcgcggggctggggctcctcccctcagagacctagctcgggtgccagctcccccttgctgtgcccagcgggcccctccctcctcttcacaaccgggtaggaatcagtgatgagccgcttccggcccatggcggccacccaggcaggcagagaaggaggcatctgcggggaagaggagagaccggccagtgggcgcgagaaagacagctgctgagagagacagacggggccaggccagcggcgggcagacaagatgacccagacaaaccgagagaggaagtcgccggggtccagggagggacgcctcccacgaaa

SEQ ID NO: 154797 - DNA, 1432 bp, Homo sapiens
tgtggtggaattcgtcaggtctgcaggggtgagaacctgatccgacagtgggacagcaggaggccatggggggatctgaggcagggaaggtgctcacgagaggacctgagaaggaagagatggctgtggtcctggaggctcagggatcaggcctagggcctgtgttccttcggcctcagcatacctctgaagcggtatgcccagcttctctgggcaggccctacaatgtgtgagaaacagcctcagaacaccacctcttttcagggtagttacccaaaatacacacgtgggagtttgccagagttgaggcagcttttaaaggtggagcttttcaaaaagggaaactgggagcacttacagcccaggtctatgttactggtaagaagtggtttgtctcaggaataatgtaccctgtggagagtactttgtgtcagcctcactgagaacaaaaaaagcactcctttccccatgattaacactcatgtgtcaggaaagtacagtcaatgtatgctaaaaatccacttgaacaattagctcgcttttttccctcatttgctttcagagtaaatgtgctttcagagtattaggtcggcctaatatatgatacattttaagaaggggaggaaagcgcattgtataccctgatgctgggacccaatagaagacaggccccctggctggcctttggttctccctggagctgacaaagggaaggggcttggaaagcagccactgtccccgcctagtttgggcctttacagacacacctttccttttggcagctgctatggcacggattctctatgccagcacgaagctggaaaacctgcctacctggctggtgaaatgagggtggcagctggaggaaacaggcatcttaggagactagaaatgtccttcaaagggacttcagtgagtgctcaggggaccaggggtgactgtgttaagaagggttagaggttgagagggagccatgagcttggggtcatcaccccagtgagaccatccaggcacacagctcccaggcttgggaggccgcctccagtccaccaggaccctcagggagctgtgacttcattgaagctgggtctaaaggcttccttcaaggctcagcaaactgggttttcaaagatttttgatccctgaagctaatttacacgttatgtggggccatggcaaagacttggccctgaagtggacagaaagaggctgtgctgagtgatgaatgagactaaacagtgttctcatgcttggtgattttgatgagaacatactacataagagttaagagcattataattccctttatcaccatataaacatgtcacttatccggaaagcatacaatttatttgtacatgagaatgtaaatttaaaaattttctgaaaactagattaaatcttgagaagcaattttcaagtaaaaaaaaaa

SEQ ID NO: 154798 - DNA, 336 bp, Homo sapiens
cgacctcgatgtatgtcgggcctgtcgcaaaggatctccttcatccctctgcagaagaggagaacaggaaacacacgatgaagcgcctggcgcagagccccaattcctacttcatggaggcgaaaagcccatgatgctataaaatcaccacggcctttacccatgcacaaacggtgggttggtgggttggctgctccactgtcctctgccagcctacaggaggagaagccaggctgacagaacgatgtgccttcacgaggaatcagcgcttctagcactctgagtcaggatgagcgggaaaccatctccataaacgcatttttggataaaaaaaaa

SEQ ID NO: 154799 - DNA, 526 bp, Homo sapiens
ggaatcctaaagtgttttgcccaattgtacatctggaaggagaaacaaggtgcaattagcccacttcctccccactcctgtttgggaccagcccatctgaagagacattcattctgttctgcttctatgggatcaggctctgcctctgcaggatgaggcctggcccagtagagcaatgcttgagacagggtaaatctgtccagttctagagttcagtgataagaagcttactggccttaagatgaaacccatattctcttgctgagcacagtggcacacatctatagtcctagctgcttgggaggctgcggcagcaggattgcttgagccaaggagttaatcaaggctaaagtgtaccatgatcatacctataaatagtcactgcactccagcctggcaacacatgagaccctgtctcctaaaaaaaaacttctccaatagttttatcagcaaataaaggtgttttttaggcctctatattagtttattcattcttcatcttagttatattcacaacccacaatgg

SEQ ID NO: 154800 - DNA, 612 bp, Homo sapiens
aagtccttgggaagtcaagcatgagcatcacaatagtttggaaagctaatctgcaccccagcaaagtgaagtttcccaagttaagcctcaccgcatggcaaataggtgcttaggatgcaggatgcaggttcgtggccccggccctgtctggctcccctgaaatcacaccacagaggcagctgcctttcgtaaacacaaggcaggcagtgttagctggtccaactagacctcattctttctttcacctggggcctgtgcacggaggctgctgacatgagtggactcccacgtgtgtggtgaacgagaagttcaaagtgacactttgcattcttcccttcttctccactctcctcttcccgctccaggaaaaataaaggaagatgattgttttggtacaggaaaaaaaaaatgaatactaggtttttaacttgtgtcccgggttgggtaaagaatgacaactattctatagtttgtatagactttcccttagtggtcattgctatatgacataagaaagtcagtgcctgggccaggcactgtcacaggcctgtagtcccagctacttgggaggttgaagcaggaggatcgcttaaggccaggagttcaaggtta

SEQ ID NO: 154801 - DNA, 1169 bp, Homo sapiens
aaatttactggctattatcagaataaaggttggactcattttgcttatcccagtcattaaaatgttgtgatctgtttctaacatatttagcatttcatttttaaaatgagatgtgccattatcataacaaaggcaactattaatgttcctagaaaaaatgatgtaaaggacttactcctagtcaatattaacacttaatcccactttcttttttccaccaaatggcctcagtacattgccaagagagtgaaatttggattcctcacagtactcagaacacaatatgatatttgtcagctaactttccatcatgtctttggtaaaattgctcagttaaatataattggccatctacttattaaaaaacaattcaaataatctgtacagttaccataatttgacaacaaattactttaaatttagcaccatcttagaaatcttcttaatataaacyyactgattgaaatgtgtttatactttctatcatatttcaaactgttttactttccttgcatttaggccaattaaaacacaaactacatgttagaatgaataatttaaaggacatgctgctgtttcagcataaaaaatggtaaagtctttataaatagaatacttatgatagccattaacgtattgaattgtttaattaacctagttgtgattttccgaatttaagacgttttcttactacatgtgttaaattgttacctataatatcttcctggaaaaatagaagtatttggtaaggtttttataaatgcacaatttatgtataaatataattggaatctgggatgactcttagtaatctactattcttaattcaacgatggccaccagctacctgacacattttgtaaatttagcatctgtgtatgtgtgttcgtgtatgtgtgtgtgcgtgcatgtgcacattactgcatttattctcaaatggatttataatttagtgtttttgtacaagtacttgagctattcatgtaatgggataagttgccataaagatgtacataaatgacccttaatttggcacgttttcacatttaattttttaaaatacagcttttcatatacagttcctaccctttcatttctagcctggtacttcattacttgttgaaaaagtcaagtttgtatgaagccagcataaacatcaaaatataact

SEQ ID NO: 154802 - DNA, 806 bp, Homo sapiens
tttcatcatttagaagactcaataatagaaatatttgatgctttcctgaccttaaggaaaaaaaaaagaaaaaaaaaacataatggaaatatgccaatattctccaaattatttcacatggtcaatccaatgaaaatctcaacatctttattttttgtttttgtggcacaagacaatgcacagaatatgcaaaggtgtaggcaaaggcaatcctattgaacaagatgagaggagatgctttgtcagataacaatgattataaagctgctgctattaagacagtgttgtgttagcccaaggataaacaggccaatggaacagaatagagtgttcagaaatagatccacacatatcagtatgtatgatataagatagggcacatcagtaaagactgaatgtctcaataagtagctctgggataacggcatccagatggaaaaggtaaagatcttaaaaaaaaataagattctaagtagactgaaaacttaaatgtgaaaggaaaaaaattctaaaactgttagaagatactgtaaaagaatataactttaatatcaataaattaataaaactgactacattgataaacttctgtttatcaaaaggcccaacagaataaaaagactgtgagaaaggatatttgcaagacacctaaaggacaaagtactcaagatcataaaaaacaaggagtgcctataaacaggtaagaataggacagacagcccatttgaagagtattggtgagattgtggggaaatgggcactatcatatatttatgttagaagaataaattagttccatacttttg

SEQ ID NO: 154803 - DNA, 1236 bp, Homo sapiens
atgattgaagctgtgttatgttttgttactgagttacattcagaaggactgctgatcacacgacaagcaatgcaactcaaggcagaagaaattgccaaatcccccagaacaaagcagaaaagcgcctcgtgtgatctggaacaaagacgttttataatcagatttatcaagctgcgaagagggagttttagtgaacggaagcagcagcattctgtcaccaggaaatactcctttatccagaattgggttctagaaaaagacaataaagctttgaatacccgtgttatatacaacaggttcctgttcatgatgtataagattaagcaaaacactgatgatggtgactgtcgcttattgtgcagttaccatgttctggacaggcactgttgtaagggctctacctgcatcgacccatttttcctcatgacaaactattggtgcaattatcatgcccatttcatagatgaacacacagaggcacagagagctagaaatgggaagcaaggggatgaatgtgaggttgggggcattgagtcaagaagaagatcaggcaattctggagctaggtatgtacatgattcttctcctcctacttcaggaatccactcaaatgccaggccctcagtgaggcttttcctagccaccttatcgaaaatagcattcctcttaactgtttcattactctatgaaatgaccgtccatatctatggaggtttttttcagtctttttctaccctttccttaaatcttagacttaaacttccgggtggtgatttccaccacactcccgttcaactctcctatttggcctgtgcagaagacagatggatcttcgagaaagacagtggattttctaagcttaaccaagtggtgactccaattgcagctgctgtaccagatgtggtttcactgcttgagcaaattaacacatttcctggtacctggtatgtagccattgccttggaaaatgcccttttctccattcctgtccataaggcccacaagaagcaatttgcctttgggtggcaaggccagcaatatgcctttactgtcctacctcagggttatatcaactctccagctttgtgtcgtaatcttattcggagagaccttgatcgccgtgcttcctcaagatatcacactggtggcgggggcggggcacgggtggtggtggcggggaggccctgggcctggcccacaaagccatttttctcttctaggcctctgggcctgtga

SEQ ID NO: 154804 - DNA, 524 bp, Homo sapiens
tttttcacgttgcacggtgtttctttaatggaaagacagccaccgacctcagaagcagcccctccttgcgctggaccagaaggataaggggagacctagccaccagtgggccagtgggggtgaggggcttctaggaaaaccggtgtctgggactctggcggttgatggtgtcatctgcgcgggatgctgggcctccacctcccaacctcctccgggacagtacaggtttgggggcaaggcctgagcagggcaggctggggagaccgctgtccctggggttttgtgggcaggggctgggtgcaggccggacagacagaaagcagtcccagctcaaggcagaaggccagagggtgtggagtgaaagggacaggcgaagccaggttcggagagatggagggaacaggccaccaagctcagaagcgagaaaggtctgaggaagcacaagacacacacacacacacacacacacacacacacacacacacacacagaaagagagagagagagagagagagagagagagg

SEQ ID NO: 154805 - DNA, 1347 bp, Homo sapiens
ggaattcccgggtcgacgatttcgtgtgggtggctcgccagccgggacgaagggaaatgaggaccaccgctccggggcgcgagtaggcgcgtggagtccgggggctcagccgccgcgcctcttcctcctgcagctggagactgcaacagcggcgggtgcaccggcagcagcgacgaccctgcgcgcaggtggcagtgtagaagccagaccgggagcttccagaagtggtttctgaaagagtcaaatgtacatgagtaagcaagcacaggaatctgaaaaaccacaggaatgaaatgcagataactctttagaaaacttttgtaggaaaagcgcctcgtgtgatctggaacaaagacgttttataatcagatttatcaagctgcgaagagggagttttagtgaacggaagcagcagcattctgtcaccaggaaatactcctttatccagaattgggttctagaaaaagacaataaagctttgaatacccgtgttatatacaacaggttcctgttcatgatgtataagattaagcaaaacactgatgatggtgactgtcgcttattgtgcagttaccatgttctggacaggcactgttgtaagggctctacctgcatcgacccatttttcctcatgacaaactattggtgcaattatcatgcccatttcatagatgaacacacagaggcacagagagctagaaatgggaagcaaggggatgaatgtgaggttgggggcattgagtcaagaagaagatcaggcaattctggagctaggtatgtacatgattcttctcctcctacttcaggaatccactcaaatgccaggccctcagtgaggcttttcctagccaccttatcgaaaatagcattcctcttaactgtttcattactctatgaaatgaccgtccatatctatggagagcccctccccagaaggcaaaggatcacccagctgctggaaggtgtaggtaccctcaatggctcagtagccagtgtagatcctgtctttcgtaatcagcagctacatctggctactgggtctctgatggcatcttctagcttctgcttcagtgtcctgagagagattattgggcagtctttaataatgaaaactttaccttgaattacacacacacacacacacacacactcacacactcacacacacacagagagagagagagagagagagagagagacagagagagaggagagagtcaagttctagggtgttaagtccaacattatcagctggggcttgggaaccttcaaggttttatgaatgatgaggtctatttgctttcaatactacaagggggaggaatctggatatttatccatgtttta

SEQ ID NO: 154806 - DNA, 1550 bp, Homo sapiens
gaaaaataacacagctactcctcactgcaaaaacatatccatgcgtagaatcaacaactccagtcatgggaccaggaggagctctgggactgcagacacattccttggatgttgattttttttatgatctagtaaaggaataggtaaagtctttgatgtcagtgaagtggcaacatagccaaaaagttgggtaccttttaggaaatgatgttgtaagtctccttaatgtatcctgaggtaagtttcctactgggcagcagattttgtaaggaattacttttaaggaatttcattctttttgtatgggtcatgggagctcccaaccattttttaatagggaaagtctttttgtaaaatttgttgtccgttttaatgtccatttctgtctttattaacttgatccaaggatgattgggagggcaaacaggtttacaaattcatttctgtgacttttaaaaagttgacaatgttgtcagatttaaaaccagtgtgggctagtaaaaaggcagctcactcaatgtggggtgggctcccctattcctttacggctccccctatccctaccccacaagcctttcggttattaaaatactaccaatcttgttataaggattactgtgggagtagttcaagtactccccgggccttctgagctggtggaatattttatttcagactgaaaacagagagcactctccttgggaagggaaagcggagcttggctggagtgagagatgggagcctcatgggtgtacaacttgagggtagttaacttcattcacttctcccaaggcacttcgatcccagctttcacccactgggtgtttgctttgcttggaactgtttcaagcctttttattaggccttaccattaagtatttaggatatggtgtcctttttctgtttttggggggggggagttttgttgtgtttttttaaagtaagtgcttaagtattaaccttgggggtgtcccctctgtatgtttcgaaggggttttggttctttttgcttctgttttcttaaaccatgttttcccactcccccacttgggccattttggaaagctggtcaagcctagccaggttttctgggatgtcgggggagccccagatgacccctatcgggctgcaatacctagcctaagggtaaaggcctagaaaccctacacttgtcacttttactgagatttcctgagtatactttttcatattgcccttaatgagccagtaaatgtgtttaatgcatttgtttcctttgccacagacattttgtcaaatattacaactctacttttttatggcacatattagcacataagcctttattccaagaggtatttattttctcacttgtaaaaaaataatgtttccacgtaaagaactctgttatatcctagaggactctgtcttttatattcgggactaataacgactttaaagcaaaaaaaaagtagagttttaatatttgacaaaatgtctgtgcaaagaaacaaatgcataaacacattactgctacattaaggcaatatgaaaagtatactcagaaatct

SEQ ID NO: 154807 - DNA, 359 bp, Homo sapiens
gcacatagcccaggaaggccgagctgaggatatttgaaaaagtctctgtgacagatgcaatggctgaagacatggagaaactgaggccccggctaaagaaggtccacatcagagaattggtgctcgccatctcaataatgcctaagacgcataaacccatgctcaccttaagagtcacgtggagagaaatgctcaggctcaagggacttaaaatgagaggtagagggtggatgtaggaggtgtagttcttccccgagagcgatccgcctggaggtgcggagggaattccgcgggggtgtcagggtacgcggtcgcggactcggcgccgcccggaggccccggcctctcggccatgttgc

SEQ ID NO: 154808 - DNA, 458 bp, Homo sapiens
ggagcttcctgtggattagggtgagtccgcagagaataaggaacactcctccccaccacaagacctcctggcactctccatacagcacatagcccaggaaggccgagctgaggatatttgaaaaagtcactgtgacagatgcaatggctgaagacatggagaaactgaggccccggctaaagaaggtccacatcagagaattggtgctcgccatcacaataatgcctaagacgcataaacccatgctcacctcgctgccgaaggccagcttggcggaggcggcggccagggccccgaacgcgccggcgcacagacagttgaatacgccccaaaagcggcgccgcatcgcacccgcctggaggtgcggagggaattccgcgggggtgtcaaagtacgcggtcgcggacacggcgccgcccggaggccccggcctctcggccatgttgcctgcgaattcc

SEQ ID NO: 154809 - DNA, 1172 bp, Homo sapiens
ttttttttttttagttttaacttacaaaaaacgtatttattaatccagttttcctcttcttgccataatacataagcatgacacagatggcctgatacatcagcatggaactgtcagaaagccccaccagtcactgcttctagagttacatgactggcttttgtttggcaacaggacaataattacagcgtggtttcaagtaccatacacaaagcagaccaaccccagggatctccagcatctgcgaaggcttcactgggggtaggccctgggaggaaggaatccaaagcactgtacagatgattcaaaacacttccggtagaacacttgcttgcagcttgcacctctcctttacagagccagagcctgctccattcaggaggcctgcttcccttgggctgatgggtcagaaggctggcacaactgggatcgccctagggacacagtcccacatgacattcccaaggctgggccaccatcatgatcttttccagctggtccgtctagccaagtggtgctactgctgcttgtgtggaaggggcttccaggtggggtgggagcttcctgtggattagggtgagtccgcagagaataaggaacactcctccccaccacaagacctcctggcactctccatacagcacatagcccaggaaggccgagctgaggatatttgaaaaagtcactgtgacagatgcaatggctgaagacatggagaaactgaggccccggaataaagaaggtccacatcagagaattggtgctcgccatcacaataatgcctaagacgcataaacccatgctcaccttaagagtcacgtggagagaaatgctcaggcacaagggacttaaaatgagaggtagagggtggatgtaggaggtgtagttcttccccgagagcgaactagcccaaccggagaaaaggttttaggtccctggtaagggaagaggcctcagtccccgacgtctcttaccacctcgctgccgaaggccagcttggcggaggcggcggccagggccccgaacgcgccggcgcacagacagttgaatacgccccaaaagcggcgccgcatcgcacccgcctggaggtgcggagggaattccgcgggggtgtcagggtacgcggtcgcggacacggcgccgcccggaggccccggcctctcggccatgtt

SEQ ID NO: 154810 - DNA, 482 bp, Homo sapiens
cctatgctttcctctccatgaatgccttcttcatctgcccagttactccttcctcatgaggtgagtcctgtcctgtcctgtcagctgtgcttcctaaagatcactagagtctgttcatacctctgggccactgtcatccttggcctcgattactgcaatagcctgataccttgccttgtgtcttatttccttctcagcctttctctgccttgtatcagtgttgtcttcagaacacagatcttattacattattaattttttttctaagcgacaaggtcttggcatgttgctcaggctggacttgaattcctgggcttaagcagtcttcctgcttcagcctcctcagtagccgggaccacaggcatgtgccatcatacccagctacattattaattttaagtggccctcccaatgccttcctgataaagtccacactagttctcaatgatctagtcattgcattccctgtcactagaattaca

SEQ ID NO: 154811 - DNA, 524 bp, Homo sapiens
agctggcctctggtcaatgtagttaaccacacttgtctttgcaggaactcctggaaagaagagaagaggaggtaatcaatggcgctgaagtcctcactactcttgttcaggcggaactggaggaagaccacgtcccgctttttcacttcccggggcccctggacaatcagggcagatttcacagtctgattggagaaggggtccgtgtagttgatcctctgggtggtgcaattcatgtcacccggctggccagggcttgtcagaggaggaatgacctcgtaatggtcttacagctgagcaactgggcctgaccggggtacaaggcaatacctggggcatcatagcgatccacttccttgtaagacacagacatgacagggtgcttgagtttctcacgaaagtctgtgatggtccggtagaccaggaagacgccacagccatgacagcggatgctgctggaggcggactcgctgtccaggcctggtaagatacccggaccttggactctgaccgtccctcgtgcc

SEQ ID NO: 154812 - DNA, 504 bp, Homo sapiens
tccactgcttcccgcccatcctcctccttggtctttaccagtgacatcttgacccaggtgcggaagcccccagagaacttccagctggaataggcactctcacaggcctgcgtgaagcctaccctgtttgggctttgcaggaactcctggaaagaagagaagaggaggtaatcaatggcgctgaagtcctcactactcttgttcaggcggaactggaggaagaccagctcccgctttttcacttcccggggcccctggacaatcagggcagatttcacagtctgattggagaaggggtccgtgtagttgatcctctgggtggtgcaattcatgtcacccggctggccagggcttgtcagaggaggaatgacctcgtaatggtgcttacagctgagcaactgggcctgaccggggtacaaggcaatacctggggcatcatagcgatccacttccttgtaagacacagacatgacagggtgcttgagtttctcacgaaagtctgtg

SEQ ID NO: 154813 - DNA, 2252 bp, Homo sapiens
gtattaacttttatttacctgttaatgaaatcatcaaaatacaatgagtaggcaccttctatgtacatctgtcctagtgcttttgagtgttaatctaaactcatacatcaacaaacattctagccggacaagtaggtggctactcagtccattaagaaacttaattactagtttctagtaggccttaaagtctcatttaacatttaacaaatcaaagagcatgtcagaggctggacatcaatgggcagatgatgccaaagtcatagggttttgcctttgtgtacagtgcataggctccaaagcatggacctgtcacgtcttggatactcagggaattttttgggaaaaaggaaaatcacactccttttggtccactttttaaaaagtggaaaagtaggagccttccattacccctagtagagcttaacctaaatacaatacaatgaaccaaacaggaaagaaaaggcaccttcctacaaaccctattccaaaagtcattggccagctctttaaaaaagtttattaattaatttcaaatatttaaataacttgtaggttttatcccatttagtctcttctattaggctctacaccgcctcttttgggacggggttagaagttccagttttacatgctgttcctcccagcaaggccccatttcttcaagtgagtacaggattgttgatagctccgtttacaaagtggaagtgatgacagctcccattgatgtggacagttctctaaacaacgcgaggtgacttcagcttatgtggctcgttgcctgacctcttcttttaaggtatctctttctaattttgatcatccattttatactcagtttggcaaactctgctgctttaaataatgccaagaaggcgccacagagaagagcaattgtgttccaaggattggcagtgactatatcttggactttctggatgaaaggatctttccattcaaagaccacaaaaaacaattgagcactttttttggcagctggcctctggtcaatgtagttaaccacacttgtctcctgccggaactccactgcttcccgcccatcctcctccttggtctttaccagtgacatcttgacccaggtgcggaagcccccagagaacttccagctggaataggcactctcacaggcctgcatgaagcctaccctgtttgggctttgcaggaactcctggaaagaagagaagaggaggtaatcaatggcgctgaagtcctcactactcttgttcaggcggaactggaggaagaccagctcccgctttttcacttcccggggcccctggacaatcagggcagatttcggtcccaccctgcagggttccaccactgctgcagagcagagctgcgggcccttccccttcttccttttccaaatgggagctctactgctctcatcatattcttcctccactgctatatgcgcactgtcaggaatccctgagcaatactcagcaaaggctggaggcctcactgtcctccctgaatgcaagtgagccaaccacagccaagtgtccacatggcacagccgcatgtctccttggggactaaggccccacactgagtgagtggaagaaggactcctaggaaaaaggaaacttggggccttgggttgcggggctaacagagcagctgcccagacccagctcaggcagacaggaattaccacagtctgattggagaaggggtccgtgtagttgatcctctgggtggtgcaattcatgtcacccggctggccagggcttgtcagaggaggaatgacctcgtaatggtgcttacagctgagcaactgggcctgaccggggtacaaggcaatacctggggcatcatagcgatcccacttccttgtaagacacagacatgaccagggtgcttgagtttctcacgaaagtctgtgatggtccggtagaccaggaagaacggccacagccatgagcagcaggtagatgaagatgagtaggaccgagaagacgttcttcaggcaggccttgctgaagcggatgctgctggaggcggactctctgtccaggcctggtaagatacccggaccttggactctgaccgtctccttgtcctgctcgtctgccagctctgagttctcaaccacctggaccaactcctcactcagctcctggtaggatgtggagcgctcctgccggatcatggcactgaccagagcttcggcacacctgagactcgccccagcccgcggcgcacggacgcagcactgcggacgc

SEQ ID NO: 154814 - DNA, 612 bp, Homo sapiens
ttttttccaattttaccaaattctttattgaacaaaaaatcaacagcaaacattgtcaaacaggaagttcaaacagggcaggtgggtagggctgaccatcctctccttgcagtcccacctctctctggaacaggcttcaacactagtgagggcatcaaaacccctgttctggtgggtaaggagggtcaggcctttctagggaagggacactcagagccagcttcatctgtaggccccaaagaggagtcacgggctgggccagggggctctggagctgcaagggcgctagacaaacgctgcagagggcgggggatggagctcttggtctgggggcacagtaaggcttggagctggtgactcatggtcgccagggattcgaggtgccggagcagggctttggtggggacaggagtccctgtggaagtgctggccacgggcaaaagccatgaccagctggtgctactgaatagggatgctgggactggcgcaagcctggctctgggggccactgccctcgcccaggatgctgccagttttcaggctctggccagagcctccccctgcctctggggggcctctgccaagcagagattccccttggagctatactgc

SEQ ID NO: 154815 - DNA, 698 bp, Homo sapiens
cttcccgggtcgaggattttgttccgccgcgggctctgcccgctcgcctgctttcttggtggggtagaggggagcggggccgacacaggactgcagttgacagcagatggctgaaagctcggaaagcgaaatcgtggataagcaggggaactgtggcatcccatttaaaattgcttctgaagagaagcatgaggttacatctgtaatctccctgcagcagaggcaactgcataagaaaccaaaagacacacctgctccatgccagcttcgataatttctttgtaccttcggcgaaagaagcccatctgaaaggcagaaagaaagagaagctgagttagaagtgctgaagaatcagccattgtgacccccaggcagtctgtccctggcctaagccaccacataaaaagtcagaccatctgctggaagaaccacatggagaggccctgagtcaacatggagaggaagaaggacttgactgaatccagccttccagctgtccctaccaaggtgccaggcatgagaatgaagctgtcttgaactctgaagaccagcttagccaccagatgccaaacactgagcaggctttgttctccacccacaaaccagaggctgtctcagcaggaaggagttggagttggagaaaaaggagaattaagaatctatctggcgatgtggattaaataaacaacaaattggca

SEQ ID NO: 154816 - DNA, 2160 bp, Homo sapiens
  misc_feature (1)...(2160): n = a,t,c or g
tcccaagnaccctcctaaattttgaaaaagtttgaagccaaagtatacagttcaccaagatgtacgtttaacacgtaaccccagacataactgcatgcaccctggccataatgccttacccaaaaataaaagtcataaataaccttttaaaaagccaccatgctagggttcaacaggtagcatacagcacacggatcgtctggggatctgctatgcttccgcatgaaaaacagaatgttcccaggagtgctgttgggtttttgttttaaacctcattgcctttggctcaagggcagtagctacatgatttggtgaaggaggacttcctagtggatcttctacaaggtctaccatacctctgagtacccatgatgctgacagttttcctaaagaactgcctgaggaaacctcagtgctgagttattcggaatggatgcctgtcagttgccactaagccagtggaccctgccccttcctgctagtgtccccttgtttctaaacatcatggcctcttctttgtgacagctctatggcccacttggaggatgttccaaactctccctgagtccctatgtaaattaagccataagcaaaactttttttaaaaaaaggggcactgttttaactcccattttttacaaaggtcctttttccatatttaaaaaccatttcagttctctgaacagttggttaaaaccacattgaagattcaactaaaagctgaaggaaactgaaataatactgctcaggagaatatcttataggattccacagtgaaaccatggaagcaggaaggggagaaagtagaacatcctgtagaattttcaaataatattctggaagggtaacacagatgtactgatccaccccatctgcttcccctgagagcatagagagggcttctgagctgggaaggagcttgtgaactgcccaagttgagagagcgctaacaatatgcttgacttctctatcgctgcacaaaatgcttaactccccagtcgcagtagcccgcctgctactcagcacgatcagaccaacaaaggcatcatccttccccagacaggttcctggggaggctttcagtatctgctggtggtgatgccaaggctggttttcttaaaacctgcctttataaagtcttagtgacctcctgggtatacagctgctcatgtgggtccaccctcgcagaatcaagcagaagcaaataggtcccagctctgagactgcccacaggagtctacccttctccagtggggctttgctggtgggcagaacatgggcctgcgaatcacccttgtacactgtcaccaacgcacctacaccccggcaggaggcaagttagttgctctaagtgcatgtggccaaagcttgttatggcgcctttccaagaaatatcacctaagaatcctaaatgattcagtaaagaaaacatggctttatgaacaagagtccatcaaaggaaagctgcaaatggcatcccattcaaaaagtccacatgccagtgcattttgccaccctgagacaaaatgtccctgaagtgttctctggggagcctccagcaccttgctcagtgcctgactcacagcaggggcctcataaatggctgttaataagtgataaagcccacgcaagtctgcttttcttgctgcttttgataaaactcataagcgacctttgagtgccagctgctttctttgcctcgtcctgctccctgtagctacctctgtgcctccatcccgcagttagatgcaacatccctgatttccaggatcagcttagttcatgccattgacccttgatttttttggtctattcccatgttcaccagcaagagaagcatgaggttacatctgtaatctccctgcagcagagtcaactgcataagaaaccaaaagacacacctgctccatgccagcctaagccaccacataaaaagtcagaccatctgctggaagaaccacatggagaggccctgagtcaacatggagaggaagaaggacttgactgaatccagccttccagctgtccctaccaaggtgccaggcatgagaatgaagctgtcttgaactctgaagaccagcttagccaccagatgccaaacactgagcaggctttgttctccacccacaaaccagaggctgtctcagcaggaaggagttg

SEQ ID NO: 154817 - DNA, 550 bp, Homo sapiens
aggttgtgtaataatacctacctcatactgttgtgaggtttaagtgcaataacatataccaaacatatggcacatactaaatctttaggatgaggaaagatgtagggcaagaaagcaaaagcagaagttagaactggggaataaggtagagtcttacttgttttgttttgtttttttgagacagagtctcgttctgtcgcctaggctggggtgcagtggcgccatcgtggctcactgcagccttgagcctcagtgagctatgagcttgaggctgcagtgggctatggtggtactactgccctccagcctgggcgacagagtagggccctttatctaaaaacaaaaacaaaaaacttcttaaatctctcctgatgaaggacaggattggtttggggatgaggttgagcctgtagtataagtcagatggtcttgggtgtaaagattaaaaggcctggagggatggatgaccgaaggcaggatttttgtcacaatgtttaggcccattttataatcttaattatggtagatataattgctgtatgacttttat

SEQ ID NO: 154818 - DNA, 2563 bp, Homo sapiens
atagacattttagaacagtcttgtggttctgataaagaacgtttggaggttgtacacacgaactgtgtgtttgtgtgtgtgtatgcgtaggtgtttgtatgtgtgttttcttcatacttatgccccatctgaatatgtgggaattagatccttggatcatttacaaaagaaagaaagagaattttcctagcagcttggactgcatgtgtgcaccaccatgcccagctaatttttgtatttttagtagggatgggttttcaccatgttggccaggatggtcttgcagtagaatcacttgaacccgggaggcggaggttgcagtgagctgagatcccaccactgcactccagcctgggcaacagaatgagactctgtctcaaaaaaaaaagaaaaagaaaagaaaatgagaaacgaaaccaagaccaaatggacctgcagtccttttataacctaatttcagaagttacattctatcactatctcactgtattctttttattagaaatgagtcactaagtctgggtcacacttaagtggaaggtaattaattaaacttcacctcttaaggggagctgtgtcaaagaatttggagacatatctacatagactacatccatctacatggactacaacaatgtcttttttcaaatgttaccttcccaatagagtttaccctgactactcatttaaagttgtaagctccatttgtcccccctgcaccttagcactcccatttcatcttaccatcctctactttttattttttctatagcacctagtttccaacatattgccataaaatttacttattttattatacttactgtttatggtctatctcctgtctgttagaatgtaagctcaacaaggacaaagatgtatgttttgtgcactggtctagcccaagtgcctagaacagtgcctccacacatagtaggcactctataagtgtttgttgaatagaagaagaaatcatatcttcccactcttttttattttcctcctcttatgaataggccagcaaataatcacctattggtagccttagacataggcagccttacatgtaaatagatgagtagcctatattcccattctaccacctgccttatttgtttgacatttatgttttctgaaaggcagtcccaacttcgggatgaagtgtatataaaccttgaatcttttattattgagaaatcccagaacctctctttttttagagccagttaagagactaacacctcaaaagtcaaaagaataagtacctaacaaaatcctggaaagaaaattagtcttagagtcacaagggctccacttccacagttagaagggctacccttttaccatgtacctgttgttcaatatgtagagaaagccataggattcagggtggtttttttttagtgtccatgtgggcatcgtaaaaaaggataagtctagatgcatgagaatatgctccctcctattatgtgtgtcagttctccgacctagaaaaacttgcagttaattcatcctttcggtattcggtcaggtgcatgcgggctgaatgaggttctgtgagcatataaggtatgataatattgccatcaaagagcttatagtgcttagtgaatgataataagggccatagtagtggagtgattagaaaaagctttctataaatggcaggacgtgaactgggctttgatttaggctttgattgaaaactatgtggaagacattttaggtgggaagcacttgggcaaaggatggaaaataagaataagaatggatgaggattagtagaaaataaagttagcaagataataacttgaggctaaattgtgggggccttaaatgttgggctggcagattagtgttttattctgaaggtggttttcagttttttttgttttttttttttttttttttttgcctgtaacacatttatttctccatttagttcaattgttaacgactgtcattatgtgctgtgattctcaagtggggacacatctcctaggagggagatggggcacattctccttgcacttattaattactgttgcagatagtgggaagccattgaaagttttgactggagaattgacatatgaaggtgatctttaggaatattaggctcttggtcatatgcttatgtgatttgaagaatagtgatgccattgatagactaggaagatcatgggtggggtcggtttaaccgtgggcatataaaagaattgttttccttactgaaaatatgaatgtaccagtatttgagctctggaatgaaaatctccagggaggaaggtatggctgtgcatgtttctcaactatattttgttttttctgaatttcaccttctctttggggttttctcactgtgaatcctgtagtaaccaggggttaccacttctttttttttttttttttctcaagaagagctaaaaagacctctttctttattttccttttgcaaaggcttataagggcttatgttttcaaaaggaaatttattaaaaattttaaagtaattttttaaaaaaattgttaaaattttgagagagaaaaaaaaaaaaaaaaa

SEQ ID NO: 154819 - DNA, 1042 bp, Homo sapiens
  misc_feature (1)...(1042): n = a,t,c or g
catgaacccctggagcacagccatcgtggccttctgagcccttggcccccctgcggggaggaggtggagcagcgggcgtccccgaagtgagggccaggcccttcccggctgcgaggacgcccagagaccgcgggcgctgagcgcgttgggcagactggttgcctctgggcatcgcaaactgcccccgggcgcatctggcttatctggagacctgggagcttgaggctcattggaagaggacgatcgttaacttttgtgtttgtgtatgtctgtgtatgtaagtttgtcttgtggcattaagactattttgctcttctggaatgcaccactccttcaacagggctttgcagtgagcggcggtagacagggactttcctctgccggctgcgtggagaaggaagcggctaaaaggtttgggccggggagttccccattcgttctccggggagggagggactttacacctacccctcaccggaaagctagacccgcttcagggccagggagtggcgtttccgcagcacgatttcctaagacgagagggatttagccaagagcacagacttgggatttccttctgtccctccccacctttctctcccaatgaagaaacgtttataatcctgtggattactctaggaaaggggccgtatttaacggcccctttggcctnccccgcaggggagaaaaagccttgaccgaaccttcacagaaggagttccaagcctgggaaataatgggagtttataggagaaaagatatatttttaaaaaggttctagggtcagaagtacctacacaggtgctgtttaaaaagtgttttaattgaggagttttacagacagaagcccgaagttgggaaagaccttatggttttgtagatatggtgactccagtctttgttgtataaaggttgggggagctgataaggtttttgtacagtattttctccttcgttgtattgatttttgtataaaaatgtaacgttctacgtgtctaacacggtattaaatattttgaagccccaaaaaaaaaaaaaaaaa

SEQ ID NO: 154820 - DNA, 677 bp, Homo sapiens
cactatgaaaaatcataacatgctgatgattaacaaccaagacagtccccatcttcagttcaggctagtaaacaagacagacaccacacataacttgtttcccttttaaaattaacatctctgaagtatgcagcgtgaagcagggcatacagaactaaaggtaattaaaagcagaagactgcctttcctttcttaccctcatatcactcttattagggggtagggaacagatgtagtattatgaggaaactggggtaggaatttataggaataatatatgggtgggtagacctggggcaaacattcaccctccctctgggacatcccttaatttacaaactattaaaaaatgaattagatgcacgcaagcttttgccttaacatcagtggtttcaggcccaggcacagtggctcacgccagtaatccaagcactttgggaggctgaggtgggcagatcacttgaccccgggagttcaagaccagcctgggcaaaatggcaaaaccctgtctctacaaaaacttaggtaggcatggtgacttgtgcctgcaggccaggctacttcagttggctgaggtggaaggattcacttgaaacccagggaggttccagggttacagttgagttcgttgatttgcatcctttactccagactgagttaacagagtaagaccctgt

SEQ ID NO: 154821 - DNA, 363 bp, Homo sapiens
ggcacgagaagatgggcgcccagctgtccatgctgctggaagggtctggtgggggtgaataggctacggagcctgtgtggccaccatgcctgtggcctcagccactttgtgcaaaggactgcagaggcgtggcaaggccatgatgtgtccgtccaccgaaggcctccctggttttgagcccctcctctgcagggaatgcttccagcattttcatggattacaaatgtcttagcccctgccctttcaagcagttccttagctcccctccccagtccacagagccatctcctgcctgtgagttaggcctaatcaacgtaaatctgtcctccaggccctcccttccctccagatgaggtgcgcaag

SEQ ID NO: 154822 - DNA, 559 bp, Homo sapiens
ggcacgaggactctgaagagaacttcagtctgaacctaggaggggttgacctgtggcttatcaggatgtgaacattgggcaccctattttctattttggttatttactttatctatctatctggctgtccgtccgtccgtccgtccgtccatccatccatccatccatcctatttatatatctgtctatctagctagctagctatgagataggggcttgctatatggcgcaggctggccttgaactcctgaacttacacaatcctgcctcagcctcctaagtagttgggactacatataagcgtcctttataacagctctccttcctaccctcctccctctttatttgtttgttgacttattttagagacagggtctgtctgtgttttccaggctggagtgaagtagctatgtacaagtgtgatcatagcacactacagccttgacctcctgggctcaagcaatcctcccacctcagactccagagtacctgggtgtggtgatgtgcacttgtactcccaggtcgacgcggccgcgaatttagtagtagtagcggccgc

SEQ ID NO: 154823 - DNA, 2175 bp, Homo sapiens
tgtttaaaagtttcccactcaaatgcacacttgaaaattgggtccctcagcctcattactgaactaaataagtgaagaagttgtatctttggggtaaaactttccagggccacttaattttttaaccagttaagtacgcatcttcctggtggttcagactttttaagtcagtgctaaagctgaaaagcgccttctaaatatgactgtgagtttagtttgtatcttacatttagtaactgttctgttgggccaggactatgactttaattactatgtgcttattcatcccacactctgcactagaatacaccatagctactatagcattgtggcaggcactcatttttgtggactcattccatacttctgctggcatatttcgtttaaaatctagctaaagattttcatagtactgtgttaactagccagggctgaaaagtgtgacaggatatcaaattgactttccttggggaaaatgttgctttggcaatagtgaagtccaaccccttcatttacagaattagtgattactcatcaatttttgaaagttgtagattaagtagttttatttactaaattcttaaccactttgaagatttaagccagttgaaatgaaacattggctggatgcagttggctagcacctgtaatcccaacactttgggaggccaaggtgggaggattgcttgaggccaggagctcaagaccagcctgggaaacatagatttgaaatcttttcaaaaatgtataaaaatttaataaataaataaatgaatccttactcaaccataattatggctttaaaacccaaccaacagtaaacacttacttgaagccaaaacagtaaattttgaatgaaatttgaattatgcttttggaagctgccatgtcttaattcttgctggattttggatttccaattttggaagtttttatcaaaaactgtccagtcatgagtataatcaggtagcagcctttaaggatctaagtttcattcctataaagaacaggaggtgctggtatttcttgtcttagcaagtgatctgatgcaggtctaaatgggggttagcatctatactatggcttaaaagtttcctccttggtcaccatttgggaggtgatggcttcaaagctaagctttgctctcatgtgacccttctttatcttaatacccaataagatataaacctctcagagtcaacccagtgtagactcaaagggtcttagcttcatctatcagataagatctatctgatttatacaaagaatggtgctgtttttatatacatactaaaaaaatctaattctcaaacaattttcttaatatttatgccagcaaggtcaggaaagactattttgtcctgtttaactttagtagtgaacaaactgctagagacatctgtcatccttaacaggccactgtggtccttatatactgaccctcctttccaattaacgtcctttaatcccatactagttccataagagacttgggcacataaaagcagtattttttttaatgccctggtaaactggcccagaaaaaaattattggccatggtggacctgtttcctatcccacctcttttctatgggctatattagtctatacatggccagtttccgttacatactccatttccaaagagcccccaaacccctgggatagtagcactaccatgaattttagggtcacaaaacatttccttctgaaggaagcagctgcctcagcagtgtcactttagtgaccactgcccaggcttacttcactttgcctccccctacacatcactgccctctttctgccaccaaacctcactattccagcaatgatgcctcccctggtgtctggaaaacccatctggtgcactaaaatgctatgcaacaccaaatggcttcttcccctaatattgctcaacaatgtaaattcttcaagaataaacttcatgctatgttaacatcaatgtatggttacagcttcctttttttttttttcccttttaaaatgaagcaaaccacctccattaaaatccatgttttggggcttgtttttgtctctcaagtgtgaaatataaatcatgtttttatgatttttgtaaatctttttacaccttgtttttgtaagcaaaagtttcttattaaaagaataaaatgacaaaaaaaaaaaaaaaaaaa

SEQ ID NO: 154824 - DNA, 637 bp, Homo sapiens; identical to SEQ ID NO: 144817
  misc_feature (1)...(637): n = a,t,c or g

SEQ ID NO: 154825 - DNA, 770 bp, Homo sapiens
  misc_feature (1)...(770): n = a,t,c or g
gacactcgctttttggaacgtctgaggttatcaataagctcctagtccagacgccatgggtcatttcacagaggaggacaaggctactatcacaaagcctgtggggcaaggtgaatgtggaagatgctggaggagaaaccctgggaaggctcctggttgtctacccatggacccagaggttctttgacagctttggcaacctgtcctctgcctctgccatcatgggcaaccccaaagtcaaggcacatggcaagaaggtgctgacgatccttggggagatgccataaaagcacctgggatgatctcaaagggcacctttgcccaagcctgaagtgaacttgcacttgttgacaagcttgcatgtgggatcctgaagaactttcaagcttcctggggaaatgttgctggtgacccgtttttggcaatcccattttcggcaaaagaatttcacccctgaaggtgccaggctttcctgggcagaaagatgggtgacttggagttggccagtggccctggtccttcccagattaccactgaagctcaattgcccatgaatgcagagcttttcaaggatatggctttattcttgcaagcaattacaaataataaatctatttctgctaagagatcaccaaannnnnatnntnnnnnnncccccggattttttatttagcgggccgcacctttttccccttttagggggggtaaatttatattgggccttgggccggggttttcaaaagcggggggannnnnnnnnnaaagagccc

SEQ ID NO: 154826 - DNA, 653 bp, Homo sapiens
ggggacaggcctgccactttattttccgttctgcacaggcgggcggcagtaggctgagaatttggagggctaaacaactgggactctggagagtctgtgctctaataatgcctgctttggagcactccttccccacccgcctgctccaggggaatagcgtccctggtcctagcatttcactagatacctcgggcctttgaaccgctgtgcttgggagggaggaagaggatagacaggtccagggctcccctcacttgggaaggccctagtagaaggcattccttctgagtctcctggccctacagtttctcacccctgctgttccccaagacctgacccggaccaatcagctgcatctctgcaccaagtgccaccccccaccgtgcactgctcgcacctcacgctccccatgggctggcccggaccccagtgaggtttggacctctcgggacagccaagaccttggaagccatgacctgtgtgttcaaggcttggcggaagagaccctgctccccgggggatggagaaccccgcccttcaccacttccttaatctgatgcattaaaggaacccgccaaaaccccggggagtgttgcccgggatattcccaccaggagaggcataggcgatattagtattaaattctagcttcg

SEQ ID NO: 154827 - DNA, 176 bp, Homo sapiens
cacacacacacacacacacacacacacacacacacacacacacacacacacacacacacacacacacacacacacacacacacacacacacacacacacacacacacacacacacacacacacacacacacacacacacacacacacacacacacacacacacacacacacacaca

SEQ ID NO: 154828 - DNA, 188 bp, Homo sapiens
cacacacacacacacacacacacacacacacacacacacacacacacacacacacacacacacacacacacacacacacacacacacacacacacacacacacacacacacacacacacacacacacacacacacacacacacacacacacacacacacacacacacacacacacacacacacacaca

SEQ ID NO: 154829 - DNA, 118 bp, Homo sapiens
cacacacacacacacacacacacacacacacacacacacacacacacacacacacacacacacacacacacacacacacacacacacacacacacacacacacacacacacacacaca

SEQ ID NO: 154830 - DNA, 227 bp, Homo sapiens
cacacacacacacacacacacacacacacacacacacacacacacacacacacacacacacacacacacacacacacacacacacacacacacacacacacacacacacacacacacacacacacacacacacacacacacacacacacacacacacacacacacacacacacacacacacacacacacacacacacacacacacacacacacacacacacacacac

SEQ ID NO: 154831 - DNA, 157 bp, Homo sapiens
cacacacacacacacacacacacacacacacacacacacacacacacacacacacacacacacacacacacacacgcacacacacacacacacacacacacacacacacacacacacacacacacacacacacacacacacacacacacacacacac

SEQ ID NO: 154832 - DNA, 133 bp, Homo sapiens
acacacacacacacacacacacacacacacacacacacacacacacacacacacacacacacacacacacacacacacacacacacacacacacacacacacacacacacacacacacacacacacacacaca

SEQ ID NO: 154833 - DNA, 169 bp, Homo sapiens
cacacacacacacacacacacacacacacacacacacacacacacacacacacacacacacacacacacacacacacacacacacacacacacacacacacacacacacacacacacacacacacacacacacacacacacacacacacacacacacacacacacacac

SEQ ID NO: 154834 - DNA, 143 bp, Homo sapiens
acacacacacacacacacacacacacacacacacacacacacacacacacacacacacacacacacacacacacacacacacacacacacacacacacacacacacacacacacacacacacacacacacacacacacaccac

SEQ ID NO: 154835 - DNA, 89 bp, Homo sapiens
cacacacacacacacacacacacacacacacacacacacacacacacacacacacacacacacacacacacacacacacacacacacac

SEQ ID NO: 154836 - DNA, 166 bp, Homo sapiens
cacacacacacacacacacacacacacacacacacacacacacacacacacacacacacacacacacacacacacacacacacacacacacacacacacacacacacacacacacacacacacacacacacacacacacacacacacacacacacacacacacaca

SEQ ID NO: 154837 - DNA, 190 bp, Homo sapiens
cacacacacacacacacacacacacacacacacacacacacacacacacacacacacacacacacacacacacacacacacacacacacacacacacacacacacacacacacacacacacacacacacacacacacacacacacacacacacacacacacacacacacacacacacacacacacacaca

SEQ ID NO: 154838 - DNA, 218 bp, Homo sapiens
  misc_feature (1)...(218): n = a,t,c or g
gtgtggagtgtgtggtgtgtatgnagtgtgtggtgtgtgntgtgtgtgtggagtgtgtggagtgtgnagcgtgtggagtgtgtggagtntgtggagtntggtgtgtgtggancntgtggagcgtntggtntgtgtgtgtgtgtgtgtgtgtgtgtgtgtgtgtgtgtgtgtgtgtgtgtgtgtgtgtgtgtgtgtgtgtgtgtgtgtgtgtgtgtgtg

SEQ ID NO: 154839 - DNA, 206 bp, Homo sapiens
acagcacacacgaacacagcacacacacacacacacacacacacacacacacacacacacacacacacacacacacacacacacacacacacacacacacacacacacacacacacacacacacacacacacacacacacacacacacacacacacacacacacacacacacacacacacacacacacacacacacacacacacac

SEQ ID NO: 154840 - DNA, 185 bp, Homo sapiens
caccccacacccggcactccacacactccacacacacacacacacacacacacacacacacacacacacacacacacacacacacacacacacacacacacacacacacacacacacacacacacacacacacacacacacacacacacacacacacacacacacacacacacacacacacacac

SEQ ID NO: 154841 - DNA, 394 bp, Homo sapiens
  misc_feature (1)...(394): n = a,t,c or g
ggactnaggaggaggctgcacagcgggagagcagctggtccagaccagcccttncagcccccactcagccggcagccagatggccccgcaagcctccagggatggcccctagccacaggccctggctgaggtctctgggtcggtcagtgacatgtaggtaggaagcactgaaaatagtgttcccagagcactttgcaactccctgggtaagagggacgacacctctggtttttcaataccaattacatggaacttttctgtaatgggtacaatgaagaagtttctaaaaacacacacacacacacacacacacacacacacacacacacacacacacacacacacacanacacacacacacacacacacacacanacacacncatggcncttac

SEQ ID NO: 154842 - DNA, 1833 bp, Homo sapiens
catgctgcctctgccaccttctctgccagaagataccatttcaactttaacacagcatgatcgaaacatacaaccaaacttctccccgatctgcggccactggactgcccatcagcatgaaaatttttatgtatttacttactgtttttcttatcacccagatgattgggtcagcactttttgctgtgtatcttcatagaaggctggacaagatagaagatgaaaggaatcttcatgaagattttgtattcatgaaaacgatacagagatgcaacacaggagaaagatccttatccttactgaactgtgaggagattaaaagccagtttgaaggctttgtgaaggatataatgttaaacaaagaggagacgaagaaagaaaacagctttgaaatgcaaaaaggtgatcagaatcctcaaattgcggcacatgtcataagtgaggccagcagtaaaacaacatctgtgttacagtgggctgaaaaaggatactacaccatgagcaacaacttggtaaccctggaaaatgggaaacagctgaccgttaaaagacaaggactctattatatctatgcccaagtcaccttctgttccaatcgggaagcttcgagtcaagctccatttatagccagcctctgcctaaagtcccccggtagattcgagagaatcttactcagagctgcaaatacccacagttccgccaaaccttgcgggcaacaatccattcacttgggaggagtatttgaattgcaaccaggtgcttcggtgtttgtcaatgtgactgatccaagccaagtgagccatggcactggcttcacgtcctttggcttactcaaactctgaacagtgtcaccttgcaggctgtggtggacgtgacgctgggagtcttcataatacagcacagcggttaagcccaccccctgttaactgcctatttataaccctaggatcctccttatggagaactatttattatacactccaaggcatgtagaactgtaataagtgaattacaggtcacatgaaaccaaaacgggccctgctccataagagcttatatatctgaagcagcaaccccactgatgcagacatccagagagtcctatgaaaagacaaggccattatgcacaggttgaattctgagtaaacagcagataacttgccaagttcagttttgtttctttgcgtgcagtgtctttccatggataatgcatttgatttatcagtgaagatgcagaagggaaatggggagcctcagctcacattcagttatggttgactctgggttcctatggccttgttggagggggccaggctctagaacgtctaacacagtggagaaccgaaacccccccccccccccccgccaccctctcggacagttattcattctctttcaatctctctctctccatctctctctttcagtctctctctctcaacctctttcttccaatctctctttctcaatctctctgtttccctttgtcagtctcttccctcccccagtctctcttctcaatccccctttctaacacacacacacacacacacacacacacacacacacacacacacacacacacacacacacacacagagtcaggccgttgctagtcagttctcttctttccaccctgtccctatctctaccactatagatgagggtgaggagtagggagtgcagccctgagcctgcccactcctcattacgaaatgactgtatttaaaggaaatctattgtatctacctgcagtctccattgtttccagagtgaacttgtaattatcttgttatttattttttgaataataaagacctcttaacattaaaa

SEQ ID NO: 154843 - DNA, 645 bp, Homo sapiens
gctactactactactactactaggttcgcggccggtcgactgaggcagacagctggttggcggggcgcggaatgagagattagaaccctctcgcggtcatcccagtcgttatggcgacgggatgtgcgctggatcagtggctcttgtctgaaaggccatgcgagtgaccatcagctctgtcagcactgatgcacacacacacacacgcacacacgcacacacacacatacacacacacacacacacacacacacacacacacacacacacacacacacacatacacctaaaatggcctaaagcagacatccatgtaattacagttgcaaaatgaaaacattttggaaagaacattgtatcatagttcattcatttgcagtggatctttgttcctttttactgtggtaattttaaaaatgagtgtcaagtttgaaattagatctgctaagttggggttttgctgcttgaactctgcactgggtcctcaaataaaccgatgtgaatgtagttttttccccctgtgtgaagaagcagttacaccccaacaataggaggaaaaatctagaactatttcaagttttatctttttgtatatgaaaataaaataataataaaacaaaaaaaaaaaaaaaaaatcgcggccgc

SEQ ID NO: 154844 - DNA, 478 bp, Homo sapiens; identical to SEQ ID NO: 135318
  misc_feature (1)...(478): n = a,t,c or g

SEQ ID NO: 154845 - DNA, 1002 bp, Homo sapiens; identical to SEQ ID NO: 135320

SEQ ID NO: 154846 - DNA, 600 bp, Homo sapiens
tggtggaattcggctgcgagagtgaccgcggctgctccagcgctcgactccgagcccatggcggccgaggagcttgaggcgctgaggagaccagaggctggccgagctgcaggcccaaacacgggggatcctggtgatgcggccccaacagggagccaaagcacagggcaagcagaaatgagaaacagtatcttagcccaagtttctggatccagtccggccccgggcccaggttaagtaaccttagccaccttgtaaagccctgaaaaaacctaaagccagtagacgaattacctttattacagatggcaagatatggacaacctaagtgagaaggtatcagaacaaggtttaatagaaatccttaaaaaagtaagccaacaaacaaaaaagacaacaacagtgaaattcaaccagaagaaaaagtaatggactctgatgaagatgaccgattattgaactacaagtgctcacagacttagaactttaaccggaaccaagtctaggacagaagttaagatctgattatttactttgtttattgtctatattgcctttttaaaaaaataaacttgttatgcaaaataaaaaaaaaaaaaa

SEQ ID NO: 154847 - DNA, 527 bp, Homo sapiens
tgttgctgaccttcacttttatttaaatatagtgatcttttaagagaataaacaaaaaatactttacacagcaaatattttacataaatgtaaacatgcatgtctacttcataattaagcaaaaaaaacttttaggcacaagattttaaaaataaagaatgagacaatgaaaccaagactggaataacagaagtaacaaaaactcacatttcctaactcttcaattggtcttgtcttccaacctattggttaaggcctgagtttcagaaatcctaccttccttgccaaatagaaacatccactttggctgtatataacattatccacataacacactaattctctttcaaaataatgtaataaatataccattcatacacacacacacacacacacacacacacacaccctgctgaaccagcctctcaaataggaaaataaggattttggaattttcaagttttcctacaaccaaagcacatacacacacattaacaccttacatagaaaaaatgattctgctacag

SEQ ID NO: 154848 - DNA, 398 bp, Homo sapiens
tttacataggaaaatacagtctttattggtcttctgaaacaacaaaccagaaatataattttgcctttaaaaatcttctgtctcaggctaaagataccaccattgacaatgccctcccctccccccagtccctttagaaaatccccagatctggtaccagcccacacgccaaaagaaggaagactgtggccatggccagggccgcctgggggtcccagtaaggcagcccatgccaggcgtcctctgtccacctgccaggactgacctcctcaaagggaaatcctcccagggccccagcccacctcacccacccactgccgcatgagcagggagggtcggagtgggggcacaggagctagggcctgccaactccctctgctcagacccttggcttcagg

SEQ ID NO: 154849 - DNA, 1295 bp, Homo sapiens
  misc_feature (1)...(1295): n = a,t,c or g
tttccctaggtataccatgccacatttatttatagtaacaaatgtattctagttttagtcctcacatagggtgccaagtaagatagggcaatccaagagacatagtcctaaccccagagtagcatgtaatcccttcttagcatccctctttgaaaactgaagatagtacagctgagggaactgaacaggttcccaggatcatagagaatcattaagctgaagcaaacaaagaaacaaacaaaaggcaaactagaagaaaagcaggattcaatgggttctgcaccttcttagtctatcattgctttggaaacattctccggttttacattactacagaatatggtccagatataaagttctactgtgtcataagacagctgattttcagaattacatgactgactagaaaaaaacaattttggatttaactggatacagtaatctgaggacaactgcagttgtcaaccttttcttcctttcattcaatgataaaagatacaaaaaagtgcaacagatgtttctagctatttgtggaatgaaggacatttaaataaattttttttttttttaaataatagacagattctcactctgtcacccaggctggactgcagtggcacaatctcggctcactgcaacactcttgccttccaggttcaagagattcttgtgcctcagcctcccgagcagctgggagtacagacccctgcccccatacccggctaatttttgtagcaaattactcatttgtctgtctactttttattataaagattgtggcaactctgcttaggactctggatttttctgccccaattaaggtaaaaaaagnnnnnnnnnngcaaccaccaccataatattacccaggaaaccagctgtgttctgtagaaggccggcctatcagattcaagttgcaagccttatacacagtaagtgtctcatgcacatatccatgaggattcacataagctgccatcggcccacataaggataaactaaaacaaagaatcaacatggagaacacgtcaaaacgagaagtctaattttattaaatgcttagaattttattgaagttcaccaagaaatgaggtatgagctatacagtttttaatccttcagttttatataataccaggatcttagtatgaaaatggggtgggggtacagctggcagacaggcctgttttgtctaaatgtctaaatgttttctgtgatgacccaaaggaaatagtacttgtttttaaaaccctcctcaagacagacattgtaaagaatataaaactcaaatgcttcta

SEQ ID NO: 154850 - DNA, 972 bp, Homo sapiens
aatcttaggaaataatctcatcatttccaaagatgtcttcatgtcccatcaatgacatgctaccagacatatcagattccacaggataatggcaccaagctacccaagtagatgtttctggtattctagactgccgttcatgcttgtttccctaaaggtatacttaaaaggtttcaaatacagtttcacttagaaactgcaaccctccaagtaaatgttatgtttacttaggtattaatgttatgtttacttaggtatgtatcagaggcaataatttccaaaggccagatcttagaatataaccaatttgttagataactaactttatctctatcacatctgtttacaaagcaaagtattactttgtcgtggacttatttcatcttcaagtgtctgggatcgtgggcaacagagcagatcgcggttaagccccaaaatttttgaggtgacatgtcttttttggtggcccgttaaacttcccatcccaatatgggcttggcaccagattcttaccactggggcaaccaggtccaggcatacccaggaaaccagctgtgttctgtagaaggcccggcctatccagattcaagttgcaagccttatacacagtaagtgtctcatgcacatatccatgaggatacacataagctgccatcggcccacataaggataaactgaatatttcatttttggttgttatttctgtttcttgacattgtttacagcaaagggaagtacatttattcataatgtctaattcacagcgaagtcgctggatagcactgccaattttaaggagctgaattctcaatacatcatcaataggaagacaagcagctactctgtaagaaaaatcttcaagacatggtttttcaagttttaaacttaggagtcagataagcatcagagaacttacaaatcggataatatccttttgaaataaacccttctctttaaggttacacattttat

SEQ ID NO: 154851 - DNA, 3555 bp, Homo sapiens; identical to SEQ ID NO: 154017

SEQ ID NO: 154852 - DNA, 1022 bp, Homo sapiens
agggattgagccttgacggctgtggaattcggcacgagggccatcttagcggctgctgttggttgggggccgtcccgctcctaaggcaggaagatggtggccgcaaagaagacggtgagtgaggcgggccaggcccggaagacgattcacgtggagagatgtcttggccagggcgggcagatgtgagcccacgggggtgacagcatgcctgctggcatttggagggccccagaaggaatcccagtggccctctcaatgacttggggtcctcgacttcggaagtttaaggggctcggcttcaaaaagctgggtccggttttgaggcggttgcaggcgaggcccttaggtccgtatttaatgtttgctttgtagaaaaagtcgctggagtcgatcaactctaggctccaactcgttatgaaaagtgggaagtacgtcctggggtacaagcagactctgaagatgatcagacaaggcaaagcgaaattggtcattctcgctaacaactggccagctttgaggtaatcgaagagactgaacgtgcttcgcctaccgcgaattcatcgtgaacgaatatacaggagtgtaaacttgtaatctgagtaccatgaactcgaacactttgcaggataattacggtagcgattgtggtgtttggcccttcattcccgtctccccgacccacccccaaatcgtgtgctccccttctgtgagcttatttttggaggagaaatgtgtgtgtgtggcaagagtgaaaacagaacatcgaggtttaatggaaacacagacacattactgttttttccatgtattttgtgtcctgcttttttggttcttttagctttgaggtgctttaatgatgcttcattgtgtgaacttgttttagtgtcaaaaaactaggtaagaaaagttgaggctgggctatggagttgcaggctatcatagaatcacctagtttagcccgctaaatcagttctgagtcaagatttatgcttgactcactgttttgaaattgaacttagggg

SEQ ID NO: 154853 - DNA, 659 bp, Homo sapiens
  misc_feature (1)...(659): n = a,t,c or g
gctctgaggaattcggcacgagtaccgaccgaggtttacgcagcgcggggagctttgcgggttgccatttgtaactccggatcctaaaattcctgtcctgttctctgtctcttctaggttgggggccgtccccgctccctaaggcagggaagatgggtggcccgcaaagaagacgaaaaaagtcgctgggagtcgatcaactcctaggctcccaactcgttatgaaaagtgggaagtaccgnccctggggtacaagcgagactctgaagatgatcagacaaaggcaaagcgaaattggtcattctcgctaacaactgcccagctttgaggaaatctgaaatagagtactatgctatgttggaaaaaaactggtgtccatcactacagtggcaataatattgaactgggcacagccatgcggaaaatactaccagagtgtgcacactgggctatcattgattcaggtggactctgaccattcatttagaaggcatgcccagaacagacttggtgaaaagttaaacctttttcacctacaaaaatttcaccctgcaaaccttaaaccctgcaaaattttcctttaataaaaattgcgtgtgtttaaaccagcaaagaagaataagaagatttggcccccagtagggggtttataaagcgag

SEQ ID NO: 154854 - DNA, 1723 bp, Homo sapiens
ttttttttttgaaagggaaacaaaatggtgctttattttattttatttattttaaaaaggcgctacagtggcaggacgctgctggggatggggacacacagtgtaagtggtagattttccaagacttcccctccctattgtcctccgagttcctctcttcctggtcctatcagtagcataggattcaacaaaagccttcatggaatgcctctttatttctgaaaaggcaacttctacccctccctttcccatttccaagacttggaaatccttcataagctatctcacttccatgtttgaaccagggaccactggattgtaagtctgaaaatctggggtgtcctaccccataaccagggccaaggatattctgcccccaatggctaaagtctctggaatatttgcctttctggtaccattcaatatatttgggggatatatacatctatatacatctttctatatatatattatctctgtttctttcttcttagataaacctttcatatatgtcatatcctaatttcccaagcctccccacttcttgtttgcgagcctaagcaagactcaagagtttcatgaattcaactgggtcccctcagcatcaattctttcctcatcctcctcacccccgggtatcttcccccccatcagttgtttcgccccgtccttctgaaaatctcccccctttttaacacctgtgccctaccgaaatctcccctttttaacaactgtgccctaacaactctgctgatattcccaagtcccacagttgggtatgggggccccatttcctcacccagaccctggctgccttcctaaagctcggccctattgccctaaaagaggatttccaggtccagaggagacagactatagtcctaaagaaccatttagagttaaggtagggggtagttgttcccctgtagggggcttgtgggagaagatgccagatcgcattaataggacagtgtgatttaaagtgcaacttaaagcaaagcctgggtaataatggaggagattccaaaagggtaagtcagaaaatgttttcttctcactgtttcatccaagagtctagaggcttgagtctgggggcttagaatagacagcaggggaatgggaagaaagcatagcatggccaaatcaaccagatggaggttaacttgccaatggataggaaggtatagacacacacacacacacacacacacacacacacacacacacacacacacagcagtacatcttgtccctacacactgaaaagaaataaggtaaagtcctaatgttgaaataaagttgaagaaacgccagaaagctggcctcttggcccttctgttcccctgtttccagatttttccaagtttttgtggttccttgtttttatgcccaactagaaggtaatggtggggtttactgtagatggacaccgaagggtctttgttttcaagatatcgttagttgagttcgaggagagatcaatataacaagaccttgtgcaattatagttggtggtgatcatgggtctagcctcaaaattttgtgtttctctgcaaggctctgtacatagatgcatgtatatattctgtagcttgtaacaattggctgagaccaccttaaactgcaacttgacttatagtgggactatgcagtaccactatgtgaggcttccttggtaccaaagtgagaccagaaagcactctagggatttggggctttggcc

SEQ ID NO: 154855 - DNA, 1410 bp, Homo sapiens
tttcattttttaaaacttttattattagtttttattacacaagtaatacatgttcattgtagaaaaattagaaaacacagaaaagcaaaaagaaaaaataatcacccataatcccactacccataactactattaacattttagtgtatgtccttctagctttcttatgcatatatatacatacatagatatatttatatataattttcttttttacaaatattgtgtcatactatacatactgttttataacatgtgtttttcatttaatatatattgtgaacatcattgtttattccctgaaaaattttacagacactacatgctcattgtggaaaattagaagttacagatatgcaaaaagaaaatataattgctccaaatctcacctcccagagataaatgcttttacactttggcaagtatcctttcagactctttaatgcacacatgcatacatatatttttaaaaagggatcgtactataaatattcctctataacttcctttttcatctaacaatatagctcgtacatttcaataaatacacatatggtgcttattcttaactggtacacagtattccattgaaaggatgtaccatatttaaccaaccctataaagtaggcttatttacatttttctgcttatccaaataatgctgctataaacatcctttcttgcatatactttttgaataatgaataaatacatcttagctcattttattttctgacccatttaaaggagaatttccctaaagtggaattactaggcatgcaggaaaactatattaccaaaatattttttcagaaaggtggaatcaatttacattcctgttgactctgtaagaggtttatttctgtacttcctttttgtccctgggaattttaattctttataccgtttgcctttctgacatataaaaaggaatatctcatattaacttgcattttttattactagtaaattaaaacactrttrtcatatttattattagtaggttattttagtttattgtgcattgccagtttgtgttcttggtccaattttctgttggaaagtttgattctccttgaattataaaatgtcatttattcattcattattcactcattcaataagtatgttttcagcatttgctttgtgtagcactgtgttaggtgttatggatacaccaataagcaaaatagacatggttgctgccttcttatacttccaatttaatagggataaacaggcaattaaacaagcaataatgaaaacgttcaataaggaaagaatgaaatggaaccccttggttgagaaggggattgtagatcatggaaatgtcccaaaagtagtcatgtttaagctcttaatatgtatttgagatctatcctttttgtagcatatattgttttctcaatt

SEQ ID NO: 154856 - DNA, 2024 bp, Homo sapiens
tttttttttttttttttttgtatgtgtgtcatttcaaacaaaaatagccctgaagcaaccctagttttcctgtggaacagttaatgcgtgccaaagtactgatgtggtagctctcccaaaattccctcatgttattcatgaaccttaaaaccttggaaaagaaagattgtaaacagatgcaccattggggtctacagtccccacctactgatttctttttctgataccagttgcagacaataatttatatggcttgctatgactaaatgtttctgaaggaaatatttgggtaaaactttgccatgaactgcaacatgggcctctgaattcctctcctttcctaattttattgtcacattctgagaaaataaacagggcatctattatgctaaagagaaagtataaactcataaacaactacattctatctgcctttaaccccccaccaggcaaaatacacacacacacacacatacacacacacacacacacacacacacacacagaatctcaaaaagtaaagtctacctgagaaataacatgaatcttcccccaacagtacacaaatctttgccagagagaagaacactgctattttctttcacattcagagtgagaattttcttgccccaacttgctttcctttcattttaatttgacagttcctcaagctaatccaccatggcccccacataaacaagaagagttcttgatgctgtgaagtgagagaaaaataacatgagtcattttctgttgcctccacatctgatagaattggaggagcctttactttgggatatgaatacaatcaatcttttctagcctggaaaaggaagtatcctaagaaaggctaaactctcagagaaggggcagatggtgagttattccccaaatgatatctctgaaatccttaaataatcagccttgtctttaggaagttatatagtgaaatgagcttgttcaaggaaggctttaacagtactgtgaaggaggtcatcccctccagattatcagaataaattatgaaacttcaccctgaaccagtgactaagccaaatagataaagcatccccctgtctccttgtattttttagagcattctccatggctagatactcaaagtgaaaaatgctaatggcaaaacttctaaaaaacagacaccagcaaaaatttaaggaagatatgcctcaaaacacgtctcaaaagcggctctcagtctctcagctcagcacccagcaagactgcatgcaactgcccagagagtgggctctattatttgtctggccctgtacagttcaccttctccaatttcacatcataatttaaaatctcagtggtaacccaatttggactctcatttcgaaagctgggatgctttttgtctactgaacagtagtccgaaacagaggtgttgcttttctacataagaaaaacaaaaattgagcccaatcttttgtcatcaagattgcctctgtatgaggcaaaagttaaagagaaaagagaagctgagagagcctgaacttgagcaaaatatttgtgaattttctaggatttggggtatgccaccttaatccggattcctttccgggagtggatccaaaatacttttaagaaaatcatgtatagcattttgtccagatacactgcaagtgattgttgcttggagatctatgaaaaataacatttgagaaaattttacttgccaagtagtcactaatacagagtacttataatagtggcttgtcatcacaaacacctgggattttttaggggctgtaaatgacagaatactgtgactttggcattctggcctcaggattcattatcaagggtttcattttcattcagaaacatttctccgtgggaatcccactcacacgtatttttgttggcacttgggcctattaaaggtgtggtctagcatttgcttttcactcatcttaagattattttcccatgtacaaatgctggtcctggcatgaacagggtaccacttaaaaatcattatcccttcagatgctccc

SEQ ID NO: 154857 - DNA, 963 bp, Homo sapiens
aaccaactagaaagagaaccaaaataggactgactctcaaagcacattgctagcatccaccaaaaagcaaagtggtagagaagcagtgagtgggattaggggtgagagaagatggagaacattaggacaggcaagataggcaatggttagatggaagctaaaaaataagaaaaggaagcagctatggtctcaggggaaagagaactgagagaggagtctcgaagtcctggattcttgctgtctacctaccagctaggtttccttataatttagtaaaacctacttaacctccagagaccctcagtttccttccttttgtaatgtgacctccacaggacccagttatagagaagaaataaaatagttaagtgaaaatacttcgtaaaccatatagttctaatgaaagtgtcaagaatgagaagaatggagaagttagaaaaaggaagagtggggaagataacctgtcaaggataaataagtgatagataccattcagcttccattaaaagccacgcaagcagcatctgaagttgggtttttttaaaaagaagagaaaaaggcaatcatgcatactggccgggttcaacttagatacacgagctattgggccaccgaggaaaacggtgtggtagtaagcatcttgctactaccgcaagctggtggcatccatgagctatgggactggaaaaatttcacactgaggccaatttttctaactataaagttaaaaaggtctatatcctctcccttatttcagagggattgtgtggaaaattaccaataagaagagtcttgaatttattgcaaatattttcttcaacaaaatcagactctttaatgtgttaacggtctggttttgggccaggcacagttgctcaggcctgtaatcccagcactttgagaggctgaggctggcagattgcttgagcccaggagttcaagatcagcctgggcgaacatgca

SEQ ID NO: 154858 - DNA, 1241 bp, Homo sapiens
  misc_feature (1)...(1241): n = a,t,c or g
ttttattatttatagtaaactttattttccattgatatttcacttaacataatttcaaagtcagtctgtggtctaagatgagcaaaagaacagatattgtaaaatctcctaaaagactttttttcaccactgttcctcagagcagggaatggggtttccagagccctgaaaggctgacaccctaacatttttacccttgaggatttacctacaggatacagaaaggaaaaggacaaccatcaatatacaaggaatcaagctcttatggaggggtcttatttaagcttcttgtgtttacatacttcgccaccttcntgtagggtttgttaattcatggactggattttcccacctcttctggccaaggtttgggtgtcctttttttttaggggtaaaatgttcaggatggccaaaaatgctggcacttaattctccttaattattattggaaaaattaagtgggaaggatgcaagatttttaattcttccatccagtcttaagctggaaacatgaacttctgctaaatgggggtctggttgaacatactaactccaacttttggcgaccaatcagcaaaactgggcaccttgcaatttaaacctgcaaggcatgaattttcccagagtggtagaacctcattccccataatgcccagcccaaggttaccagatgtagcttaggaaaacccaaacggttccttggatccttgagacagctggtaagccacccaggccggcttagactgccaaagagcagccctgccagccagggtacggcacgctgcctgcttttacatacccaatgaatcccaccagaagcaaccagtgctccgttagccaaagccaaaccaatgcaaaggcactactgagccagtgtcctgcatttttctcttctctgtccagacaggagactaccccagggcctgcacctgcagaaaacaagcggtctcacgaaggccccggctgtctacaagggcgcgcaagccgcaggaatgactgcgaggtgtcgccgtaaatgcagcggcgggcgctctctagtcccggtggcggggcgaggagaggggagcggctctgttgtgcctgcccagtgtaccgggagaggggcggtcagagaatggggacggtgcgggcggggcttgagccgccaagtagcagcatgcgccctgcattcagcgggtggagagtggggcggggcatcgcggcgagctcctgagtccagggaacgcggcggggaatctctg

SEQ ID NO: 154859 - DNA, 922 bp, Homo sapiens
acgtttggaccttcctagtaacttgccaggacttatcctcacatctgaacattgtaatgaaggtgtacagcttcctctgtcatctctgtcccaggatagcaaacttgtgtatattcagctgttatgggataatatcaaccttcatcaggaaccaagagaacctctgtatgtctcatggaggaattttaattctgaaaagaaatcatctctcctgtcagaggaacaacaagaaacaagcactttagtagaaaccatcaggcagagtattcagcacaataatgttcttaaacccatcaacctactttcacagcaaatgaagccaggcatgaaaagacaaaggagtttatacagagaaatcctcttcttatcattagtgtctctaggaagagagaatattgatattgaggcatttgacaatgaatatggaattgcatacaatagtctgtcttcagagattcttgaaaggttgcagaaaattgatgctccaccaagtgccagtgtcgagtggtgcaggaagtgttttggagcgcctctcatttaaatagagattcactagaatgttgacacacaaggcttggggattagatttcatctggaaacattcaagttttttttttccaaatcggtaagaactggtgaatacgggaattgaagtaactcttggggacaatatataatgaattatgattcatattgcattaccttgaaatatgaagtgccatttgaatgtcccagggcttattaatattgaagattttcaacccctgaactgcttttctgcctctgtggaaaactactttgggattcttcagtatttgtagtagtttgatagaaataatgaggaaccatattcattctaggcattgtttatatttgaagttactgagtttgaggaatggcaaattaaatttgcctaaccccc

SEQ ID NO: 154860 - DNA, 1130 bp, Homo sapiens
agcttctaaagaaagtgataccaagtgtcactagaatcagccttacgtcttttttttctctgtacatcagtgcatttcttaagttttcctgtcatctttaacaactgagtcatgaagctcacttttagtgtttcatttgtaacattttaatgctcacaaaccaaataaaggtgaactgtcctttgctattgggttaaatagtaaagagaccacaccaccttttacatttgttttgtgtcacgggttttagacccctaacttactgagatgataaatctgttactttgtcaagtgacaaaagatgagagaagactctgcttttgtaaattttatttagaaattagagttaaaacagttatgtattgttgaaatgtaataaagttaagccatttttgttactagtgtgaagctttatgcccattaactatgtttttaactttaatttggaatagaaacctgcaggaagttacaaaaatagtacagaattcaatgtagccttcacacagcttcctccaaatgtgacacctcatataactaactgtaatgtaatattaaaaccaggacattgacatagttatattactattaactagatgacagaacttaartgtcttcaccaattaaaaaaaaatgcatctgtgtttttatgcctatttgccccattgactttttaaaacatattttgttttataggagtttatacagagaaatcctcttcttatcattagtgtctctaggaagagagaatattgatattggtaagttggttaataaaagattatgaaaggaagttttacattttattttcaaaagtaatttttaaaaatgtagctggtatgtataaaagatttaaaagatttctacttctaaatatatagttcaaatacatataatttgactcaataccaatttgaaatgaacggctgttgtctttcttaacaaattacaacttcatttttgaaaatttctttcagaggcatttgacaatgaatatggaattgcatacaatagtctgtcttcagagattcttgaaaggttgcagaaaattgatgctccaccaagtgccagtgtcgagtggtgcaggaagtgttttggagcgcctctcatttaaatagagattcactagaatg

SEQ ID NO: 154861 - DNA, 1222 bp, Homo sapiens
cagaggctgaaatctagaacttcatcccgggcaatgaggttctcacagaaggtgcagttttataactaactacgtccacttatatatattcacactctacatatatatatatatatatatatatatatatatatatatatacacacaaatgcacagtccccctgctcactccgttacctaactgtacgtcttttcatgtttataaactatacagaaaactgtatttgctgaactaaggattgtattggtgatttctagcaaaacacacagtgatagaatttttgtctagaatcccaaactgggcaacgatagtctccaagggacctgggccttgccaagggcctgggggcaaggtgtcggcgggacggtgaggaagggggaggcagcaaggagtcactttgggggaccaatattcttaggatatttaggagcatcaccttgtttttatatggcaacacaagcctgtctgccaccctggagcgccctgtcacccctgctgtcgtagctgttggcttcagggtgagaagtgagaagcagcttattgtatatgagggagccaggccccgagggtgagcgagatggagaaggggaaggaaggggctttgggatctggaaaccagcaggccaggcagcatccacagtgttagtccaaagggtcggaccgtttcgtcagccctagcgtttggtcattgacggcctgaacgggccaaggagactccgggcttaaccccaggcctcccccacggttcaactgctaaatttttccttgagggctgtttggtgttttgaacccagcaagggcccctttgtaggacagcaagagggaggccgtcgcggggccttagcagaaggggaaccaatgcagggcatttccatgaaacccatctccaggcacttcctgccatcacggaaaaccctggccctcccagccgtacctggggatgctcagggtgcaggcagaggctcgggaggccggactcaggggtcagaagcagggactggggcaggcgagcccggacagggaagaggggctccgatcaaagccggccgtgctgctggccgggggccgaggtgggtacaagctcgctttgtgctttgcacaaacctgaatcccccaccagagaggatgtgtgtgaggagccagaaacgctgaatccaattaagagagaaaaataataataacaataaatgatcttggacaagaaaaaaaaaaaaaaaaaaa

SEQ ID NO: 154862 - DNA, 1020 bp, Homo sapiens
ccaaaaagggaaaccctctttcataggcatttctctcactggagacccactctcttggtcattcctttatgactgagagtctcagaagaagttgtgagtgtgaggtaaaagagccaagcaagcattttggaatgatggggataaaatgttgcagtggcttccctctctggggcccatacctggaagaagcaatcccaggtttgcttcgtatctgcaggtctagagacatcaatggaggcagcaattggagatctcagtgtgtttccagggtctctgactcaactagagggcatccaaggcctggtggagcctgtgcaggcctgagcttcctcgtggagcagcaggtaggcagctcattcccagggacctggtcatccttcctaccataggagccacctgccaaagcccacccagaggaatcccgagcgttcacaaatggaggcgccctcaccaaagccactggaccagcctgtccctgagaagagacacagaggggcttcagcaatgagaagaagaaaaccaatttcttttggctttttagcagagatgctccatgtcttggctgtcagagaaattgagcttacaaattgccctcaccctgaacccaacttggcaacggggaagatgacctggttgaggtctagttctggcttttgtgaatcgaaccgtgtgacgtagaacagcacagcatcaggccaggaaggcgcctgatgagaccgtgttctcagcctgagagcgcgctcaagggcaggtgggagatggagccttctcagagctcagccactggctcttgggctcccaggttcatccctcaaggagctggggacctgagggctcagggcccacctctggctgcctgggggaagtgctgccagtctggtgtggaaagggtccaagtcagaggcctttgcctccccccttcctccagcagggccaataagagaagtaatggctcaaaagaacgttgccccagcgctttcaagtaggtgagtggaccaaacccctgcatgcttttcaggc

SEQ ID NO: 154863 - DNA, 427 bp, Homo sapiens
agtacctttatgatttcatttccttctttatccatctggtattcattttgacaaatggtgtgagctgggaaataacgtgtattatttatttatttatttcccggatggttactcaattctttcatcactgttaaaaagcacgtatttgtgtgtgtgtgtgtgtgtgtgtgtgtgtgtgtgtgtaactattcctaaagtgaacatcttgaacagctggacactgaaggtaacgcagctctagactttgggtcatcattagaaataccagcttaacaggcagaaatatcagcttaacaggcagatgtgggcactttctaacagatgtgagcttttgaattcaaacggattgacattttgacattcaaatccagctttgcaggctcactgctgggtgccaactttgaggcaaaccaatggttcccccctg

SEQ ID NO: 154864 - DNA, 1849 bp, Homo sapiens
gcaaccgcattcttttttttttttttttttttttgatgtaacatttgttattttattggaaaaagctggtattaacatatttatagttttattcaacaattgttttaatttgtgagacatcatagttttaaaagtatgcacctatgagttacagagtccaaactgatctgtgctgacaaacttgaccaccatgtatcccacaccaccacccccaccaccaccaccaccaacagctttgttcctaagagaagagcttaatttaaaaccaaacccaaaaaacccccaacaacttcacaatgactatgtgaacgcccgtacattcgagagtaccaggaaatgtaagcagagccaggatgcaagtctgtgactattacactggtccttccaccgtttctgggttttggtccctcccctcgacaaccttttcttaacacacatttggtctttcacaatttggcctttggacatcattaattttccagggatccagagacatacttttcttcaaagaagatcttttcctttcttttttcttctttttggtttggtacccaaagtttaaaacagaagtaaggaactaggaactgtattaagacctccttttgaaggacatgtaagatttgtactttgaagatggtaaatgttaaatctatgatgtgacagtaacctctagctgcaaatacaagtttcttctcttaacatttgactcacaaagggagatggatcgtagcaaatatccaagtaatgggtaaggccctcagagctgggttttggctttaacacgctatctatacaattgaccacattctcgaacctctttacaagggggaaaaaagtaatccaatcctttgattgttaaatttaattagaatagatatgtacatataatactgtccaggtcaactggattttatagtgatatataaacaaacattcttcattcacgttgattaaaaaaaaaatcaatgatccatttccctgtgtaaatgttatatggccagaagtgagtacacatgcactttgtgcttttacacacacaaaagtatactgtaatccactgagaataacctcagctgggtctgtttcctgggttatgttatatcttgtaaaaaacaaaacaaaacaaaaccaaaaaaaaaagtttggatttggctgggtctctgctccccactttctgaatcaaaatgccaaactacgtggctctgctgcaagtccatgagcaaagacgactcagaggggtgggcaggtttggtatcaccagaacaggagcatctaccatggaaacaccaccttctctgtggccctcaatgtcaagaggggcaagagttcccgagggatgtgccctctgggactgtgtggtccttaaaagtaaaggtatcctaaaatggtcagaacatgcaatttcctttcaaaggcagttcaagtgcattggctcaaggagggtgcaagccccaggatgaagtggagtcctggggagggccgcactcctgaagccaccaagcagagcgaggagctccggggggtcttctctgtcttccatcctgcgtctcagttctcccggacccttgtcgtcgccaagtctgccatgtcctacttcacaagacagaggcattcctttccaaaccttccatttgaatgtcgctctaacatgagccgcccacgagatggactggagagaaccttgtgtgaagacccggacgggttcctgacaccactgcacggcacctgccatgggtgacctgtgcatccgctcagagcctcagcttcttctcgtggacagaggggatcctaagggttcccgcatatccccagcatccagcccagagcctggcacgcttcgagaagttcc

SEQ ID NO: 154865 - DNA, 518 bp, Homo sapiens
  misc_feature (1)...(518): n = a,t,c or g
ntatacccgtaccactccctgacacgcatagagaaggtattgatgtccttatccagctggtccaggaggctaatggactggatgatcatattgtccacccggttcacattaaacttaactttggcacgggaatagctgtgtcccagccccagctgtgctttacaagctgacagatcggtcagacccttcaccagattgtggaagtgcagacgaactcctcgcaggatctcagctatgactcctccagtctggcagttgtaccctaactcctcctgtattgcggcaccaatcttgggatccccaactcccaagagtactttcttctttttggacggcaggtgggtctccaagagcagactgatctcctccacttccttcagcgccagcagcgcgtagccgaccgcgtgctcaaacagcacgtgcaacagcaccatggcgccatctgccgggttcgcggacgcgtgggtcgacccggggttccggcgcagggccctcaagtnttctattnnggggcagcg

SEQ ID NO: 154866 - DNA, 975 bp, Homo sapiens
ctaatcttcctgggatgctttatggaactttttcttcttcttggagctgctcttgccagccgcctcttcaggcccactgctgaccagctcctctttggagaatttcctcgttttcttggagccacttctgtggcctgactcttcggtgtcattaactgtttcctccttgggtgaagacttcttcctcttgggaagactggtgctgccagcggtctcttcaagatcgctactcatcaactcctccttggaaaaagatttctttttcttgggtttggagaaagagatagatgggtcttccattccattctcctgatgaatctcctggggcttttgctttttcttctttttgggtttttcaatcgtctcctcacacgctctgtcgcccagtcctttttgtccaaaactgacaccgctttgagagcgaccagcggctttttccatctctgaaaataattttctcaactgtgtattttgaaagtctcggagtttcgccagaagcgtctttcgttcggaaaaaattctaaacattccttctttagagaaagctgagatcacagcgctcccatgactaatgattggacccacttttgccgcccaaccaagattcacatgggtgacgggttcaatcgtactccagacatcagcaacacgcaatacacccttgtcccaaacctgcactgtactccctgaatctgcggctgcggcagcaaaggcggaggaggagcgaagtggacgagcacccgaggctgccagaggatctgggcagcctgggtgcccatctctgctgcgtttcctcggtgtccacgataggtgagagggctcattccctgtaggagaagtgagctgaaaacactttccccgcaagatctccctcgttttactcaaggtagtcgcggcgttgagaacgcctcgcagctcctttactggctggggtactgcgatccactcaccttttactttgcgtctattttccat

SEQ ID NO: 154867 - DNA, 5070 bp, Homo sapiens
  misc_feature (1)...(5070): n = a,t,c or g
atggggtttcaccatgttggccacgctggtctcgaacacctgacctcaggtgacaggctgggaaggagatcctcaagcaagcgggctctcaaagccgaggggaccccaggcaggcgcggagctcagcgaagccagaaggagcgcgccgggggcagcccaagcccggggtctccccggaggaagcaaacagggcgcaggagacacagagaagagctgggggagcaggagcggggcgaggcagagaggacctgcgagggcaggagaaagcgcgacgagagggcctccttccaggagcggacagcagccccaaagagggaaaaggagattccgaggagggaggagaagtcgaagcggcagaagaaacccaggtcatcctccttggcctccagtgcctctggtggggagtccctgtccgaggaggaactggcccagatcctggagcaggtggaagaaaaaaagaagctcattgccaccatgcggagcaagccctggcccatggcgaagaagctgacagagctcagggaggcccaggaatttgtggagaagtatgaaggtgccttgggaaaggggaaaggcaagcaactatatgcctacaagatgctgatggccaagaaatgggtcaaatttaagagagactttgataatttcaagactcaatgtatcccctgggaaatgaagatcaaggacattgaaagtcactttggttcttcagtggcatcgtatttcatctttctccgatggatgtatggagttaaccttgtcctttttggcttaatatttggtctagtcataatcccagaggatgtctacgtgatccctgaggaaccctcagttatgctgcaggagctggctggcaaggccccactggatgacaagtttatgtacttctcttccaacactggatcctacggtctaggttttgaccaaggctacaattatcttgaggctgaactgaagaagatccgcttccaagctcactcacatggctactggcagatctcagaagatacaatttcaagcttactcacgtggcttctggcaggcctcagaaaatctgcttccaaccttacttatgtggctgttcccaaggttcagggctatatcaagtactctgcactcttctatggctactacaacaaccagaggaccatcgggtggctgaggtaccggctgcctatggcttactttatggtgggggtcagcgtgttcggctacagcctgattattgtcattcgatcgatggccagcaatacccaaggaagcacaggcgaaggggagagtgacaacttcacattcagcttcaagatgttcaccagctgggactacctgatcgggaattcagagacagctgataacaaatatgcatccatcaccaccagcttcaaggaatcaatagtggatgaacaagagagtaacaaagaagaaaatatccatctgacaagatttcttcgtgtcctggccaactttctcatcatctgctgtttgtgtggaagtgggtacctcatttactttgtggttaagcgatctcagcaattctccaaaatgcagaatgtcagctggtatgaaaggaatgaggtagagatcgtgatgtccctgcttggaatgttttgtccccctctgtttgaaaccatcgctgccctggagaattaccacccacgcactggactgaagtggcagctgggacgcatctttgcactcttcctggggaacctctacacatttctcttggccctgatggatgacgtccacctcaagcttgctaatgaagagacaataaagaacatcactcactggactctgtttaactattacaactcttctggttggaacgagagtgtcccccgaccacccctgcaccctgcagatgtgccccggggttcttgctgggagacagctgtgggcattgaattcatgaggctgacggtgtctgacatgctggtaacgtacatcaccatcctgctgggggacttcctacgggcttgttttgtgcggttcatgaactactgctggtgctgggacttggaggctggatttccttcatatgctgagtttgatattagtggaaatgtgctgggtttgatcttcaaccaaggaatgatctggatgggctccttctatgctccaggcctggtgggcattaatgtgctgcgcctgctgacctccatgtacttccagtgctgggcggtgatgagcagcaacgtaccccatgaacgcgtgttcaaagcctcccgatccaacaacttctacatgggcctcctgctgctggtgctcttcctcagcctcctgccggtggcctacaccatcatgtccctcccaccctcctttgactgcgggccgttcagtgggaaaaacagaatgtacgatgtcctccaagagaccattgaaaacgatttcccaaccttcctgggcaagatctttgctttcctcgccaatccaggcctgatcatcccagccatcctgctgatgttcttggccatttactacctgaactcagtttccaaaagcctttcccgagctaatgcccagctgaggaagaaaatccaagtgctccgtgaagttgagaagagtcacaaatctgtaaaaggcaaagccacagccagagattcagaggacacacctaaaagcagctccaaaaatgccacccagctccaactcaccaaggaagagaccactcctccctctgccagccaaagccaggccatggacaagaaggcgcagggccctgggacctccaattctgccagcaggaccacactgcctgcctctggacaccttcctatatctcggccccctggaatcggaccagattctggccacgccccatctcagactcatccgtggagacagagcctgggcctgggcctgggcctgggcctgggcctgggcctgcgcctgcgcctgccctgggaacgggttccggcagacgctgaggttgcgttgacgctcgcgccccggctcccgttccaggtgctgttgcacgtgctgtttgagcacgcggtcggctacgcgctgctggcgctgaaggaagtggaggagatcagtctgctgcagcccgcagcatgcacagcgcgctcccacgtggccggccgaccggtggaggagtccgtgctcaacctggggcaaattccacagcatcgttcgtctggtggccttttgtccctttgcctcatcccaggttgccttgggaaaatgccaacgccgtgtctgaaaggggttgttcatgaggacctccgcctgctcttggaagacccacctgccgtccaaaaagaagaaaagtactcttgggagttgggggatnccaagattggtgccgcaatacaggaaggagttagggtacaacttgccagactggaaggaatcatagctgagattcctgcgaggagttcgtctgcactttccacaaatctgggttgaaagggtctgaaccgattctgtcagctttgtaaagcacagctggggcttgggacacagctattccccgtgccaaaagttaagtttaatgtgaacccgggtggacaatatgatcatccagtccattagcctccctggaccaagctggataaaggacatcaataccttctctaatgccgtgtcagggagtggtacggggtaatcactttccggagcttggttgaagatcatcaaccgacaatgccacatactgccgtcttgcccagttttattggaaaccgaaggagacttgaatgaggacaagctggagaagctggaggagctgacaatggatggggcccaaggctaaggctattctggatgcctcacggtcctccatgggcatggacatatctgccattgacttgataaacatcgaggagcttctccagtcgtgtggtgtctttatctgaataccggccagagcctacacacttacctgcggctncaagatgagccaagtagcccccagcctgtcagccctaattggggaagcggtaggtgcacgtctcatcgcacatgctggtaagcctcaccaacctgggccaagtatccagcattccacagtgcaagatcttgggggctgaaaaaggccctgttcagagccctgaagacaaggggtaacaccccaaaattatgggactccattttcccactccacccttcattgggccgagcagctgcccaagaactaaaggcccgcatctccccgataccctggcaaacaaatgcagtattgccctcacgaatccgattgcttctctggctttgtcacccacacacatccagaggtgcccacgaagtgtattcggggagaagcttcgagaacaagtttgaaaagagcctggtccttctatgagactggagagataccacggaaagaatctggatgtcatgaaggaagcaatggttcaggcagaggcagaggaagcggctgctgaggattactagggaagctgggaggaaacagggagnaagaaacgctttaaaggaagggaaaaagaaacgggctgggctgcactttgcccctcggntttttcagaaaaccagccagtagttacttccagaggagttgttgaggaagacgagttgaaaaaccccaaaaaggaaggaaaaagccaaaagccccccaggaggtttccttcagggagaatgggaattgggaagaccccattctatcttcttttctcccaaaaccccaaggaaaaagaaatctttttcccaaggaggagttgatgagttagcgatccttgaagagacccgctggcagcacccagttattcccaagaggaagaagtctacacccaaggaggaaacagttaattgaccctgagggagccangcaacagaagtggctccaagaaaaaggaggaaattctccaaagaggagccggtcagcagtgggcctgaagaggcggttggcaagagcagctccaagaagaagaaaaagttccataaagcatcccaggaagattagaatgccaatggacattctctgggaagttgggcataccatagcccaaggtgacatttcccaccctgtgcccgtgttcccaataaaaacaaattcacaagaaaaaaaaaaaaaaaaaaaaaattcctgaggccgcaagggaattc

SEQ ID NO: 154868 - DNA, 557 bp, Homo sapiens
  misc_feature (1)...(557): n = a,t,c or g
cacagactcagagagaacccaccatggtgctgtctcctgccgacaagaccaacgtcaaggccgcctggggtaaggtcggcgcgcacgctggcgagtatggtgcggaggccctggagaggatgttcctgtccttccccaccaccaagacctacttcccgcacttcgacctgagccacggctctgcccaggttaagggccacggcaagaaggtggccgacgcgctgaccaacgccgtggcgcacgtggacgacatgcccaacgcgctgtccgccctgagcgacctgcacgcgcacaagcttcgggtggacccggtcaacttcaagctcctaagccactgcctgctggtgaccctggccgcccacctccccgccgagttcacccctgcggtgcacgcctccctggacaagttcctggcttctgtgagcaccgtgctgacctccaaataccgttaagctggagcctcggtggccatgcttcttgccccttgggcctccccccagcccctcctccccttcctgcacccgtacccncgtggtctttgaataaagctgatgggc

SEQ ID NO: 154869 - DNA, 669 bp, Homo sapiens
  misc_feature (1)...(669): n = a,t,c or g
atcgagaccatattccatgtggnggaattccacagactcagagagaacccacccatggttgctgtctcctgccgacaaagaccaacgtcaaggcccgcctgggggtaaggtcggcgcgcacgctggcgagtatggtgcggaggccctggagaggatgttcctgtccttccccaccaccaaagacttacttcccgcacttcgaccctgagccacgggttttgcccaggttaaagggccacggcaaagaaggtggccgaacgcgctgaccaaagccgtggcgcacgtgggacgacatgcccaaacggcgctgtccgccctgaagcgacctgcacgcgcacaagctttcgggtgggacccggttcaactttcaagctcctaaagccacttgccttgcttgggtgaaccttgggccgcccaccttccccggccgagtttcaacccctggcggttgcaacgtcttccctggggacaaagtttcctgggctttctgttgaagcaccgttgcttgaaccttccaaatacccgttaaagcttggaagccttcggttggccattgtttttttgcccctttgggcttccccccagcccctcctcccctttcctgcacccgtacccccgtggtctttgaaataaagtcttgagtgggcggcaaaaaaaaaaaaaaaaaaa

SEQ ID NO: 154870 - DNA, 1633 bp, Homo sapiens
  misc_feature (1)...(1633): n = a,t,c or g
atggcgacgaaggycgtgtgcgtgctgaagggcgacggcccagtgcagggcatcatcaatttcgagcagaaggcaagggctgggacgggaggcttgtggttgcgaggccgctcccgacccgctcgtccccccgcgaccctttgcatggacgggtcgcccgccagggcctagagcaggttaagcagcttgctggaggttcactggctagaaagtggtcagcctgggatttggacacagatttttccactcccaagtctggctgctttttacttcactgtgaggggtaaaggtaaatcagctgttttctttgttcagaaactctctccaactttgcacttttcttaaaggaaagtaatggaccagtgaaggtgtggggaagcattaaangatgactgaarrcctgcrtggattccatgttcatgagtttggagataatacagcaggtcgggtgttgtgtttctttttagaatgtatttgggaactttaattcataatttagcttttttttcttcttcttataaataggctgtaccagtgcaggtcctcactttaatcctctatccagaaaacacggtgggccaaaggatgaagagaggtaacaagatgcttaactcttgtaataatggccgatcatggttctggagttcatatggtatactacttgtaaatatgtgctaagataattccgtgtttcccccacctttgcttttgaacttgctgactcatctaaaccctgctcccaaatgctggaatgcttttacttcctgggcttaaaggaattgacaaatgggcacttaaaacgatttggttttgtagcatttgattgaatatagaactaatacaagtgccaaaggggaactaatacaggaaatgttcatgaacagtactgtcaaccactagcaaaatcaatcatcattgtacttctgaaatcaggtgcagccccatctttcttcccagagcattagtgtgtagacgtgaagccttgtttgaagagctgtatttagaatgcctagctacttgtttgcaaatttgtgtcctactcagtcaagttttaatttagctcatgaactaccttgatgtttagtggcatcagccctaatccatctgatgctttttcattattaggcatgttggagacttggcaatgtgactgctgacaaagatktgtggccgatgtgtctattgragattctgtgatctcatctcaggagaccattgcatcaytggccgcacactggtggtaagttttcataaaaggatatgcataaaacttcttctaacatacagtcatgtatcttttcactttgattgttagtcgcggtttctaagatccagataaactgtgaaaaagctttgagtagtagtttctacttttaaactactaaatattagtatatctctctactaggattaatgttatttttctaatattatgaggttcttaaacatcttttgggtattgttgggaggaggtagtgattacttgacagcccaaagttatcttcttaaaattttttacaggtccatgaaaaagcagatgacttgggcaaaggtggaaatgaagaaagtacaaagacaggaaacgatggaagtcgttygrcttgtggtgtaattgggatcgcccaataaacat

SEQ ID NO: 154871 - DNA, 854 bp, Homo sapiens
ttttttggttttgtagcagttagggaatattgaactaatacaagtgccaaaggggaactaatacaggaaatgtcatgaacagtattgtcaaccactagcaaaatcaatcatcattgtgaaacataggaagcttctgtagataaaaaaaaaaattgatactgaaaactagtcgagactccatttatatgtgtatgttttctgaaagcctttcagaaaaatattaaatttaaggacaagatttttatatcagaggccttgggacatagctttgttagctatgccagtaattaacaggcataactcagtaactgagagtttaccctttggtacttctgaaatcaggtgcagccccatctttcttcccagagcattagtgtgtagacgtgaagccttgtttgaagagctgtatttagaatgcctagctacttgtttgcaaatttgtgtctactcagtcaagttttaatttagctcatgaactaccttgatgtttagtggcatcagccctaatccatctgatgctttttcattattaggcatgttggagacttgggcaatgtgactgctgacaaagatggtgtggccgatgtgtctattgaagattctgtgatctcactctcaggagaccattgcatcattggccgcacactggtggtccatgaaaaagcagatgacttgggcaaaggtggaaatgaagaaagtacaaagacaggaaacgctggaagtcgtttggcttgtggtgtaattgggatcgcccaataaacattcccttggatgtagtctgaggccccttaactcatctgttatcctgctagctgtagaaatgtatcctgataaacattaaacactgtaatctt

SEQ ID NO: 154872 - DNA, 1044 bp, Homo sapiens
tttggggccagagtgggcgaggcgcggaggtctggcctataaagtagtcgcggagacggggtgctggtttgcgtcgtagtctcctgcagcgtctgggggtttcccgttgcagtccctcgaacccaggaccctcggccgtggcctaagcgattttggcgaccgaagccctgtgtgcgtgttgaaaggccgacggcccaagtgcaggggcatcatcaatttccgagcagaagtgcagggaaagtaatggacccagtaaaggtttggggaagccattaaagggactgacctgaaaggccctgcatggattcccatgtccatggagtttggaagataatacagcaaggctgtaccaagtgcagggtcctcacttttaatcctctatcccagaaaacaacggtgggcccaaaaggatgaagagagccattgttgagaccttggccaatgtgactgcttgacaaagaatggtgtggccgatgtgtctatttgaagattttgtgaatctcactcttcagggagacccattgcatccattggcccgcacactggtggtcccatggaaaaagccagatgaccttgggccaaaggtgggaaatgaaagaaagttcaaagaccagggaacgctgggaagtccgtttggccttgtggtgtaaattgggatcgcccgaataaacattccccttggatgtagtctgaggccccctaaactcatctgtgtatcctgctagctgtagaaaatgtatcctgataaacattaaacactgtaatcttaaaagtgtaattggggtacctttttcaaagttgctttaaagtacctgtagtgagaaactgatttactgatcacttggaagatttgtatagttttataaaactcgagttaaaatgtctgtttcaatgacctgtattttgccagacttaaatcacagatgggtattaaacttgtcagaatttctttgtcattcaagcctgtgaataaaaaccctgtatggcacttattatgaggctattaaaagaatccaaattcaacctaaaaaaaaaaaaaaaaaa

SEQ ID NO: 154873 - DNA, 1742 bp, Homo sapiens; identical to SEQ ID NO: 147603

SEQ ID NO: 154874 - DNA, 615 bp, Homo sapiens; identical to SEQ ID NO: 147631

SEQ ID NO: 154875 - DNA, 522 bp, Homo sapiens; identical to SEQ ID NO: 147632

SEQ ID NO: 154876 - DNA, 900 bp, Homo sapiens; identical to SEQ ID NO: 147633

SEQ ID NO: 154877 - DNA, 314 bp, Homo sapiens; identical to SEQ ID NO: 147625

SEQ ID NO: 154878 - DNA, 340 bp, Homo sapiens; identical to SEQ ID NO: 147626

SEQ ID NO: 154879 - DNA, 543 bp, Homo sapiens
ttaagcagaatggaaagactaagatcgtttaacaataacaactttttttttctttttttcttttgttttttgaagtgtgggggtttggttttgttttttgagtcttttttttttaagtgaaatttattgaggaaaaatatgtgaaggaccttcactctaagatgttatatttttcttaaaaagtaactcctagtaggggtaccactgaatctgtacagagccgtaaaaactgaagttctgcctctgatgtattttgtgagtttgtttctttgaattttcattttacagttacttttccttgcatacaaacaagcatataaaatggcaacaaactgcacatgatttcacaaatattaaaaagtcttttaaaatactgtagataattaaccaaggtagaatgaccttgtaatgtaactgctcttgggcaatattctctgtacatattagcgacaacagattggattttatgttgacatttgtttggttatagtgcaatatattttgtatgcaagcagtttcaataaagtttgatcttcctctgct

SEQ ID NO: 154880 - DNA, 3772 bp, Homo sapiens; identical to SEQ ID NO: 147627

SEQ ID NO: 154881 - DNA, 4440 bp, Homo sapiens
acggcgagcgcgggcggcggcggtgacggaggcgccgctgccagggggcgtgcggcagcgcggcggcggcggcggcggcggcggcggcggaggcggcggcggcggcggcggcggcggcggaggcggcggcggcggcggcggcggcggcggctgggcctcgagcgcccgcagcccacctctcgggggcgggctcccggcgctagcagggctgaagagaagatggaggagctggtggtggaagtgcggggctccaatggcgctttctacaaggcatttgtaaaggatgttcatgaagattcaataacagttgcatttgaaaacaactggcagcctgataggcagattccatttcatgatgtcagattcccacctcctgtaggttataataaagatataaatgaaagtgatgaagttgaggtgtattccagagcaaatgaaaaagagccttgctgttggtggttagctaaagtgaggatgataaagggtgagttttatgtgatagaatatgcagcatgtgatgcaacttacaatgaaattgtcacaattgaacgtctaagatctgttaatcccaacaaacctgccacaaaagatactttccataagatcaagctggatgtgccagaagacttacggcaaatgtgtgccaaagaggcggcacataaggattttaaaaaggcagttggtgccttttctgtaacttatgatccagaaaattatcagcttgtcattttgtccatcaatgaagtcacctcaaagcgagcacatatgctgattgacatgcactttcggagtctgcgcactaagttgtctctgataatgagaaatgaagaagctagtaagcagctggagagttcaaggcagcttgcctcgagatttcatgaacagtttatcgtaagagaagatctgatgggtctagctattggtactcatggtgctaatattcagcaagctagaaaagtacctggggtcactgctattgatctagatgaagatacctgcacatttcatatttatggagaggatcaggatgcagtgaaaaaagctagaagctttctcgaatttgctgaagatgtaatacaagttccaaggaacttagtaggcaaagtaataggaaaaaatggaaagctgattcaggagattgtggacaagtcaggagttgtgagggtgaggattgaggctgaaaatgagaaaaatgttccacaagaagaggaaattatgccaccaaattcccttccttccaataattcaagggttggacctaatgccccagaagaaaaaaaacatttagatataaaggaaaacagcacccatttttctcaacctaacagtacaaaagtccagagggtgttagtggcttcatcagttgtagcaggggaatcccagaaacctgaactcaaggcttggcagggtatggtaccatttgtttttgtgggaacaaaggacagcatcgctaatgccactgttcttttggattatcacctgaactatttaaaggaagtagaccagttgcgtttggagagattacaaattgatgagcagttgcgacagattggagctagttctagaccaccaccaaatcgtacagataaggaaaaaagctatgtgactgatgatggtcaaggaatgggtcgaggtagtagaccttacagaaatagggggcacggcagacgcggtcctggatatacttcaggaactaattctgaagcatcaaatgcttctgaaacagaatctgaccacagagacgaactcagtgattggtcattagctccaacagaggaagagagggagagcttcctgcgcagaggagacggacggcggcgtggagggggaggaagaggacaaggaggaagaggacgtggaggaggcttcaaaggaaacgacgatcactcccgaacagataatcgtccacgtaatccaagagaggctaaaggaagaacaacagatggatcccttcagatcagagttgactgcaataatgaaaggagtgtccacactaaaacattacagaatacctccagtgaaggtagtcggctgcgcacgggtaaagatcgtaaccagaagaaagagaagccagacagcgtggatggtcagcaaccactcgtgaatggagtaccctaaactgcataattctgaagttatatttcctataccatttccgtaattcttattccatattagaaaactttgttaggccaaagacaaatagtaggcaagatggcacagggcatgaaatgaacacaaattatgctaagaattttttattttttggtattggccataagcaacaattttcagatttgcacaaaaagataccttaaaatttgaaacattgcttttaaaactacttagcacttcagggcagattttagttttattttctaaagtactgagcagtgatattctttgttaatttggaccattttcctgcattgggtgatcattcaccagtacattctcagtttttcttaatatatagcatttatggtaatcatattagacttctgttttcaatctcgtatagaagtcttcatgaaatgctatgtcatttcatgtcctgtgtcagtttatgttttggtccacttttccagtattttagtggaccctgaaatgtgtgtgatgtgacatttgtcattttcattagcaaaaaaagttgtatgatctgtgccttttttatatcttggcaggtaggaatattatatttggatgcagagttcagggaagataagttggaaacactaaatgttaaagatgtagcaaaccctgtcaaacattagtactttatagaagaatgcatgctttccatatttttttccttacataaacatcaggttaggcagtataaagaataggacttgtttttgtttttgttttgttgcactgaagtttgataaatagtgttattgagagagatgtgtaatttttctgtatagacaggagaagaaagaactatcttcatctgagagaggctaaaatgttttcagctaggaacaaatcttcctggtcgaaagttagtaggatatgcctgctctttggcctgatgaccaattttaacttagagcttttttttttaattttgtctgccccaagttttgggaaatttttcatattttaatttcaagcttattttggagagataggaaggtcatttccatgtatgcataataatcctgcaaagtacaggtactttgtctaaaaaacattggaagcaggttaaatgttttgtaaactttgaaatatatggtctaatgtttaagcagaattggaaaagactaagatcggttaacaaataacaactttttttttcttttttttcttttgttttttgaagtgttggggtttggttttgttttttgagtcttttttttttaagtgaaatttattgaggaaaaatatgtgaaggaccttcactctaagatgttatatttttcttaaaaagtaactcctagtaggggtaccactgaatctgtacagagccgtaaaaactgaagttctgcctctgatgtattttgtgagtttgtttctttgaattttcattttacagtttcttttccttgcatacaaacaagcatataaaatggcaccaacctgcacatgatttcaccataattaaaaagtcttttaaaaagtaatgccaaaccataaatgttgatttctagttatttattctgggaatgtatagtatttgaaaacagaaattggtaccttgcacacatcatctgtaagctgtttggttttaaaatactgtagataattaaccaaggtagaatgaccttgtaatgtaactgctcttgggcaatattctctgtacatattagcgacaaccagattgggatttttatgtgaccattgtttggttatagtgccaatatatttggtatgcaagcaggttccaataaaggtttgatcttcctctgcgtaaattgatgttgatgcaatccttacaaatgattgcttttaaaattttaagctaggaaaagaaatctatagaaagtgtcctgttaccaaaatgtaactgttacccattgggaaatttcacagtcataggaagttagcctttatctacccaactttcaagaaggttctttaataaagcggaaaaactcgaaccaaatgggtacaaaacccacagtgtaccattaaaatatgcactaagtctcttttttacaaaggctgtattcagcaaggcgctaacttgcttaaatgtgaattactaacttctaaaactgtactttgattcacatgttttcaaatggagttggagttcgattcatattacaataatttgtgtgctaaccgatgtatgtttttcaggttcaaagtctatgatgtttttacaaatctatattaaagtttcaaaaattctgaagcattgtttatctagatgtaaatttttatttaaaaagttgcacccatccaaaaagcaaaaaaaaaaaaaaaaaa

SEQ ID NO: 154882 - DNA, 534 bp, Homo sapiens; identical to SEQ ID NO: 144862

SEQ ID NO: 154883 - DNA, 611 bp, Homo sapiens; identical to SEQ ID NO: 145358

SEQ ID NO: 154884 - DNA, 675 bp, Homo sapiens; identical to SEQ ID NO: 147356
  misc_feature (1)...(675): n = a,t,c or g

SEQ ID NO: 154885 - DNA, 2043 bp, Homo sapiens
atggaattagatctcagagcatgtggcaagaataagagaaagaacctagaagagtggaaggaagccattttgcccctcatctacaataggcataggttcttgcgtgggaatgggccacgtgtcgctgccgaagacgttatgcagatcgaggcgccccaatccgtgaatcatcctttaggctacaaggtggaaagatcgtgggtgaagagggtaccagacgttgagggcaacggggtacaacgtttgaacggccatctggagaacgaggtgcaagaatggtaccaccaggcacgaggaaacgcagaggattcctgcatggtaggagctcataattgtgcacggagagcacagtatgacgacgatatgacagcgacaacgatgatgaccgaagtcatgtttgcgtcttatctttcgttccttgttcatggtatctgcccgtttaggaggttggaggcgagggactttatgtacctctccctggaggctctcggtgcctccagtgaccccgatgcctcactgccttccggaccccaaaaggatctaagactgctgaccagcatgctgtggaaggccactcggaccagggaaagagaaattagaaaaacatttgatacgacttctagctcggtacccaatgttcgtgtattcctgcataacagccaacttgtgaaatgggcacggaaatcgtgccccaaaagagaaattagaaacggaaggttgcggttgcaacgacctacgttctgcgccccagaagcagccataagtgttaaagcagctggcgacgattcacgatcgaacaggttgttaacatgcagcgccacgttggagccagcatgccgactcgcgccagatcataacgtactaacgcatccacgaccgtatacttcccactttaaaggagttagccggatcaccataactggagccagtaaacgaccaccggtgcccagcgtcagacctgaaagcggaccgtcaaagaagtgtagtcagcccacaacgaagccatgtgttttggcacctgtgcaagcgattgcctttataggtagtatcggtggtgtattccgcatcggtgtaagtaaagaaccgactacgttaacactcgccgacagcgccgatttcgcttcgattctacgccacattaaagaactccagcgcctgctcggcaagaaaacgatgaaaatgaactcctcaaagaagccgttgaatatggacgggcaaaaaagtgatagcgcacgcgcccttattgcccggggatggggattgcacgtcattctcagacgaccgatgactggatggatggccgccgcagtcgtcacactgatgatacggagtgcttctccgtatacaccatgttatcggagagctgccaacgtatggtttcgtcgggtatgggcgctgcttcgcagacaggcagaacttgatggccgcatccttagcactaagttggaagaaatgggctctttggccagcaatgtctccccgccatggctatacctgcaggtgccgggatgttggtttttctcacatgaagtacttccagggtccaccacactgatgactcctgttattggtcagtggacaacagccatgaaatgggaaacactaaaacagcttccctctttccttacacagcctcttggcaaccaaagctcatttccaagggagagcacagatgatgagaataagcaggctgtggctgaggaagtcactggtctgaaagcttttggtgtgtggagtcggttggctggagatggctatatctgtggaaaggatgtggacatcgacagttacccgacgaagaactgccatgctctgccaggaactgtaaaaaggaataaaaaacattctggacaactgcccaaaatttcccaatcgtaccaacgggacaaggatggtgatggtgtgggggatgcctgtgacagttgcctgatgtcagcaaccctaaccaggacagccacactcgggctcttacaatcaggggtcataagctgctatgtcacctacctcaccttccagctctgtccagcaaacctgcagaagtag

SEQ ID NO: 154886 - DNA, 1647 bp, Homo sapiens
atggtgctcatgcctgtagtttcagctattccggaagctgaggcaaagagctccttaattgaaaatgatgtgtgcctaagcgcaaaagagaaccacaagtctaaaagggccataacacggacagcggagaggttcccgactgagttccccacgacacccgcggaaaacagcgcggaccggtctacgacacgcccagcaggcaagcctacacaaattggtcaactccactcgctgctcggatcgcgccagtacctcctgctgctaacccgcagggagttcttctcaaatcggcaggaccgcacctgcttctactcgcccgcactacaacctgcaatcgttaagtcccgattgcgagtccgcaaacaacgcaccgcatggaataaaaatccttttttttacgatttccacggcgaaaccaaaagctcatcagaatcaatgctgccagctaccgaaaataatgaccagattaagcgcattatttgtaaacagctcctccagataattgtcgtcatgccggaacccctggcggggctattttaccgcgacaattcattcagatcatcaatgtcagggaaggaagtagcaacattagctaaggaagtgaattcagcagtaagcgccgtagaccagaaaagagattttcttgtcccgcatggagcagattctgccatgcaaaacatggtggaagtcatcgagccgttttaccccaaggctgaccatcaatcgctggctggccgaagcaggcgtatgatgactcaaggcaccttggtcgatgccaccatcattgaggcacccactcgaccaagaacaaagagcagcaacgcgatccggagatgcatcagaccagaaaggcaatcagtggcactttggcatgaaggcccacattggtgtcgagccaagagtggcctgacccacagcctggtcaccaccgcggccaacgagctgacctcaatcagctgggtaatctgctgcatggagaggagcaatttgtccagccgatgccggctaccaaggggcgccacagcgcgaggagctggccgagtggatgtggactggctgatcgccgagcgccccggcaaggatggacgaaaaatgaaggtgtaccgtgctggcaaacgttgccgccatttttcgcccaatatgccccgattttccatccccatgacgacaactttccctttacaccagaacatcttttcacaggttgtgtttaaagttcccttccgggttcacgtcattctcagacgaaccgatgactggatggatggccgccgcagtctcacactgatgatacggatgtgcttctccgtatacaccatgttatcggaagctgccaacgtatggttatcgtcgggtatgggcgctgcttcgcagacagcagaacttgatggtatgcctgcgatcaatgccaaacgtgtttaccggacatgcgccagaatgcgctgttgcttgagcgaaaacctgctgtaccgccacgaaacgggcacatacaggcagagtggccgtgaaagaaagcaatcagcgtggtgctctgacgggttcgagttctgctgtgataacggagagagactgctgtcacgttcgcgctggactgctgtgatcgtgaggcactgcactgggcgtcactaccggcggcttcaacagtga

SEQ ID NO: 154887 - DNA, 1512 bp, Homo sapiens
atggggagtaagcttagtcagccgttgtctccgggtgtcgcgtggcagttgcacgtcattctcagacgaaccgatgactggatggatggccgcgcagtcgtcacactgatgatacggatgtgcttctccgtatacaccatgtatcggagagctgccaacgtatggttatcgtcgggtatgggcgctgcttccagacaggcagaacttgatggtatgcctgcgatcaatgccaaacgtgttaccggatcatgcgccagaatgcgctgttgcttgagcgaaaacctgctgtccgccatcgaaacgggcacatacaggcagagtggccgtgaaagaaagcatcagcgatggtgctctgacgggttcgagttctgctgtgataacggagaggactgcgtgtcacgttcgcgctggactgctgtgatcgtgaggcactgcatgggcggtcactaccggcggcttcaacaacgggttaacggcagcaaagaacttgcagaggcgttcgagcattataacgaatggcatccgcatagtgcgcgggttatcgctcgccacgggaatatctgcggcagcgggcttgtaatgggagaggtaccagagaatgctatgcatgatgcaaacatccgcgttgccatcgcgggagccggggggctatgggccgccaggttgattcaggcggcgctggcattagagggcgtgcattgggcgctgcgctggagcgtgaaggatcttctttactgggcagcgacgcggcgttaccgtgcaaagcagctcgatgcggtaaaagatgattttgatgtgtttatcgattttacccgtccgaagcgttgggttaacgtcatgcttaagctgctggagaaagcagccaaagtgatgggtgctacaccgatatcgaaattattgaagcacatcatagacataaagttgatcgccgtcaggcaccgcactggcaatgggagaggcgatcgcccacgccctgataaagatctgaaagattgcgcggtctacagtcgtgaaggccacaccgtgaacgtgtgcctggcaccattggttttgccaccgtgcgtgcaggtggtgtcgatggcgacaaccgccgggtttacaactgacacattgcccgctggccgctctttttgccggtactgcttttatgttcagccttatcggcggttgcgccgggtcaacgggcggtggcctgaaggtgatccgatcctgctgctgtttaagcaggggaacctgacgaaccgacaatacccagcgaatcacgccatgttccaggacaatggattccagcagctctgccgcgtcggaaggtacggcggcaactgcggaatgatcatctcaacgtcagggtcgacggcgttccagcaggcggcgaccattccagtcgagatccagctcctgatgaatatgccgcacagcaagtatttgacgtgcggaaacttcgccagcacggtatccattcgcccgcgttacgcagactgtgttgatcgagccaaactacacccgcagtag

SEQ ID NO: 154888 - DNA, 1134 bp, Homo sapiens
ttatagggccatgtagcttcttaatggtattttctcctctcttttcttcctccgttcgtttgttcggtccttccttcttttctcccttttcgctcccttgtcgttctctctctttcttgttgtggtgtctctctgctttgtgtgtttcgccctcgcttttccccctgcgtttcctcttgctgtgccgtctttctctgtcccttcggtctcctttccttcgtcgctttgtcgtactttcagcgttatcctcgttactgttgagtcgtcggtatatctgaatggagatacgacaatcagcggagaattccctctggggtttaccggggttattcgggtacaggataaagctttgctggaaattggcagtggcgtatgcggatgccattcgttataatgctcgaacgcctctgcaaggttctttgctgccgttaacccgtctggtttgggcatgatactgatgtagtcacgctttatcgttttcacgaagctctctgctattccgttactctccggactccgcaccgccgtgttcttcggttcaagtcccaacatccgggcgaactggcgtgtttcattagcccggtagcatgaaccattatccgtcagccactccactggagacgacggaagatcgttgccgaagcggcgttccaccgctcccagcatgacgtccgtgtactgtttcaactgtgagcgttgtcttgtctcttgttcccttcttttgttgtcttctcttggtcctccttgccttgctgtgcttcttgctcctttctttgctccgttcttctgagtgttcttgctgtgcgtcgtcgtcgctggtctccctgccctccttcttcttctcgtgtcttctctcctctttctcgttctcctctctttctgcgctgcatctgcttgtttcggatttctctctgtctgacgcgtcttgtaactggaactgatagaaggttttgtttctttatcgcttcgcccctcggtgtctctcgcctcgttctgttgggttttggggtctttcgttgcctgccgctgtcttccggttgtctgcggggttcgccgtttggtgttccgctgtgttcggggggttgtttgggttggctgccagtgtgttcccgtcacgggtttcttcctttgcat

SEQ ID NO: 154889 - DNA, 3530 bp, Homo sapiens
ctaggcagtgtggtgatccgggcagtgtgagtgctccaggcagtgtggtggtctgggcagggtgagtagtctaggcagtgtggtgatccgggcagtgtgagtgctccaggcagtgtggtggtccgggtagggtggtagtcttaacagggtgagtggtccgggcagtgtggtggtccgggcagtgtggtggtccgggcagggtgagtggtccggacagtgtggtggttcgggcagtgtgaatgctccaggcagtgtggtggtccgggcagggtgagtggtccggacagtgtggtggttcgggcagtgtgagtgctccaggcagtgtggtggtctgggcagggtgagtagtctaggcagtgtggtgatccgggcagtgtgagtgctccaggcagtgtggtggtccgggtagggtggtagtcttaacagggtgagtggtccgggcagtgtggtggtccgggcagtgtggtggtccgggcaggttgagtgctccggacagtgtggtggttcgggcagtgtggtggtctgggcagtgtggtggtccaggcagggtgagtggtccgggcagtgtggtggtccgggcagtgtggtggtctgcgtagggtgttggtcccagtagggtggtgagccttttaatttcaggctaattcttctgctgtggtagtattcaatatattccgtaacagcatccttcagttcgcttatattactgaactcatcaagataaaaacactccgactttaaggttccaaagaaacactccaccacagcattatccagacaattgccttttctggacatgctttgtttaataccatgttctttaaggatattttgatatcttctcatacgatactgccatccctggtcagagtgcagaacaggatgctcgtgaggattaagctttttgaatgcctgatcgagcatattctcaaccatgttcatcactggtctttccgaaaggctgtaagaaataacttcgttgttgaagagatctattactggagacaaatacagcttgcgcccattgactgcaaattcagtaacatcggtaacccacttctcgtttggccgcgtagccttgaaatctctttggagaacattaggggcggtttgccctacctctcctctgtaagagcggtatcgcttgaccttaatcgctgctttaagtgagagggttcccatcaggcgctgaacagctttatggttaatctgtttcccttctcgatgaagagacagcgttaccctaccggtatccgtatcgggctctattctcgtgataaatctcactaatacgctttttaacgtccgcatacttgtcaagcttggtgagagctttttcgtgggatgagctaaggctttcagcttttttagatacataagccgcgtttcaagaaatcgaacttgcctttcaagatcctcaatgcgtcggtcttttgacagctccaatgctgatgccgctttttctggatcaactgatattgcaatgtttcttttggtgccaatcttgagcgcgcgtaaaccagcttctccgcgctcttcatagaccttcagccacctggctacagaaccactaccagcaagcataaagtgagcagcagcctgattaagggacatgtgctgctcgatcacagctttcacgaccttaatacgcaactctggatcagcactaacgcctttaggtttgggaattaaacctttttctccatgtttttcatagagggcaacccatgtcctgacctgggttcgggggacaccaaaacgtgccgagatgatcctgggatcctctagagtgacctcagcagcaacccccacgaagctctctgctattccgttactctccggactccgcaccgccgtgttcttcggttcaagtcccaacatccgggcgaactggcgtgtttcattagcccggtagcatgaaccattatccgtcagccactccactgctcccagcatgacgtcctgtactgtttcactgttgaagccgccggtagtgaccgcccagtgcagtgcctcacgatcacagcagtccagcgcgaacgtgacacgcagtctctctccgttatcacagcagaactcgaacccgtcagagcaccatcgctgattgctttctttcacggccactctgcctgtatgtgcccgtttcgatggcggtacagcaggttttcgctcaagcaacagcgcattctggcgcatgatccggtaaacacgtttggcattgatcgcaggcataccatcaagttctgcctgtctgcgaagcagcgcccatacccgacgataaccatacgttggcagctctccgataacatggtgtatacggagaagcacatccgtatcatcagtgtgacgactgcggcggccatccatccagtcatcggttcgttccccatccccgggcaataagggcgcgtgcgctatccacttttttgcccgtccatattcaacggcttctttgaggagttcattttccatcgttttcttgccgagcaggcgctggagttctttaatctgcttcatggcggcagcaagttcagaggcaggaacaacctgttctccggcggcgacagcagtaagacttccttcctggtattgcttacgccagagaaataactggctggctgctacaccatgttgccgggcaacgagggagaccgtcatccccggttcaaagctctgctgaacaattgcgatcttttcctgtgtggtacgccgtctgcgtttctccggcccacttcgttgaccatcgggatcatcatgcgggcggataatctcttcttcgctgaaatcgcgcttcggctggctcacttctgccagcaggtcttcaacggcggcgtcttcttctttcttcggcttacctttgctgtcttctttataacgccagaaaccgaggccgttcttctgaccaaagcggttggcatcaaacagcgcgtcgatggcatcgcggtaatctttctgcatccgctgcgggaagcctgctgccatgacagcctgagcgtgatgcgcggtatcaatgcccacaacgtccagcagatatgccgggcccatcggccagccaaactgtttttccatcactttgtcgatcttgcggaaatccgcgccgtcgcgcagcagctggctgaaaccggcgaaatacgggaacagcacgcggttaacaaagaagccggggcagtcgttaaccacaatcggcgtcttgcccatcttgctcgcccaggcgacaactttcgcgatggtttcgtcggagcttttctcgccgcgaataatttctaccaacggcattcggtggaccgggttaaagaagtgcatcccgcagaagttttccgggcgttccagcgcgttggccagttcgctgataggaatggttgaagtgttagacgccagcacggtattccgactgtgcctgtctgtcgtctttttctctgttttcttatccttggttctatcccgcgctgcggttttctgtgtgttggagtccctcttctctgcccgctttcccgctattattgctccttgctgggggtcttgtcgatcgt

SEQ ID NO: 154890 - DNA, 1761 bp, Homo sapiens
atgaagcagattaaagaactccagcgcctgctcggcaagaaaacgatggaaaatgaactcctcaaagaagccgttgaatatggacgggcaaaaaagtggatagcgcacgcgcccttattgcccggggatggggaacgaaccgatgactggatggatggccgccgcagtcgtcacactgatgatacggatgtgcttctccgtatacacccatgttatcggagagctgccaaacgtatggttatccgtcggaacgtggtacctggtgtcccaggcaacgagtgcactaacacgagacctggccgagtgaggcaagaggagtggaacagcctggtggtgacactactggtgagggagtcagcagggtcaacactaagcagcagtaggaggtcagtgcccgccgagcgcaaggctaaaacgcggctcctacagctctgcgaccgtgcccagcgtcgctgctccgcaccagaccccaaagtctgtagtggtttcacgggaggggcggagtttacgccagactcaaatgatctcacgtcacgggatctgacgacacagatcttcgcctggccacaagaagccaaatctgcccgtgctgtcagcggcctgaacatccttaccctgatgaataatgatatggcgctgatacagctgcatcatatatcgcaacgggctaaatcccgccccttacgtgataacgcggcggaatttcttcaggtggtcgcagaaaatcgcgggctaagccaggaagagctagcggacagattagtcccaaccctgggccttgatgatccgcaggcgttgagttttgattttggtccccggcagtttaccgttcgcttcgatgaaaatctcaacccgcaaaacgttcgccagaaaagcgttccccgtttgcgcgccgatgacgatcaactgaaagcgcccgaggcactggcccgactaaaagggctaaaaaaagatgctactcaggtgagcaaaaacctgctcccgcgtcttgaaacggccctacgtaccacccgacgctggtcgctggcagatttcattctctgtttgttaatcatcccttacccgtctgaaatgacagcagaaatgcgcagtgaatttgcacagctttttgccgattacgaaattatgccgccttttcgccagttgtcgcgccgcacggtgctgctcacacctgacgagtcaaccagtaacagcctgactcgctgggaaggtaaatccgctaccgttgggcaacttatgggaatgcgatacaaaggctgggagtcaggctatgaggacgcatttgtctataacctggcgggcagtgatgcaactgcccgttatcaacacgacttaccagcggggaaagcgatgatcgtgcaaaaagagctggttgctatttacgattatgagctgtcgcacctgctgcaatacgctgtggttaacgcgccagtgagacggatactgcccatccagctcttgtggcagcaactgattcagcccggcgagaaactgaaatcgatccggcgagcgatacagcacattggtcagacacagattatcggtatgttcatacagatgccgatcatgatcgcgtacgaaacagaccgtgccaccggtgatggtatagggctgcccattaaacacatgaatacccgtgccatgttcgacaatcacaatttcatgaaaatcatgatgatgttcaggaaaatccgcctgcgggagccggggttctatcgccacggacgcgttaccagacggaaaaaaatccacactatgtaa

SEQ ID NO: 154891 - DNA, 1950 bp, Homo sapiens
tcagttgatcgtcatcgcgcgcgccaaaccggggaacgcttttctggcgaacgttttgctgatcaagataaccgggttgagattttcatcgaagcgaacggtaaactgccggggaccaaaatctaaactcaacgcctgcggatcatcaggcccaggttggactaatctgtccttagctcttccggtccggctgatttttttcgccatcaagttctgcctgtctgcgaagcagcgcccatacccgtacggatgaaccccagtaccgcttgggccagtctgcttccggataaccactggtgtataccggacgaagccaccagtccgatatgcactccacgttgtgtaccggacctcgccgtgcgggcccatgccatccgagttcactcggttcgtctgagaatgacgtgcaactgcgcacgcgacacccggagacaacggctgactaagcttactccccatccccttggtttctgccgggcgcgcgacagcagtaagacttccttcctggtattgcttacgccagagaaataactggctggctgctacaccatgttgccgggcaacgagggagaccgtcatccccggttcaaagctctgctgaacaattgcgatcttttcctgtgtgtacgccgtattgcgcgagatccgcggggagttttctccagaagaaccgcccccgccgctaaatccgccgctatctgagcctccagcggaaccgctgttgtctgaatgataacttctaccagatgctcttttcttgcggtttcctgccggacaccgttgccagggggcaggtgtaagttccgttctcacccgtttgtcaccattttcccgcttccttgggtaacatagaagtgcctggtgccgtgcgcgccgtaacggacggatgccgtgctctttgaccaggttgtaagccagcgcgtagaggtaagactcttccggcatagtctggtggaacgcggtgtcaaatacagcaacgtttttgtctttcagctgtgggaaagatttcagagcttcttcgataccgatcaggtgagccgggttgtgcagcggtgcaaaagaagctgcatctttgataccctgaataacagactcatcgatcactacggagctggtatacttttcgccgccgtgtacgatacggtgaccgatagcagtcagctgcgcagacagttctggtttttgtgccagaatagtattaacgataaagttgagcgcttcgctgtgagcggcgcctgcacctaaagccgcttcctgtttattgccgtccattttccatttgatacgtgcttcgggcaggtggaaacattcgggcgggtcatggtcctggtgaatattacgcctgatgcagatggcaccacccttacactgaccacctgtgtcggtttgggtacgatttgatgttacctgatgcttagagcttttcggtaccccgatggtccctcgactcccatactccgggcccatgggaggtaaataccgttcactaatcctcgcttcattcgccagcagcgcatcaccagtatcggaaagcactacatggccgttttccagcacgtagccgcgatccgccagctttagcgcctggttggcgttctgctcgacgagaaagatagtcatcccctgctcgcgcagctgctcgatggtgtcgaaaatttgctggatgataatcggcgcaagaccgagcgatggctcatcaagcagtagcaaacgcgggttgctcatcagcgcacgaccaatcgccagcatctgctgttcaccgccggacatggtgcccgcccgctgaatacggcgctcatgcagacgtggaaacagctcatacacccactttatgcgctcctggaactggtcgcgttcagcaaaaaaaccgcccatcgccaggttctcttccaccgtcatccgcgagaagacgcgacgcccttccgggacaatcgccaccgcttcgcgcat

SEQ ID NO: 154892 - DNA, 1449 bp, Homo sapiens
ttaagctctgttggtggtttgtctattgcgatggtcattccgggtaatgaaatcaacctctccgcaggggtaatgcaaacctttaccgttctgatgtcccatgtggcaccagaaattgagtggacggttcgcgtgatctccgcactgctgttgctgggtgttctggcggaaatcgcctcctggattgttggtccttctcgcgggatgtatgtaacagcgcagaaaaacctgctgccagcggcattcgctaaaatgaacaaaaatggcgtaccggtaacgctggtcatttcgcagctggtgattacgtctatcgcgttgatcatcctcaccaataccggtggcggtaacaacatgtccttcctgatcgcactggcgctgacggtggtgatttatctgtgtttttctctcgtgctcttgtgctcgtctcgcgctctgctgtgcgtgtctgttgtctgttggggagaaaacgcgctcgcagatggtccccggtaattccttgcgcacaggatatagtaataccagcgttattgtcgttagtggtgagtcgtcggtatatccattacaagcccgctgccgcagatattcccgtggcgagcgataacccagcgcactatgcggatgccattcgttataatgctcgaacgcctctgcaaggttctttgctgccgttaacccgtctggtttgggcatgatactgatgtagtcacgctttatcgttttcacgaagctctctgctattccgttactctccggactccgcaccgccgtgttcttcggttcaagtcccaacatccgggcgaactggcgtgtttcattagcccggtagcatgaaccattatccgtcagccactccactggagacgacggaagatcgttgccgaagcggcgttccaccgctcccagcatgacgtcctgtactgtttcactgttgaagccgccggtagtgaccgcccagtgcagtgcctcacgatcacagcagtccagcgcgaacgtgacacgcagtctctctccgttatcacagcagaactcgaacccgtcagagcaccatcgctgattgctttctttcacggccactctgcctgtatgtgcccgatttcgactgcgcggtacagcaggttttcgctcaagcaacagcgcattctggcgcatgatccggtaaacacgtttggcattgatcgcaggcataccatcaagttctgcctgtctgcgaagcagcgcccatacccgacgataaccatacgttggcagctctccgataacatggtgtatacggagaagcacatccgtatcatcagtgtgacgactgcggcggccatccatccagtcatcggttcgtctgagaatgacgtgcaactgcgcacgcgacacccggagacaacggctgactaagcttactccccatccccgggcaataagggcgcgtgcgctatcacttttgtggccgtccat

SEQ ID NO: 154893 - DNA, 2631 bp, Homo sapiens; identical to SEQ ID NO: 123282

SEQ ID NO: 154894 - DNA, 7521 bp, Homo sapiens
tcactctgccacttttttcttcgccgcacgcttcgctttggtcgctgcagctattttctgcgttttcgccgatggctttttcgcttttctcgcgtctttcttcgccgctttcggcttcgtttttttctcaccgcggaaggcgctgtctggctcaaagtttacctttttaccgacctgacgacgcttgccgccttttttacctgcatcgccttttttcgctttctcgcgcgccgttttaccgacgttgcgcggtgcgcgttcgctggagatcaggctaaagtcgattttgcgctcgtccatattaaccgcttcgacgcgaacttccacgcgatcgcccaggcgataagtctggccgctggattcccccatcaggcgttgccctacctggtcaaagcgatagtagtcattgtccagcgaagagacatggaccagaccatcaatgaacaagtcgtccagacggacgaagaagccaaagccagtgacgttcaccagcaaacgcagattctccagcacgcgtggcaggttcatcttcaccacatcccgcgcctgagtcgcgtccataatttttaaatcgaacaacacttcatcgcacaatttcgccagcggtaatagcttgctggctggtgcgtctccggcagtttcaatggcgcatgacacaccccacagccgcagtcgctgtaaaaaacgggtagcaaactccgcctgcattaacacttcgccgccagaaagcgtgacgccgccgccggacgtgcgaaagaaaatgtcatctttcatcacttcccgttccagagcgtcaaggctgatatcgcgaccaatccgttcaaacgccccggaggggcattcatccgcatcacgcaaacatttcgcacagtgcagacatttcgcctctctgcgtaccgtctggattttgccggagatcgactccggattagcacaccacgggcaaagatgcggacagcctttaaaaaagaccaccgtacgaatgccctcgccgtcattcagtgaataacgctgaatgttgaaaatgcgcgccacatcatcgcggcgcgtttccacaacgttacagctgatgcgctgtccggcggatgatgtcatcctggatctccttcgacagttcgacaaagaaggcgcttccagggtcgccggagtgaatttcacgttcagcaacgtaccgttagacagcagcgtgttatcgagcttactgactgacttcagtaccgctgttggcccttgtgcgtcctggcccagcatgggtgacaagccgccgtctgccagctgttctccggcaaaacgaccgtctggcgtcgcgccaaccaccgatcccaacgggacgtgagcagaaacggtatacgatcccggcgtgaagtagccgccgcgcgggttctggtatttttccacttctttgcagtagtggcgcaacagttcggcgctgatgttatccacctcgtcgatatcgtaccgatttctcgggacaggcttttcgatctggacaagattgctgtgcgacgggtttccctttgccagcggtgaagggcggtgagaggtcagaatattgatactgccgccgtgatcgacccggtcaccaaacatatccgctttaagccacgcaccttgcccgatggcggtaacgccaggcagaatacgcggagtcacttttgcggcaatcagcatttctccattattgttaaatacccgcacggtatcgccatgacggataccgcgtgcctgagcatcaatggggttgatccacacctcttgtgggcaggcctgctgtaacacatcaatattgccgtagctggagtgggtacgcgctttgtaatggaagcccgttaactgcagtggataggttttccgcaggggatcgtcccagccatcaaaacctggggtatacgcaggaaggggatgaataatttcatcttttttcaattcccaggtatctgcaatcttcgccagtcgttcagaataaatttcgattttccccgaaggtgttttcaacgggtttgcctgtggatcttcacggaatgcgcggaaagcgacgtagtgttcttccgggcattttttcttaaagatcccggtcgttttcatctcctcgtagtcgggcatctcagggttacgttccttcgttttcgcatggagatatttgatccattcatgctgactgcgaccttcagtaaaggtttgataaacgtctggtcctaagcgtttggcgacttcactcagcatccagtagatgggtttgcgttcaaattttgctgaggttgcgggttgggcgaggatcacatagcccatattccctgcagattcatgagagataaggtcttcttgctctgttggcatcaggtcgggcaacaggatatcgcaatacttagccgaggccgtcatgaagtggtcaatgccaacaatcatctcgcacttgctgtcatcctgaagcacctcatgggtgtgattgatgtcgccatgttgattgatcaatgtgttactggcgtagacaccataagaaactgatgggacatccagtactgtcctgtgtgtgggttcttctgccttgcgttgctcggtggcggctgtgcttcgtgcttgtcggtcctttccggccttgttgttctctcgttctctgctccgctgacggtctcttgcctctccgtcgctcctgccttcgtcgtccttcgtcctctttctgtcgtcttccgctgctccgtcctctgtctcctgtctgctccttctgtgttccctcgttcgcgtcgtgtcgtgctctgcttctcctcctccttcttccgtctcttcttcccccggtagtctgtttgtcacagcaagaagtttacgccgccccaggtgaccagcgccagcaaccacggcgactgcatcaataacgcgctgccaccaaaaatcccggcgcaaatcaggaccaaatcgctgatagcacaaagtaaggcaatcataatgtggtactgacgacgtatgccctgattcatcacaaaagcattttgtggaccgagcggtaggatcatagccgccccaagtgcaagacgcagctttgtcttctttcacccgcttaaagttcacatccatttgcgggtacgggaagctgataccggcggcatcaaattcacgtttaatacgctccagcacatcccagtacacgttttgcagatcgccgctgttgctccagacgcggaccacgaaattaatcgacgatgcaccaagttcgttcaggcgcacagtcatttcgcgatctttcaaaatgcgatcttcagactggataatattggtcaggatctgcttaacctgatcgatatcggaatcatacgccacgccaataataaattcgttacggcgaactggctcgcgggagaagttaataatatttccggcaataattttaccgttcggaataacgataattttaccgtctgcagtacgcatggtggtggagaaaatctgcacactcagcacagtaccggctacgccgcccaggtcaacatattctccggcacggaacgggcggaacatgacaagtaacacgccagcggccaggttagacagtgacccctgcaaagccagaccaacagctaagccttcttcagtatgttgttctgggccttcgcacaacagggcggtagctcgattagcctttatatcgaccgcttcgttaaccgcgatatgtttggttataccgttccgaccgcgatgttccagtcgattaatgccttcgcagttatgctgtgcggtgtgttcctggcgtgggtggtaaaagagagtgtcgcgggtaatcgtaccgtgcgcatctgggggaaatttgctcttggccttggcctgatgagcgccggattctgcattctgaccggcatctacatgctgctttctggcgcgatcgcgaactatctggcgggcgtgattgccgatcagacatcgcaggcttcgtttgatgcttccggggcgatcaactactccatcaatgcatattttgtcccggagaccaaaatcgtccaggcaccatttggagacgcatattactccatcacggggtacaacacggactttagtaatcacctgatcataatgtttaccagaaacagggaaagacgtggtgtaactgcgccctaatgaagagacaaatctttcgctacacagagacatcattattccggtgacggatgaatcgtgccggaacgcagccgcagaggtgcaaactttgaagacctgaccccatgccgctatactgccgccatcacttaaaaacaggatacaacaatgaacgacagtgaatttcatcgcctggctgatcaactctggctgaccattgaagaacgcctggacgactgggatggcgacagcgatatcgactgcgaaatcaacggcggcgtactgaccataccttgaggtccataacgcacgataatgctgaccatgtgcgggatgctggcaggttccatgaccgatcctccggcgctggcgtttgctaataatcttcatccaaccagcggtgcggcggcgctctcttacgccactgtctatccgttggtaatgttcctggtattcgctggcatttctgaacatcactgaataattcaaaaactccccgctctcgctatatgacaacgaggtgatccgcagcagtggcgtgtgttccgctaccttcatttgccgcgccagcagtggaacagttttaccggcatatagctgtcttccagcatcagcggtttcccttccacaaaacgaacgcgacgggagaagtagatctgctcgttgatttgaatccgtaactggctggcaatggccggaggcgcaggggccaatgatttcaaaaatcagcacctggctggtgaccgtttttccctgccgttttaacacctccaccagcccggtcagactggcggtttgatgcagtacatctttgcgcaccagcggcatccggcgagaaggaccgacggcgtccgcagaaggtgaattggcgtggtgttcggttaaatactcaacctcgccgctttgcgcatgggcacaagcaattcgattatccagcacaaagcccaaccattctcctgacggatgccagttaaatgcagactgaatatccgttttgttatgggttaactggcgcggctcgccgccctgtggcgagataagccacagttgcacaatgccgttatcatctcgcattaaaaacgcgatttgtgtaccctgcggattacagcgcacccagtggcgcgggacgttgactaaccccggataagcccgatggtgggtaaaggttaaacgtcgctgcacgacgccacgcggtggcgcgggcagggttgtttccgttccgcttaacggcgcatcacctgccgctttccagccagcttcatcttgcggtaactcaacgataaacagctccggcactttctcgccctttggcgaaagtgtgtcgccaataaatgccagcgcgtgatttcctacccatccttcttcataagcacgattgatttcatcactgccaggctgtggcgtgggcgtggttttgctcaccagcacgcaccagtggctaccgctgtattcacgcggatgctgcttttgtacgttgaccgggccaaacggcgcagcaacaccgacgtttcgcaaatccagcgccggatcgagttcatgcattacatggtcgttataggtaaagctcaccctttcaccgttcgggcaaagacatgcacatgctgccgccgcgcagcactcctggcgtatacggcgcggtaatccagtcggccccttaggacccacgccgaccgtaagcagctgttccttaatgctggtaaacgcattgttgaattgaccaaacgttattacgagcaaaacgacgaaagtgcactgccgcgtaatatcgccagtaaggcggcgtttgaaaacgccatgacgctggatatcgcgatgggtggatcgactaacaccgtacttcacctgctggcggcggcgcaggaagcggaaatcgacttcaccatgagtgatatcgataagctttcccgcaaggttccacagcgaagctgatgataagagatctattactggagacatatacagcttgcgcccattgactgcaaattcagtaacatcggtaacccacttctcgtttggccgcgtagccttgaaatctctcttggagaacacaatggggtccgtccgtgacacagctttatggttaatctgtttcccttctcgatgaagagacagcgttaccctacggtatccgtatcggcctctattctcgtgataaatctcactaatacgctttttaacgtccgcatacttgtcaggcttgctgagagcctttagatgataataaaacgtactgcgcggtatctccgcagcctttttcgtgggatgagctaaggctttcagcttttttagatacataagccgcgtttcaagaaatcgaacttgcctttcaagatcctcaatgcgtcggtcttttgacagctccaatgctgatgccgctttttctggatcaactgatattgcaatgtttcttttggtgccaatcttgagcgcgcgtaaaccagcttctccgcgctcttcatagaccttcagccacctggctacagaaccactaccagcaagcataaagtgagcagcagcctgattaagggacatgtgctgctcgatcacagctttcacgaccttaatacgcaactctggatcagcactaacgcctttaggtttgggaattaaacctttttctccatgtttttcatagagggcaacccatgtcctgacctgggttcgggggacaccaaaacgtgccgagatgatcgccagagaaataactggctggctgctacaccactgttgccgggcaacgagggagaccgtcatccccggttcaaagctctgctgaacaattgcgatcttttcctgtgtggtacgccgtctgcgtttctccggccctaagacatcaatcatctgttctccaatgactagtcgttggttatcgagtaagacgattttcaacggtaactgcttgcgttttacggtgcccagctcttgcacattcatcatgaaagagccgtcaccggagatacagacaacggtatcgttcggtcgcgcgacttgtgcgccaaccgccgccggtaaaccaaaacccatggtacctaaaccgctggaggtgatgaaattttccgggcgagtgtgggcgatgtgctgcgcagcccacatctggtgctgccccacatctgtggtcacgacgcaatccgcaggtttacgatccgacagttgttttaacaacaacggcgcgtagatagcgtcaccgggatggtcgtaacgccaggaatgttcatcacgcagctgcgcgcagtgttgctgccagagcacaacgacatgcaggcatgcgaagcaacgctcgctcgcactggcgcacaaacccttggccaaacttgctggcaacggcataacgccacgtttgcgccagatttgccgataaccatcgaactcttcgactaccacatcccacgcatgttcgtcattgttcagcgtttcgatatccagcgcgttcagccccat

SEQ ID NO: 154895 - DNA, 1971 bp, Homo sapiens
tcaggtctggttgtgattggcgatggcaataccgttaatatgaatggtggacttgaactgattggagagaaaaacgcgcttgcagatgggtcgcaggttacttccttgcgcacaggatatagttataccagcgttattgtcgttagtggtgagtcgtcggtatatctgaatggagatacgacaatcagcggagaattccctctggggtttgccggggttattcgggtacaggataaagctttgctggaaattggcagtggcgccattacaagcccgctgccgcagatattcccgtggcgagcgataacccagcgcactatgcggatgccattcgttataatgctcgaacgcctctgcaaggttctttgctgccgttaacccgtctggtttgggcatgatactgatgtagtcacgctttatcgttttcacgaagctctctgctattccgttactctccggactccgcaccgccgtgttcttcggttcaagtcccaacatccgggcgaactggcgtgtttcattagcccggtagcatgaaccattatccgtcagccactccactggagacgacggaagatcgttgccgaagcggcgttccaccgctcccagcatgacgtcctgtactgtttcactgttgaagccgccggtagtgaccgcccagtgcagtgcctcacgatcacagcagtccagcgcgaacgtgacacgcagtctctctccgttatcacagcagaactcgaacccgtcagagcaccatcgctgattgctttctttcacggccactctgcctgtatgtgcccgtttcgatggcggtacagcaggttttcgctcaagcaacagcgcattctggcgcatgatccggtaaacacgtttggcattgatcgcaggcataccatcaagttctgcctgtctgcgaagcagcgcccatacccgacgataaccatacgttggcagctctccgataacatggtgtatacggagaagcacatccgtatcatcagtgtgacgactgcggcggccatccatccagtcatcggttcgttccccatccccgggcaataagggcgcgtgcgctatccacttttttgcccgtccatattcaacggcttctttgaggagttcattttccatcgttttcttgccgagcaggcgctggagttctttaatctgcttcatggcggcagcaagttcagaggcaggaacaacctgttctccggcggcgacagcagtaagacttccttcctggtattgcttacgccagagaaataactggctggctgctacaccatgttgccgggcaacgagggagaccgtcatccccggttcaaagctctgctgaacaattgcgatcttttcctgtgtggtacgccgtctgcgtttctccggccctaagacatcaatcatctgttctccaatgactagtgtggcgtagaaatcgaagcgaaagcggcgctgtcggcgagtgttaacgtagtcggttcttatacttacaccgatgcggaatacaccaccgatactacctataaaggcaatacgcgttatgatctggcgcgagtcggcatggctggctccaacgtggcgctgcatgttaacaacctgttcgatcgtgaatacgtcgccagctgctttaacacttatggctgcttctggggcgcagaacgtcaggtcgttgcaaccgcaaccttccgtttctaatttctcttttggggcacggatttccgtgcccatttcacaagttggctcgtcactctcactcgctctctgctcgctcgtagctctccgttcttgtctgttcgcgtgtctctcgttcgtcctgtcttcggtccgttcgttccgtccgggctctcgtgccgttcgtctggttccggctgtggcgtgctgtgcgctagtctggctgcgtcgtcgcctgtttgtggtccgccgcctgtgcctctctgcctgtcttctcctcgtctctgcttcgcgcttgcgcat

SEQ ID NO: 154896 - DNA, 1137 bp, Homo sapiens; identical to SEQ ID NO: 124477

SEQ ID NO: 154897 - DNA, 1608 bp, Homo sapiens
ctacgggagcacgaatgtaggccggataaagcgtttacgccgcatccggcaaaatgcccaatactcattcaggctttgggcaacgttgttccttccagctgctaccgccgcaatccgccgccgggtcagctcctcgcgaatctccacacctttaaatcccgcttcaacgacggcttttgtcggcactgactgcgccacttcccagcgttcgcgcaaccagcggccttgcgggtagtccgctgattcaaaaccggttctgccgcgcacgtcagcctcgctggtcagcgccagttgctcgacacgctgcggtttacgccaggcatcgatggaatcaaataatttgacgatggtttttgggttcagcattgggaaggtgtggatgagatcgtgaaactcagccaccagtctggctaaatcgcgaatttcatttggcacgcgcagacgctggcatagttgttccactaacttaacacccgccgggccatgaccatgatgacgcggccagagttctggcggcgtcagcctatgcggatgccattcgttataatgctcgaacgcctctgcaaggttctttgctgccgttaacccgtctggtttgggcatgatactgatgtagtcacgctttatcgttttcacgaagctctctgctattccgttactctccggactccgcaccgccgtgttcttcggttcaagtcccaacatccgggcgaactggcgtgtttcattagcccggtagcatgaaccattatccgtcagccactccactggagacgacggaagatcgttgccgaagcggcgttccaccgctcccagcatgacgtcctgtactgtttcactgttgaagccgccggtagtgaccgcccagtgcagtgcctcacgatcacagcagtccagcgcgaacgtgacacgcagtctctctccgttatcacagcagaactcgaacccgtcagagcaccatcgctgattgctttctttcacggccactctgcctgtatgtgcccgtttcgatggcggtacagcaggttttcgctcaagcaacagcgcattctggcgcatgatccggtaaacacgtttggcattgatcgcaggcataccatcaagttctgcctgtctgcgaagcagcgcccatacccgacgataaccatacgttggcagctctccgataacatggtgtatacggagaagcacatccgtatcatcagtgtgacgactgcggcggccatccatccagtcatcggttcgttccccatccccgggcaataagggcgcgtgcgctatccacttttttgcccgtccatattcaacggcttctttgaggagttcattttccatcgttttcttgccgagcaggcgctggagttctttaatctgcttcatggcggcagcaagttcagaggcaggaacaacctgttctccggcggcgacagcagtaagacttccttcctggtattgcttacgccagagaaataactggctggctgctacaccatgttgccgggcaacgagggagaccgtcatccccggttcaaagctctgctgaacaattgcgatcttttcctgtgtggtacgccgtctgcgtttctccggccctaagacatcaatcat

SEQ ID NO: 154898 - DNA, 4671 bp, Homo sapiens
atgagtgtacgaagtcctgagacctggggcaactccaccaataccagacctggggcaactccaccaaaccagacctggggcaactccaccaatgaccaggcctggggacaactccacaatgaccagacctgggacaactccaccaatgaccagacctggggcaacccaccaatgaccagacctggggcaagtccgccaatgaccagcctggggcagtccaccaatgaccagacctggggcaacttcaccaatgaccagacctgggcaacctggggcaagtccaccaatgacagcctgggcaactccaccaatgaccagcctggggcaactccaccaatacagacctcggacaactccaccaataccagacctggggcaactccaccaataccaggcctggggacaactccaccaataccagacctcggacaactccacaatgaccagacctgggacaactccaccaatgaccagacctggggcaactcaccaatgaccaggcctggggacaactccaccaatgaccagacctggggcaactccaccaatgaccagacctgcggcaagtccaccaatgaccaggccggggcaactccaccaatgaccagacctggggaaaacctggggcaactgcaccaatgccagacctgggacaactccaccaatgaccagacctgggaccaactccacaatgaccagacctggggcaagtccaccaataaccagacctggggcaagtcaccaatgaccagacctggggacaactccaccaatgaccagacctgggaaactccaccaatgaccagacctggtggcaactccaccaataccaggcctgggacaactccaccaatgaccagcctggggcaacctgactactggctctacacgcgcgccctcatctgcaacaccaccaacctacggcccggcggcgacgacgggacccctccacctgcgggggctggcggccctcggagaagaaggaccccggcggcctcacgcactcgggcctctggagatctgctgcctggaagggaaagcctcctcaagaaggtgcccctgagctgcctgctgcaggtaaagtactacatcagcaaagaatgtgagtggaatgttccacagcatgggcagaggactagagactacaactcccatgatccctgcggctgctcttctcacaactggactccagacttcacggggtctcatggaaatgtagtcctcatcggcttccgcatcactttccttgttttttttccacgcatttccagacttttcaaccaattgagaggtgggaagcgccttgcattattgaagccaacaacaccctctttcttacagagggttgaaaagaggcgtctgcgtgaagatcaatctttcccggaggacacggactacgaccacgacagcgcggagtatctactcatgggggcagtcattgagcaccagctgctactgctgagaacagagctgcgagatgaacgtgaccggcgctgtgtgcgtagcgtgccctccctgtgcggtgtggaccacacgagcgccgcgggcgcctgcagctggagatccgggctcccacagcagatggatccacgtaactgcaacctgaagccaggggatgtggagcgccggctcagcgtggagggtgggactgggaccggacctcccgcaacgacttcatgggggccatgtccttggcgtctcggagctgctcaaggcgcccgtggatggctggtacaagttactgaacaggaggagggcgagtattacaatgtgccggtggccgatgctgacaactcagcctcctccagaagtttgaggcttgtaactaccccctggaattgtatgagtggaggacaagttacaaacccagacattcacaacgaggagcaatgctgctgtaatgggacagcctcaggcactggggcgtccctggcacagcctgagtcagagaaacttcctagagagtcccaccgaccccaagcgctgcttcttcggggcgagtccaggaccctgcacatctccgacttcagcttcctcatggttctaggaaaaggcagtttgggaaggttggattcctgggatcttgaaaaaggactgatcgtccaggacgacgatgtggactgcacgctggtggagaaacgtgtctggcgctggggggccggggtcctggcggccggccccacttcctcacccgctccactccaccttccagaccccggaccgcctgtatttcgtgaggagtacgtcaccgggggagacttgatgtaccacattcaacagctgggcagtttaaggagccccatgcagcgtgagtctcggccaacagagaatggtcgggttctacgcggcagaaatcgctatcggcctcttttccttcacaatcagggcatcatctacagggacctgaagctggacaatgtgatgctggatgctgagggaccatcaagatcactgactttggcatgtgtaaggagaacgtcttccccgggcgacaacccgcaccttctgcgggaccccggactacatagccccggagcctcctcagttgtcggccctggaagtgcccagcggcggcagcgccagacgcgccccgttagctcagcgtcgctagcatccgcagccgccaccaggccccgcccagcggccgcagccagccagccgcgcccgggacgactgcagagcgcgccctccaaccccacccagccctcagacccttcagctgccgctgtcgtctttgcttcagccgcagtcagccactggctgccgaggcgttcgatccctagagggaggagcctgtccaaacggacgctaacggcctcctccccctcaggtgctcttacagcctgttccaagtgtggcttaatccgctccaccaccagatctttctccgtggattcctctgctaagaccgctgcccctgggctccttcgcctgctgcagctggtgtctacctgcgtggccttctcgctggggctagcgtgggcgcctggacggggtccatgggcaactggtccatgttccctggtgcttctgcttctccgtgaccctgatcatcctcatcgtggagcttgcgggctccaggcccgcttccccctgtcttggcgcaacttccccatcacttcgcctgctatgcggccctcttctgcctctcggcctccatcatctacccaccacctatgtccagttcctgtcccacggccgttcgcgggaccacgcatcgccgccaccttcttctcctgcatcgcgtgtgtggcttacgccaccgagtggcctggacccgggcccggcccggcgagatcactggctatatggccccgtacccgggctgctgaaggtgctggagaccttcgttgcctgcatcatttcgcgttcatcagcgaccccaacctgtaccagcaccagccggccctgggtggtgcgtggcgcttcctgtcggggctggccttgctgtctgtcctcctctatgccaccgccttgttctctggcccctctaccagttcgatgagaagtatggcggccagctcggcgctcgagagatgtaagctgcagccgcagccatgcctactacgttgtgcctgggaccgccgactggctgtggccatcctgacggccatcaaccactggcgtatgtggctgacctgtcacctggaggtggctggaaggccagtggactccacatttagggagagtgttacaagaggactcggattcccccaccttcccttcggctttgggaatccaggaaacccgccccgaacccctgaaaagtcccagagaagtcccaacatccgggcgaactggcgtgtttcattacccggtagcatgaaccattatccgtcagccactccactggagacgacggagatcgttgccgaagcggcgttccaccgctcccagcatgacgtcctctctccgataacatggtgtataggagaagcacatccgtatcatcagtgtgacgactgcggcggccatccatcagtcatcggttcgtctgagaatgacgtgcaactgcgcacgcgacacccgagacaacggctgactaagcttactccccatccccgggcaataagggcggccgcgtaccagtttaatagcgcgatcgaggtcaggccgccaatcactggcgtaccggtgcctggtgcaaaagcagatccaggcagtcgatatcaaaagtcaggtaaaccggcatatcacccacatctgtttcacttgggcgataacgtcatccacgctgcgatcgttcacctgcaggcgtccagcacggtaaagccgttgtctttatcaaactcgtgccgtggtcaaattcacaaccgttcgcataggtatcgtgtgggcgtcaaagtgtaccagcgccattttgccgaaatgcttcgcatagcacgcagcagcggcagcgtaacaaagtggtcaccaccgaaagagagctacgcttaccggcagccagcagcttctcggcgtgcgcctgcagcttttcctcatctcacgggcatcgccaaaggcatataccagatcgccgcagtccagacgttcagacgctcacgcatgtcgaaattccacgggaagcggttgtgtcccaggccagattcgtcgaaacctgacggatcgctgccggaccgtggcgccacccgcacgagccagaagtggccatatcgaacggcacgccagtaa

SEQ ID NO: 154899 - DNA, 1636 bp, Homo sapiens
atgcgcgacttcgcgggctgccctcgtagttctgtttccgagaccgggaatcgccgtcccaacgctggtcacaaccaagagtggaacggtgggaaggatgagactcacgacactaaccagtctcgaactcgtcactacggcgtcagaaatttttccacgattcccaactactttgagggcaacccaaagtgggggccggagaaacgcagacggcgtaccacacaggaaaagatcgcaattgttcagcagagctttgaaccggggatgacggtctccctcgttgcccggcaacatggtgtagcagccagccagttatttctctggcgtaagcaataccaggaaggaagtcttactgctgtcgccgccggagaacaggttgttcctgcctctgaacttgctgccgccatgaagcagattaaagaactccagcgcctgctcggcaagaaaacgatggaaaatgaactcctcaaagaagccgttgaatatggacgggcaaaaaagtggatagcgcacgcgcccttattgcccggggatggggaacgaaccgatgactggatggatggccgccgcagtcgtcacactgatgatacggatgtgcttctccgtatacaccatgttatcggagagctgccaacgtatggttatcgtcgggtatgggcgctgcttcgcagacaggcagaacttgatggtatgcctgcgatcaatgccaaacgtgtttaccggatcatgcgccagaatgcgcctgttgcttgagcgaaaacctgctgtaccgccatcgaaacgggcacatacaggcagagtggccgtgaaagaaagcaatcagcgatggtgctctgacgggttcgagttctgctgtgataacggagagagactgcgtgtcacgttcgcgctggactgctgtgatcgtgaggcactgcactgggcggtcactaccggcggcttcaacagtgaaacagtacaggacgtcatgctgggagcggtggaacgccgcttcggcaacgatcttccgtcgtctccagtggagtggctgacggataatggttcatgctaccgggctaatgaaacacgccagttcgcccggatgttgggacttgaaccgaagaacacggcggtgcggagtccggagagtaacggaatagcagagagcttcgtgaaaacgataaagcgtgactacatcagtatcatgcccaaaccagacgggttaacggcagcaaagaaccttgcagaggcgttcgagcattataacgaatggcattcgcatagggcaaatccagatgccaacgtagtcagcgaagatgtgctgcgtgagagcgtcggtaagtcggtcgttaaccttattcacggcgtgcgtgatatggcggcgatccgccagctgaaagcgacgcacactgattctgtttcctccgaacaggtcgataacgttcgccggatgttattggcgatggtcgatgattttcgctgcgtagtcatcaaactggcggagcgtattgctcatctgcgcgaagtaaaagatgcgccggaagatagaggcagctatagttttaacagggaagttttaacaaaacaaattgttagaagttataggccacctcacacaacaggcagatgggaaacagccgtgtgtaccgcagaatga

SEQ ID NO: 154900 - DNA, 1698 bp, Homo sapiens
ttaggcctggtgtatgcgccggtaatgaacgtaatgtacagcgcggcagaaggctaagcgtggaaagaagagtgcggtgtgcgcaagcagattcaggtccgcgatgcgcgcccgccgctggtggtgatcagccgttcccatgcggatgcggagctgaaagagtatctgcaacagcttggcgaacatcagaccacgtccatcggctcttcgctgaaattctgcctggtggcggaaggacaggcgcagctgtacccgcgcttcggaccaacgaatatttgggacaccgccgctggacatgctgtagctgcagctgccggagcgcacgttcacgactggcagggtaaaccgctggattacactccgcgtgagtcgttcctgaatccggggttcagagtgtctatttactatattcagatggcagagacgtgtatttcctattatgccatcgctggaccggttttcgtcttcttttcctgtgtgagttttctcgggccctttttctggggtgggttttttccccttttccggtttgtgcccatgtgagctctcagcgactgtgctggaggtggcccccccattgttaccgggtaaccggatgtcttctcgtatcaccatgttatcggagagctgccaacgtatggttatcgtcgggtatgggcgctgcttcgcagacaggcagaacttgatggtatgcctgcgatcaatgccaaacgtgtttaccggatcatgcgccagaatgcgctgttgcttgagcgaaaacctgctgtaccgccatcgaaacgggcacatacaggcagagtggccgtgaaagaaagcaatcagcgatggtgctctgacgggttcgagttctgctgtgataacggagagagactgcgtgtcacgttcgcgctggactgctgtgatcgtgaggcactgcactgggcggtcactaccggcggcttcaacagtgaaacagtacaggacgtcatgctgggagcggtggaacgccgcttcggcaacgatcttccgtcgtctccagtggagtggcgggaaggtgtctttgttcgcaacattgatgaagaattcggtaatgagtccgcccagaccggaatgctccatcatcagttggatcccagcgtagaaggggaattgcaccagaataccggcagtactgcgtgctgccgcgctgatagcacgcatataagccattggcgttttatgtagcagcagacccgcaatcataaacatcaggttgacggtattgatggtgatgttgaagccatgttcgctgaagtacatcgcaaggtaagcgataccgagtgcgccgatgatcaacgtcagaatgcggctttcttccagtcgctcggatggtggggcatctttcggtagcacgtcagacggttttggcatcatcatgcgggtgataaatggcatcaccacaatcaacgccacagtgatgaaaatgttaaaaccacggggatcagcaccggcgatatgctcaaccgggttgcccggtgttgcagccaacagaggcattgatccagagaagccgccaccccaggtgagaaaaccaatgtaggcgcaggcaatgagcaacggataatcagaaccggggactcgccgggcgacttcacgggcaaacattgcgcccaccaccaaaccaatccccagttgagacacaagcgatgaaccgaagaagaccagcaggtccagcttcat

SEQ ID NO: 154901 - DNA, 4017 bp, Homo sapiens; identical to SEQ ID NO: 139633

SEQ ID NO: 154902 - DNA, 2136 bp, Homo sapiens
tcatgtggacacgcaggcgtcatcatccatattgaaatagaaataaacttccatccggcgctcgtgggtgtgacacggcatggtgttccacaagttacccggagccagctccgtcagccccatactcaattggcaggtttccagtacatccgggacaaaatatttgttaatcgtgcgacggttactggtgaggttatcgcctaacgtgactggagatacttcgtccggtgtgacttttttggtgggatacgtcgtatgcgcgggtgcgcaattgtaataaaacttcgccggagtgccggtatcaatactggcaaagacaacttcttttgcacctttaccaacatacagggcgtcgcggtgaccgatttcatagcattggccatcgacagtaatcgtaccggcaccgccaatattgataacacctaactcgcgacgttcaaggaaatagcttacgccgagttgtttaccaacttccccgccaacggaaaccgttttagttatcggcataatgccgccaacaataattcggtcaatgtggctgtaaaccatggtgtactcatcggcgacaaataccttttcaaccaaaaattcattgcgcagcccttgggtatccagcgtttttgcgtgcgcactgtggatgctctgttcgtccggactccgcaaccgcccgtgttctttcggtttcaagtccccaacatcccgggcgaactggcgtgtttcattagcccggtagcatgaaccattatccgtcagccactccactggagacgacggaagatcgttgccgaagcggcgttccaccgctcccagcatgacgtcctgtactgtttcactgttgaagccgccggtagtgaccgcccagtgcagtgcctcacgatcacagcagtccagcgcgaacgtgacacgcagtctctctccgttatcacagcagaactcgaacccgtcagagcaccatcgctgattgctttctttcacggccactctgcctgtatgtgcccgtttcgatggcggtacagcaggttttcgctcaagcaacagcgcattctggcgcatgatccggtaaacacgtttggcattgatcgcaggcataccatcaagttctgcctgtctgcgaagcagcgcccatacccgacgataaccatacgttggcagctctccgataacatggtgtatacggagaagcacatccgtatcatcagtgtgacgactgcggcggccatccatccagtcatcggttcgttccccatccccgggcaataagggcgcgtgcgctatccacttttttgcccgtccatattcaacggcttctttgaggagttcattttccatcgttttcttgccgagcaggcgctggagttctttaatctgcttcatggcggcagcaagttcagaggcaggaacaacctgttctccggcggcgacagcagtaagacttccttcctggtattgcttacgccagagaaataactggctggctgctacaccatgttgccgggcaacgagggagaccgtcatccccggttcaaagctctgctgaacaattgcgatcttttcggaactacgctccatctccagcgccgcgttggtcatcgcttcactgcgccgggcatcaataagcgtagtgcggttaaccagcgccgcctgatcgctaagcgcattcaggctttgccaggcttgccatgccagcaccaacaggggcagcagaatcagcaaaaatgccagcattaccagtagtcgtaatgagcggggaaaaacgggccagcgtttcaaggtgttactctcgtcagacgcgaatagcctgatgcccaactgcttacgcgcattgcggaaaatgcgcatccatgggccatcctcgccccagttttccggatgccaggagttgctgacagtacggaaaacacgttccgggtgcggcatcataatggtgactcgaccactttcagtcgtgactgccgtaataccgttcggtgaaccgttcgggttagccgggtaggtttcagtgactttgccgaagttatcgacatagcgcagtgccaccagccctttgctttccagtgccgccagatgcgccgcatcacgcacttccacgcgcccttcaccatgagagacagcaatcggcatttgcgagcccaccat

SEQ ID NO: 154903 - DNA, 2664 bp, Homo sapiens
gaaggacgaacgaaagaacacgaaagaaagaaagaaagaaagacaacgacaacgaaagacaacgaaagaaagaacagaacagaacagaaacgaaagaaagcacagaacagaaagaaagaaagaaagcaacgacacgaacagactgaagacagaaagaaagaaagaacgaccgaacgaacgaaagaaggacggaaggacggaaggaaggaaggaacggaaggcacggaaggaaggaaggaaagaaagaacacaacagggaatcttcagacaataaatcagaaggttcaaactcccttagcctttgttactgctggggaagaccaggataactatctggaacctgtctggagaaagaggaccaccaatcatcggcatggcggcggtgatagcgcctttgagataaaacccgtattattgcgcgctttccgtacgactaaagtgattttcatgacgcaaacatttatccccggcaaagatgccgctctggaagattccatcgctcgcttccagcaaaaactttcagacctcggctttcagattgaagaggcctcctggctgaatcccgtgcctaacgtctggtctgtacatattcgcgacaaagagtgcgcactgtgttttaccaacggtaaaggcgcaaccaagaaagcggcgctggcttctgcactcggtgaatatttcgagcgtctctcaaccaactacttttttgcggacttctggctgggcgaaaccatcgccaacggtccgttcgtgcattatcccaacgaaaaatggttcccactgaccgaaaatgacgatgtgccagaagggctgctcgatgaccgtctgcgcgcgttttatgatccggagaatgaactgaccggcagcatgctgattgacctacaatccggtaacgaagatcgtggtatttgcggcctgccgtttacgcgtcagtccgacaatcagaccgtttatattccgatgaatatcattggtaacctgtacgtctccaacggtatgtccgcaggtaatacccgcaacgaagcacgcgttcagggattgtctgaagttttcgaacgctacgtgaaaaaccgcattattgctgaaagcatcagcctgccagagatcccggcagacgtgctggcgcgttacccagcagtagttgaagccatcgaaacgctggaagcggagggtttcccaatcttcgcttatgacggttcgcttggcggccagtatcagccactccactggagacgacggaagatcgttgccgaagcggcgttccaccgctcccagcatgacgtcctgtactgtttcactgttgaagccgccggtagtgaccgcccagtgcagtgcctcacgatcacagcagtccagcgcgaacgtgacacgcagtctctctccgttatcacagcagaactcgaacccgtcagagcaccatcgctgattgctttctttcacggccactctgcctgtatgtgcccgtttcgatggcggtacagcaggttttcgctcaagcaacagcgcattctggcgcatgatccggtaaacacgtttggcattgatcgcaggcataccatcaagttctgcctgtctgcgaagcagcgcccatacccgacgataccatacgttggcagctctccgatacatggtgtatacggagaagcacatccgtatcatcagtgtgacgactgcggcggcatccatccagtcatcggttcgtctgagaatgacgtgcaactgcgcacgcgacaccggagacaacggctgactaagcttactccccatccccgggcaataagggcgcgcaaaacccttggaggagattcatgcaccatgacaaactgtggctctgaagaggctgtggccacaaatgcattgcagccaatgcctaaatcccaaacccaccttggtgagctgcaatctcttcttcgcacttataactttgatgttattgatggtgtgaattatcagattgatgttacccagcccgcccgttatgacggcgagtgccagatgattaatgccaatgcggaaaggattaagaacctgacctttaatggcaagccgattgatccgaacgccatgttcctggttgccaccaataactatcgcgcttacggcggcaaatttgccggtacgggcgacagccatatcgcttttgcttcaccggatgagaaccgctcggtgctggcagcgtggattgctgatgagtcgaaacgtgcgggggaaattcacccggcggcagataacaactggcgtttagcaccgatagctggcgataagaaactggatatccgtttcgaaacctctccgtcagataaagccgcagcgtttattaaagagaaagggcagtatccagagaataagatggtgaataccactgtttctcttgtattgcttaaatatcccatggtaccgtgtgaatttgctgtggcacctggggcatttgagaaccaagtgggtaagcagtccagagaagcacagcttaaaactgttgcaaatattgaaagcagtttcaggtctgctccagtttcagaaacaagagaagcaagattcaggcaaacgatttggggaaaggagtcttcctattgtctttgtggcaagacaggacagcagaaatatttgtcaccagtgcctgttgatgcttgggttggaaacacgacgttgcatcctattgacaggtga

SEQ ID NO: 154904 - DNA, 2373 bp, Homo sapiens
atgtccaaaagcgcgaaccgaatcaaaccgaaaaaaaacactcaaataaacaacacacaatcaaaagccaccagaacatacaacaccaacacgcagtacaagccggggaaatgtcgaacccagggatggattccagtttgtcgagcgtaccgccagtatgaccgaggccgcgaccagagatcatcggaatatagccgccgcaggctgcgaccatcggccccaacatcagcgaagtcacatcgccgacgccaccggtggagtgtttatcaacaatcgggccattcagatgcaggcttttccagtcgagaacggttcctgaatctcgcatcgccatggcattgtcatatcgtggaagaaaatggtcatcgcgagggcggcaatctgcccttcggagatagtgttgtcgcgaataccgttgataaagaaacgaatttcttcatcgctcagcgcatgaccatcacgttttttacgaataatttcttgtgcgagaaacaagctgctggcgctcttaccgtcgccgtgacccagcgctttcagcaggcttgccagcaggctggaagcgccaaagcggtagtgacgcgcatctgcccagtcagcaccgaacagttcatctgcaatggcgagatatttctgcgcatcttccgcagtacgcacgccgcccgccggtttgaaaccaacggttttttctacgcccatatcacggatcacttccatcatgatgcgcgcgctttccggcgtcgcgttcacagccactttaccggtagaggttttgatgaagtccgcacccgctttgatggagatttcagacgctttacggatcagcgcttcgtctttcagttcgccggtttcgatgatcactttcagcagtacattcgctgccgcgcaagcctctttacaggctttcaccaggtcaaaaccaacctgctcgttacccgccatcagcgcgcggtacgggaacacaacgtcaacttcatcagcaccgtaggcgattgccgcacgggtttctgccagcgcgatgtcgatgtcgtcgttaccgtgtgggaagttggttaccgtagcgatacggatttcggggtgccctgctctttcagagtttgcgagcactcggataacgcgatgatagatacagataggagggtttgccgagcggagtttgggctgatgacacaggccatcacttctcgtcggtgcagcagcaaacaggttgttcctgcctctgaacttgctgccgccatgaagcagattaaagaactccagcgcctgctcggcaagaaaacgatggaaaatgaactcctcaaagaagccgttgaatatggacgggcaaaaaagtggatagcgcacgcgcccttattgcccggggatggggaacgaaccgatgactggatggatggccgccgcagtcgtcacactgatgatacggatgtgcttctccgtatacaccatgttatcggagagctgccaacgtatggttatcgtcgggtatgggcgctgcttcgcagacaggcagaacttgatggtatgcctgcgatcaatgccaaacgtgtttaccggatcatgcgccagaatgcgctgttgcttgagcgaaaacctgctgtaccgccatcgaaacgggcacatacaggcagagtggccgtgaaagaaagcaatcagcgatggtgctctgacgggttcgagttctgctgtgataacggagagagactgcgtgtcacgttcgcgctggactgctgtgatcgtgaggcactgcactgggcggtcactaccggcggcttcaacagtgaaacagtacaggacgtcatgctgggagcggtggaacgccgcttcggcaacgatcttccgtcgtctccagtggagtggctgacggataatggttcatgctaccgggctaatgaaacacgccagttcgcccggatgttgggacttgaaccgaagaacacggcggtgcggagtccggagagtaacggaatagcagagagcttcgtgaaaacgataaagcgtgactacatcagtatcatgcccaaaccagacgggttaacggcagcaaagaaccttgcagaggcgttcgagcattataacgaatggcatccgcatattcgctatcggaatcaggatgaccatgagctacaaattacacacgggacaagattctatgtggaattgtgtggtgagtcgcttccggctgagggcacagggcttaccccacttaggacgcacgctagattccaggtagatcataacgcattggtttccaggcgtgtcgtaagatcttgtacctgctgcttgtaccaggtgccgaagctgcgctcgccagacactatagcgcaaacagccctctctctcgctatatcatatacgcacacagcctctggtcactag

SEQ ID NO: 154905 - DNA, 1776 bp, Homo sapiens
tcaggtctggttgtgattggcgatggcaataccgttaatatgaatggtggacttgaactgattggagagaaaaacgcgcttgcagatgggtcgcaggttacttccttgcgcacaggatatagttataccagcgttattgtcgttagtggtgagtcgtcggtatatctgaatggagatacgacaatcagcggagaattccctctggggtttgccggggttattcgggtacaggataaagctttgctggaaattggcagtggcgccgtctggtttgggcatgatactgatgtagtcacgctttatcgttttcacgaagctctctgctattccgttactctccggactccgcaccgccgtgttcttcggttcaagtcccaacatccgggcgaactggcgtgtttcattagcccggtagcatgaaccattatccgtcagccactccactggagacgacggaagatcgttgccgaagcggcgttccaccgctcccagcatgacgtcctgtactgtttcactgttgaagccgccggtagtgaccgcccagtgcagtgcctcacgatcacagcagtccagcgcgaacgtgacacgcagtctctctccgttatcacagcagaactcgaacccgtcagagcaccatcgctgattgctttctttcacggccactctgcctgtatgtgcccgtttcgatggcggtacagcaggttttcgctcaagcaacagcgcattctggcgcatgatccggtaaacacgtttggcattgatcgcaggcataccatcaagttctgcctgtctgcgaagcagcgcccatacccgacgataaccatacgttggcagctctccgataacatggtgtatacggagaagcacatccgtatcatcagtgtgacgactgcggcggccatccatccagtcatcggttcgtctgagaatgacgtgcaactgcgcacgcgacacccggagacaacgggtgactaagcttactccccatccccgggcaataagggggcgtgggctatcacttttttggccgtcatattcacgggttcttgaggagtcctttccacgggtcttgccaaaagggcgggacttaacccgccagggggccgtcaaggggagctgcccctccggggggagttccaccagagacggttccccaaacagatacggtccactccggggagaaaaccccccccacatcactggtcgcagggcgcgaccccgcgcccacacattggggggaggacagtgaattgagaaggagtttgtaatccttttcttgatgatacaaacatctgattgttgccaaaaatgacctcctaaactggttttgcttgttgggctcgtttcttttgtgctgctgccggtgtctgtgttcctgttcttgtgtttggtttttcggatcttggctgtcttgtgtgtcttggtgtctccggtatctggggtggagttccggtgcgtgatcccttcgtgggtgtggagggtcttggaaggatttccctggatcatcggcatccaagggatctccgatgtttccttggcaaattcatgttgtgttctagagtgcttctcgatcgcatgtgtactgcctctccgtttggtgtggggcctatatggattttgtctgcctattgaattgccagggaagtttgcccgttttaatacgaaatgtggtatcctacggtctttgtttggtaactttggcccaggtttgaatggccctaccttggattgctttggggtgttgaatgatgcaacgtgcaccttgtgtgcccccat

SEQ ID NO: 154906 - DNA, 1680 bp, Homo sapiens
ctatatttccagacatctgttatcacttaacccattacaagcccgctgccgcagatattcccgtggcgagcgataacccagcgcactatgcggatgccattcgttataatgctcgaacgcctctgcaaggttctttgctgccgttaacccgtctggtttgggcatgatactgatgtagtcacgctttatcgttttcacgaagctctctgctattccgttactctccggactccgcaccgccgtgttcttcggttcaagtcccaacatccgggcgaactggcgtgtttcattagcccggtagcatgaaccattatccgtcagccactccactggagacgacggaagatcgttgccgaagcggcgttccaccgctcccagcatgacgtcctgtactgtttcactgttgaagccgccggtagtgaccgcccagtgcagtgcctcacgatcacagcagtccagcgcgaacgtgacacgcagtctctctccgttatcacagcagaactcgaacccgtcagagcaccatcgctgattgctttctttcacggccactctgcctgtatgtgcccgtttcgatggcggtacagcaggttttcgctcaagcaacagcgcattctggcgcatgatccggtaaacacgtttggaattgatcgcaggcgtaccatcaagttctgcctgtctgcgaacagcgcctatacccgacgataactcatacgttggcagctgtatcatttggtccgcccgaaacaggttggccagcgtgaataacatcgccagttggttatcgtttttcagcaaccccttgtatctggctttcacgaagccgaactgtcgcttgatgatgcgaaatgggtgctccaccctggcccggatgctggctttcatgtattcgatgttgatggccgttttgttcttgcgtggatgctgtttcaaggttcttaccttgccggggcgctcggcgatcagccagtccacatccacctcggccagctcctcgcgctgtggcgccccttggtagccggcatcggctgagacaaattgctcctctccatgcagcagattacccagctgattgaggtcatgctcgttggccgcggtggtgactaggctgtgggtcaggccgctcttggcatcgacaccaatgtgggccttcatgccaaagtgccactgattgcctttcttggtctgatgcatctccggatcgcgttgctgctctttgttcttggtcgagctgggtgcctcaatgatggtggcatcgaccaaggtgccttgagtcatcatgacgcctgcttcggccagccagcgattgatggtcttgaacaattggcgggccagttgatgctgctccagcaggtggcggaaattcatgatggtggtgcggtccggcaaggcgctatccagggataaccgggcaaacagacgcatggaggcgatttcgtacagagcatcttccatcgcgccatcgctcaggttgtaccaatgctgcatgcagtgaatgcgtagcatggtttccagcggataaggtcgccggccattaccagccttggggtaaaacggctcgatgacttccaccatgttttgccatggcagaatctgctccatgcgggacaagaaaatctcttttctggtctgacggcgcttactgctgaattcactgtcggcgaaggtaagttgatgactcat

SEQ ID NO: 154907 - DNA, 3568 bp, Homo sapiens
tcagcacgaagagattgaggcagtgagccagaagcttctgctgagcaggtggatccgcgcgatgaaaaagttggaatctcgaagctcagctggctgaagcccagacccgtgaacgtgacggcttttgcgtgtaaaagccgaaatggaaaacctgcgtcgtcgtactgaactgatattgaaaaagcccacaaattcgcgctggagaaattcatcaacgaatgctgccggtgattgatagcctggatcgtgcgctggaagtggctgataaactaacccggatatgtctgcgatggttgaaggcattgagctgacgctgaatcgatgctggatgttgtgcgtaagtttggcgttgaagtgatcgccgaaataacgtcccactggacccgaatgtgcatcaggccatcgcaatggtggaacctgcttatctattgtccttacgtcgagaatatcgattcgtactcgccaatacgcacgcgggtgcctgcgacagggatctcttccatgcctcaagaatgacgccattaaccgtgcgggcatcatcttccggtagagccagttaaaggctttgttgatttcccgcacgttggcggtgccatcgatatcaccgaaccgtcgttttgcggcgtgacctcttcggcaagtgttggcgcatcgacgtagtgaaatcgccgacaatctcttccagaatatcttcaacctcaccagcccctgaatgtctccatactcgttgacgaccaggccgacttttttttgttgcgctgaaactttaccaactgcgtgctgagcggcgtaccttcggcacaaaatagatctcgtccgcggcgcgcagcatggtttctttggtgactcttttttctccgacatcaaacgccaggcttcacgtactcgcagcatgcagcaatttttcgacgcgtttgccgagcgattaccctgtttcgccatatgtcgcagacgatagcggttgaggtcatcattccggtttcggacccggaaaaataggctgcatatccgcagcgaagcgtcctgtttgcgtgttatctcttgctgacggcagcgttcgacgaaatagtcatataacgcctctggcgatccggtgatgcacctttggagaaacttgggcgcatcccccgttcgtatcataatgagctgatatgacgggaacatggtgatataaagcgcgaaacctttcttcctgcttcgaacaggagtgcggcgacaaacgcgccgacaatcgcgtcgggttaggtacgcggatggtaggaacaatgctgtacagcaaccagaaggaatccacgacaacagcaacggaaaaatacgcagcacgttgtcgatgacagcatgttcaggcccgcatcgtgttccattctgcgaagcttggacccatcggtttttcgtcactttctcggtgtgcgggatgatgggcgtgctgctggcgtaccggcgcggattcgttctgcataacagcctgttcctgattgcgcacttccatacgtgatcatcggcggcgtggtcttcggctgcttcgcagggatgacctggatcgtgaaaagcttcgacgaggacgtggattactacgtccggtggcagagaatcgaaaaactggaaaaccagcatttcgatgagattatgcctcgctgggcgtttaaacgcttttacgttaaccaactgcgttggcagcattttcgcgccggattgttcggataacgtttctgccagtcggcgatcccggctttcatcagtcgggatcgttacggttatcaaaccagacgcgctgcagatccagccagcttgcagaatattttcgtcggcgttgatcaccagcgtattcgcctgttcagtgcacgaaggcgagtaattgccagttgatcctggtatcatcagagctttgctgcatcgctgaagataaaaggcagaatcagcctgcgccgtgccctgcatataagcgtggactgatcgggagtatgggtgccacaaccggcgaaaatcaggggtcattctcagacgaaccgatgactggatggatggccgccgcagtcgtcacacgtgatgatactgagatgtgcttctccgatattacacctatgttatcggagagctgccaacgtatggttatcgtcgggtatgggcgctgcttcgcagacagtcagaacttgatggtatgcctgcgatcaatgccaaacgtgtttaccggatcatgcgccagaatgcgctgttgcttgagcgaaaacctgctgtaccgccatcgaatacggggcactatactagtggcagatgtggcccgtgaaagaaagcaatcagcgatggtgctctgacgggttcgagttctgctgtgataacggagagagactgcgtgtcacgttcgcgctggactgctgtgatcgtgaggcactgcactgggcggtcactaccgccggcttcaacagtgaaacagtacaggacgtcatgctgggagccggtggaacgccgcttcggcaacgatcttccgtcgtctccagtggagtggctgacggataatggttcatgctaccgggctaatgaaacacgccagttcgcccggatgtcgggacttgaaccgaagaacacggcggtgcggagtccggagagtaacggaatagcagagagcttcgtgaaaacgataaagcgtgactacatcagtatcatgcccaaaccagacgggttaacggcagcaaagaaccttgcagaggcgttcgagcattataacgaatggcatccgcatagggcaaatccagatgccaacgtagtcagcgaagatgtgctgcgtgagagcgtcggtaagtcggtcgttaaccttattcacggcgtgcgtgatatggcggcgatccgccagctgaaagcgacgcacactgattctgtttcctccgaacaggtcgataacgttcgccggatgttattggcgatggtcgatgattttcgctgcgtagtcatcaaactggcggagcgtattgctcatctgcgcgaagtaaaagatgcgccggaagatgaacgtgtactggcggcaaaagagtgtaccaacatctacgcaccgctggctaaccgtctcggaatcggacaactgaaatgggaactggaagattactgcttccgttacctccatccaaccgaatacaaacgaattgccaaactgctgcatgaacggcgtctcgaccgcgaacactacatcgaagagttcgttggtcatctgcgcgctgagatgaaagctgaaggcgttaaagcggaagtgtatggtcgtccgaaacacatctacagcatctggcgtaaaatgcagaaaaagaacctcgcctttgatgagctgtttgatgtgcgtgcggtacgtattgtcgccgagcgtttacaggattgctatgccgcactggggatagtgcacactcactatcgccacctgccggatgagtttgacgattacgtcgctaacccgaaaccaaacggttatcagtctattcataccgtggttctggggccgggtggaaaaaccgttgagatccaaatccgcaccaaacagatgcatgaagatgcagaattgggtgttgctgcgcactgggaaatataa

SEQ ID NO: 154908 - DNA, 4944 bp, Homo sapiens
atgacccgcgacaacccagtcatcccacgctttattcatcgccgcgaagtcgtttttatcggccaggaaaatggtggcatccagaatgctcgatttattgctgccctgtttttccagcacggcgtcaatctgtgccagcgtgttggcggtttgctcaaaggcatcggcgtcgaggttttccggtacaccagtgtagtagagcgtgttgttgtggattactacatcagaccagcgggcttcagcatcgatacgaacgataggggtagtgtgacggacgattttgcaccagacggtcagctggcgaaagcgataccaggctttaagccgcgagaaccacagcgacagatggcggtagccgtcacccaggcgatagaaaaaggccagccgctggtggtggaagcaggaaccggtacgggcaaaacctacgcttacctggctcctgcgctgcgggcgaaaaagaaagtcattatctcgaccggctcaaaagcgttgcaggatcagctctacagccgcgatttgccaacagtctcaaaggcattgaaatatacgggcaacgtggcgctgctgaaagggcgctcaaactacctctgcctcgaacgtctcgaacagcaggcgctggcggggggcgatctgccggtacaaatcttaagcgatgtgatcctgctgcgctcctggtctaatcaaacagtcgatggtgatatcagcacctgcgtcagcgtggcggaagattcacaggcgtggccgctggtcaccagcaccaacgacaactgtcttggcagcgactgcccgatgtataaagattgctttgtggtcaaagcacgtaaaaaagcgatggacgccgatgtggtggtggtaaaccatcatctctttctggcggatatggtggttaaagagagtggatttggcgaactgatcccggaagcggacgtcatgatcttcgacgaagcccaccagctaccggacattgccagccagtattttggtcagtcactctccagtcgacaactgctcgacctggcaaaagacatcaccatcgcctaccgcaccgaattaaaagacacccagcagttacaaaagtgcgctgatcgtcttgcccagagtgcgcaggattttcgtctgcaactcggtgagccaggttatcgcggtaacctgcgtgagctgttagctaatccgcaaattcagcgggcatttttactgctcgatgacaccctggaactttgttatgacgtggcgaaactgtcactggggcgttccgccttgctggatgcggcatttgagcgcgccacgttgtatcgcacacggctgaagcggctaaaagagatcaatcagccgggctacagctactggtacgaatgcacttcgcgccattttactctggctctcacgccgctcagcgtggcggataaattcaaagagttaatggcgcaaaaacccggtagctggatcttcacctcagcaacgctgtcggtgaacgacgatctgcatcatttcacctcgcggcttggcatcgaacaggccgatagctgttctataggaaacagctatgtttttagactagtcattggagaacagatgattgatgtcttagggccggagaaacgcagacggcgtaccacacaggaaaagatcgcaattgttcagcagagctttgaaccggggatgacggtctccctcgttgcccggcaacatggtgtagcagccagccagttatttctctggcgtaagcaataccaggaaggaagttttatctgctgtcgcccgccggaaaacaggttgttcctgcctctgaacttgctgccgccatgaagcagattaaagaactccagcgcctgctcggcaagaaaacgatggaaaatgaactcctcaaagaagccgttgaatatggacgggcaaaaaagtggatagcgcacgcagtcagccgttgtctccggggtgtcgcgtgcgcagttgcacgtcattctcagacgaaccgatgaaagtcgccatttttgctccatgtgtgggccgaaattctgctcgatgaaaatcagccaggaagtgcgtgattacgccgccacgcaaactattgaaatgggaatggcggatatgtcggagaacttccgtgccagaggcggagaaatctacctgcgactgtacccggtggtggacagcgtacagtggatcgaacgtctgttggatgcaggcgtacgtactctccagctacgcatcaaagatcggcgcgatgaagaggtggaagccgatgtcgtggcggcaattgcgctgggccgccgctataacgcgcgattgtttatcaacgattactggcggctggcgatcaagcatcaggcgtatggcgtccatttggggcaggaagatttgcaagccaccgatctcaatgccatccgcgcggcaggcctgcggctgggcgtttcgacacatgacgatatggaaatcgacgtcgcgctggcagcacgcccctcttatatcgcgctgggacatgtgttcccgacgcaaaccaaacagatgccttctgcaccgcagggctggaacagctggcacggcatgttgagcgactggcggattatcccaccgtggcgattggcgccgccaaatcctgctcgacgatatcgctctggacgggcagcaaaactgctcgacagccaggagaaaagcggtaccgccgcgctggagcgtcgtgaaactaagggctatgaagagatggtgaacaacggacgtaccgcgttcgtgactgcgccgttattaacgtcgctggaaggcggcgtaccggttgttgtggatgggcaaattattggtgccgtgggcgtttctggtttaaccggagcacaggatgcgcagagccgtttacgcattgacgccaattttaaacgttttgtggatgaagaagttttaccgggaacagggctggacgctgcggcgttctggcgcaattttgatgagatcgttcatgatctggcaccagaaaatcgtcagttgctggcagaacgcgatcgcattcaggcagcgcttgatgagtggcatcgcagcaatccggggccggtaaaagataaagcggcctataaatctttcctgcgtgaactgggctacctggtgccgcaaccggagcgcgtgacggtggaaaccacgggcattgacagcgaaatcaccagccaggcggggccgcagctggtggttccggcaatgaacgcccgctacgcgctgaacgcggcgaacgctcgctggggctcactgtacgatgcgttatacggcagcgacatcatcccgcaggaaggggcgatggtcagcggctacgatccgcaacgcggtgagcaggttatcgcctgggttcggcgtttcctcgatgaatctctaccgctggaaaacggcagctatcaggatgtggtggcgtttaagctgcaaatcgatgccaatgggcggattggcaaaaacgatccggcgcacatcaacgatgttatcgtcgaagctgctatcagtaccattctcgactgcgaaaattccggtcgcgcggttaatccggagataaaatctgttgtaccgcacctgctgggcctaatcaagggactcttcaagagaaatggggaaaaacgttcgccaatcgtcggtaaactgattacgatcgccataaacataacttgccgtagcttccaaaattgctctggcttcgcaactatgatccgttcatggtctttcggtgaagttaaaaagccggaaaccatcaactaccgtacgttcaaaccagaacgtgacggccttttctgcgcccgtatctttgggccggtaaaagattacgagtgcctgtgcggtaagtacaagcgcctgaaacaccgtggcgtcatctgtgagaagtgcggcgttgaagtgacccagactaaagtacgccgtgagcgtatgggccacatcgaactggcttccccgactgcgcacatctggttcctgaaatcgctgccgtcccgtatcggtctgctgctcgatatgccgctgcgcgatatcgaacgcgtactgtactttgaatcctatgtggttatcgaaggcggtatgaccaacctggaacgtcagcagatcctgactgaagagcagtatctggacgcgctggaagagttcgatgggggcggaacaatccaggctctgctgaagagcatggatctggagcaagagtgcgaacagctgcgtgaagagctgaacgaaaccaactccgaaaccaagcgtaaaaagctgaccaagcgtatcaaactgctggaagcgttcgttcagtctggtaacaaaccagagtggatgatcctgaccgttctgccggtactgccgccagatctgcgtccgctggttccgctggatggtggtcgtttcgcgacttctgacctgaacgatctgtatcgtcgcgtcattaaccgtaacaaccgtctgaaacgtctgctggatctggctgcgccggacatcatcgtacgtaacgaaaaacgtatgctgcaggaagcggtagacgccctgctggataacggtcgtcgcggtcgtgcgatcaccggttctaacaagcgtcctctgaaatctttggccgacatgatcaaaggtaaacagggtcgtttccgtcagaacctgctcggtccatacctgcgtctgcatcagtgcggtctgccgaagaaaatggcactggagctgttcaaaccgttcatctacggcaagctggaactgcgtggtcttgctaccaccattaaagctgcgaagaaaatggcatttgaaccggtaatgatcgaaggtaaagctatccagctgcacccgctggtttgtgcggcatataacgccgacttcgatggtgaccagatggctgttcacgtaccgctgacgctggaagcccagctggaagcgcgtgcgctgatgatgtctaccaacacaacttgggggccagagctagatcctgacttcaaaccaaccaaccaaccaaccaattatccataa

SEQ ID NO: 154909 - DNA, 367 bp, Homo sapiens; identical to SEQ ID NO: 142329

SEQ ID NO: 154910 - DNA, 479 bp, Homo sapiens; identical to SEQ ID NO: 142330

SEQ ID NO: 154911 - DNA, 751 bp, Homo sapiens
aattatattttttattattttttcaaaataaaaggggtttatgtaacaaaaaacaaaaaaacaaacaaacaaaaaaacacagtaaaagataccacccagctagcagaaaggactcagcactgccttcagccttcacttactcagaaataactcatatctcaacctcagcaagccccaagcagtagaatgaggcttccctggaaagaggctgagactcacaggctggggatttaagaccctctcaccgtccaccttccttccttctttggtcttggaagatgaaaggctccatttttaaagggtggctgcagtggtcattctctgacagtgctcctccaaattggtgtatctatcagagtcagtgtaggtaaagattcgtcggtttttcttgccacccgaattctccagcttcaggatctcctgacggtactgataatccaaaggactctgacaggctgtttcattttggtacagatctacttcaaactggctaaagagcttctcctgccacccaatcacaatctcctcctcttcgtcttcctctgggcggtgtccactggcagttggctgaggcctaaaagtggccaagtctatgaggtccttcccgagctcggcagcaggctgataatgaagaaagttgcttgatgtgattctttgcaggtggactcggaggcgcaagttgcgcacggggtcccgggagcgatacactgcctccccggtgtcagtgctccagacggtctccgccacgaaa

SEQ ID NO: 154912 - DNA, 2024 bp, Homo sapiens
ctacactgactctgatagatacaccaatttggaggagcactgtcagagaatgaccactgcagccagcgaggtgccttcattcttggtcgagcgaatggcaaatgtcaggcgtcgccggcaggacaggcgagggatggagggcggcatcctcaagtcacgcatcgtcacctgggagccctcagaagagtttgtcaggaacaaccacgtcattaacacccctcttcagacaatgcacatcatggcagacctggggccctataaaaagcttggctataagaagtatgaacatgtcctgtgtactctgaaggtggatagcaatggtgtgatcacagtaaagcctgacttcacgggcctcaaaggaccctacaggattgagacggagggggagaagcaggagctgtggaaatatacgatcgacaatgtttccccccacgcacagccggaggaggaggagcgggaacggcgagtgttcaaggatctttatggccggcacaaggagtatctcagcagcctcgtaggcaccgactttgagatgactgtcccaggtgccctccggctctttgtaaatggagaggtcgtttcagcccaaggctatgagtatgacaatctctacgtccacttctttgtagaattgccaactgctcgcgagcttactatatttggtctttggctttcagactggtcaagcccagcattccagcagctctcaggagtaacacagacctgcaccaccaagtccctggcaatggacaaggtggctcacttctcctacccattcacgtttgaagccttcttcctccatgaggatgaatcttctgatgcactcccggagtggcctgtgctctactgtgaggtcctctcgctggacttctggcagaggtaccgtgtggaaggctatggggctgtggtgctgcctgccactccaggctcacacaccctgacagtctccacgtggagacctgtggagcttggcacggtggctgagctgaggaggtttttcattggcggttctctggaactggaggacctctcctatgtacggataccaggatccttcaagggggaacgcctgagccgctttggactccgcacagagaccacaggcactgtcaccttccgcttgcactgtctgcagcagtccagggccttcatggaatcgagctcccttcagaaaaggatgcggagtgtgttggaccgtctggaagggttcagccagcagagttccattcacaatgtgctagaggccttccgtcgagcccggcgccgcatgcaggaggcccgggaaagccttccgcaagaactaatgggccccttttgaaaccttggcttcttacctaacagcagccctggcccacagtgcaagaggacaagatgggggatatctgaggccagtgctctcctgcctcttcgtctttctgattaggagaccacgttggtcttgttgaggaaccaggaaaagctggggaaatttcccggctgggcccctcttgccttaggcctttttgcagggtcttctcccctacccctgtggaaaataaaagccagagaccctgtggccccccccctttatatttgcagccactgtccaatgggcatccacagcaaggcaggctttttgaatctgaaagctgtttgggggtgaccccccaaagtgaagtctggcccttgacctcacttttctggcttgtcctcaaagtagcaggggatctgcctgttcctcccacccctttaaaaatgggagcctttcatccttcccaagacccaaagaaggaaggaaggtgggccggtgagagggtcttaaatccccagcctgtgaagtctcagcctctttcccagggaagcctcattctactgcttggggcttgcttgaggttgagatatgagttatttcttgagtaagtgaaggctgaaggcagtgctgagtcctttctgctagctgggtggtatcttttactgtgtttttttgtttgtttgttttttttgttttttgttacataaaccccttttattttgaaaaaaaataa

SEQ ID NO: 154913 - DNA, 2316 bp, Homo sapiens; identical to SEQ ID NO: 147704
  misc_feature (1)...(2316): n = a,t,c or g

SEQ ID NO: 154914 - DNA, 2681 bp, Homo sapiens
  misc_feature (1)...(2681): n = a,t,c or g
ctggaatgtgatgtcttggtcctcttaaaagcagatcagccatgactgaaactcaaggcttagctggtatctatgttgtgctacattaggtgactagaagccacttcttagtgtaatcagctcctgtttccctgtgagccttagttatattttaattcagtggctttgagtcaaggccggttctaattgaggggacccagtgtgcttcagtgttaagagtggggcaatgaagagtgaaccccaatggaagagtgatcccaactttgggaaactatctggtcattcatggaccttaaaaagctgccatggtggtcaaatggcatgtgtttgcacaaaaatgaccgatgtgtttaaccaaagctttgaaatgtgatgaagccaccaacataagcacttgcctaacagaaatcagtatttcttcctacttagaaggcttggggcccagggtaatgaggcaccagatgaagataagatctgcatcaaggaattaaatttccagtttgtccttggggttctttctggcttatgttttttcccccccatctggtaatagtcctcttctgaggattgaaagggagggcacaggaagtttgcggaggaaaggacccagttcccccagtctttgccaccattgcaccatggttgtctcggagtcccttcacctgacctttttagtcagctcagatatttttgtagtttgagaatagacctattcaagagctatcagggttaaaagctgcactgaccaaagctgtacttttaaaacacaacccctgggctagtgatgtctctacttgctctatgagccttttgccagcctcagaataggcgaggtaaccttgaatttcagggccctggaaactctagctgaaacctgcctttcctaatgctcacacaagcaccaggtaccctgagcttatactgagtccagtggttcctattttatgtgtgtgtgtatgtgtgtgtgttgagtaacatgaaacttgggcagtagcagagagcactgaagnttcacatgcaagttctaatctaaagttaagcagtctcttatttgtttcgggactctgatttgactctttttctgatgctttcggcatgtctgcagcctgttctcctagcctgctgcttggagtcaggttgagcatcagtgagatgaagacagtaccttttcctctcacattggcagaatagcacgcactagatgcctgaccttgagctctagtctcccctttaaatcttaccttggcagtaacacattattcctcattcaataatttcaatgctgaaactgaactctattactgaatgccttccaatcagagttcctgatggggggatgcctgtgggggatgggcccacnccctgggggccctggcagatggggtgagttgggtaaggaagatgatgccttagttcctgatagatgctacagatgtagtttggcatttcagtttttgtccagtttgattttcactggggtttgagttcacagcaagctgtgtatgaacttgtgttttgtggtgacacatttaattaatccaattgctaaaaccctgaatctgcttattcttcagcttcacctctgcactaaccccttacccttatggtacgtcaggattttaactagtactgctttgttgactttgggaaatggtgccactcaaaagcaacttcctaacttgaggaataactcctttgtagtttactttctggtactggttggtgccttgtattgggatacagctatattcttagctcaaatgtcctctttttgagagcaaagtagttatccaatggtgagacgaggaccctggacgctcatgagaggccattccttcctgggtgttcggaccagggctctgtgttcagggaaaaccttctgggtggactttgtaagaatccagtttccaaggttagatttcacatccttaatcctgcagaggctagaatttcacagctcgctttggaacatattccaattcagccagttaaaatcagagggccaagtcgtggggggagggggccggtgttgaggagaggtatttttaaagatctggcaacttttcaggattatttgtggagaactctaaggttaagatcaggaaataaaagactgtgtgtgtgtgtgtgtgtgcgtgtgtgtgttcaagtgcctaaatcttgtttacctatcactttaaaaaaataattgaagtgtaagctaaataaaatgccttggagtttttccctggggctagtgagagttggtgcaaattccttgtgtgtgtttgccataggaaggtgagatgaccctcctactaaagaggaagtagcccaaatacagatcctgtgggtgtttttaaaaaaacctcaaccctatctggtgttttattttaatggataaaaatgtaatttttcctaaggtagcaaccttatttcccaaattaatatagatgaaaaatagatacccaattagactaaaattggaaagctttttgttcctatatttgccatagccctttggaaatatttcttagtgcctaggaggtctggggattcctctttcgtggtggtcactaaccttacttgatgcagataaaatcacttgtcaatgcaaaatgtgttagaacttgataaagctttgagtttgagaaataaaggtatatttaaaatttaaataaaacttgtcatttatgctcaaa

SEQ ID NO: 154915 - DNA, 15985 bp, Homo sapiens
gcacaatgaagtgggtaacctttatttcccttctttttctctttagctcggcttattccaggggtgtgtttcgtcgagatgcacgtaagaaatccatttttctattgttcaacttttattctattttcccactaaaataaagttttagtaaactctgcatctttaaagacttattttggcatttatttctaaaatggcatcgtattttgtatttgtgaagtcttacaaggttatcttattaataaaattcaaacatcctaggtaaaaaaaaaaaaaggtcagaattgtttagtgactgtaattttcttttgcgcactaaggaaagtgcaaagtaacttagagtgactgaaacttcacagaatagggttgaagattgaattcataactatcccaaagacctatccattgcactatgctttatttaaaaaccacaaaccctgtgctgttgatctcataaatagaacttgtatttatatttattttcattttagtctgtcttcttggttgctgttgatagacactaaaagagtattagatattatctaagtttgaatataaggctataaatatttaataatttttaaaatagtattcttggtaattgaattattcttctgtttaaaggcagaagaaataattgaacatcatcctgagtttttctgtaggaatcagagcccaatattttgaaacaaatgcataatctaagtcaaatggaaagaaatataaaaagtaacattattacttcttgttttcttcagtatttaacaatccttttttttcttcccttgcccagacaagagtgaggttgctcatcggtttaaagatttgggagaagaaaatttcaaagccttgtaagttaaaatattgatgaatcaaatttaatgtttctaatagtgttgtttattattctaaagtgcttatatttccttgtcatcagggttcagattctaaaacagtgctgcctcgtagagttttctgcgttgaggaagatattctgtatctgggctatccactaaggtcgtcactggtcacatggctattgagtacttcaaatatgaccagtgcaactgagaaacaaaaacttaaattgtatttaattgtagttaatttgaatgtatatagtcacatgtggctaatggctactgtattggacagtacagctctggaacttgcttggtggaaaggactttaatataggtttcctttggtggcttacccactaaatcttctttacatagcaagcattcctgtgcttagttgggaatatttaatttttttttttttttaagacagggtctcgctctgtcgcccaggctggagtgcagtggcgcaatctcggctcactgcaaactccgctcccgggttcacgccattctcctgcctcagcctcccgagtagctgggactacaggcgcccgccatcacgcccggctaatcttttgtatttttagtagagatggggtttcaccgtgtgccaggatggtctcaatctcctgacatcgtgatctgcccacctcggcctcccaaagtgctgggattacaggagtgagtcaccgcgcccggcctatttaaatgttttttaatctagtaaaaaatgagaaaattgtttttttaaaagtctacctaatcctacaggctaattaaagacgtgtgtggggatcaggtgcggtggttcacacctgtaatcccagcactttggaaggctgatgcaggaggattgcttgagcccaggagtacaagaccagcctgggcaagtctctttaaaaaaaacaaaacaaacaaacaaaaaaattaggcatggtggcacatgcctgtagtcctagctacttaggaggctgacgtaggaggatcgtttggacctgagaggtcaaggctacagtgagccatgattgtgccactgcactccagcctgggtgacagagtgagactctgtctcaaaaaagaaaaaggaaatctgtggggtttgttttagttttaagtaattctaaggactttaaaaatgcctagtcttgacaattagatctatttggcatacaatttgcttgcttaatctatgtgtgtgcatagatctactgacacacgcatacatataaacattagggaactaccattctctttgcgtaggaagccacatatgcctatctaggcctcagatcatacctgatatgaataggctttctggataatggtgaagaagatgtataaaagatagaacctatacccatacatgatttgttctctagcgtagcaacctgttacatattaaagttttattatactacatttttctacatcctttgtttcagggtgttgattgcctttgctcagtatcttcagcagtgtccatttgaagatcatgtaaaaattagtgaatgaagtaactgaatttgcaaaaacatgtgttgctgatgagtcagctgaaaattgtgacaaatcacttgtaagtacattctaattgtggagattctttcttctgtttgaagtaatcccaagcatttcaaaggaattttttttaagttttctcaattattattaagtgtcctgatttgtaagaaacactaaaaagttgctcatagactgataagccattgtttcttttgtgatagagatgctttagctatgtccacagttttaaaatcatttctttattgagaccaaacacaacagtcatggtgtatttaaatggcaatttgtcatttataaacacctctttttaaaatttgaggtttggtttctttttgtagaggctaatagggatatgatagcatgtatttatttatttatttatcttattttattatagtaagaacccttaacatgagatctaccctgttatatttttaagtgtacaatccattattgttaactacgggtacactgttgtatagcttactcatcttgctgtattaaaactttgtgcccattgattagtaacccctcgtttcgtcctcccccagccactggcaaccagcattatactctttgattctatgagtttgactactttagctaccttatataagtggtattatgtactgtttatctttttatgactgacttatttcccttagcatagtgcattcaaagtccaaccatgttgttgcctattgcagaatttccttcttttcaaggctgaataatattccagtgcatgtgtgtaccacattttctttatccattaatttgttgattgatagacatttaggttggttttctacatcttgactatcatgaatagtgttgcaatgaacacaggagagctactatctcttagagatgatatcatggtttttatcatcagaaaacacccactgatttctatgctaattttgttacctgggtggaataatagtacagctatatattcctcattttagatatctttgtatttctacatacaataaaaaagcagagtacttagtcatgttgaagaactttaaacttttagtatttccagatcaatcttcaaaacaaggacaggtttatctttctctcaccactcaatctatatatacctcttgtgggcaaggccagtttttatcactggagcctttcccctttttattatgtacctctccctcacagcagagtcaggactttaactttacacaatactatggctctacatatgaaatcttaaaaatacataaaaattaataaattcbgtctagagtagtatattttccctggggttacgattactttcataataaaaattagagataaggaaaggactcatttattggaaagtgattttaggtaacatttctggaagaaaaatctctatatcttaatagtcacttaatctatgatggattgtgttactcctcagttttcaatggcatatattaaaacatggccctctaaaaagggggcaaatgaaatgagaaactctctgaatgtttttctcccctaggtgaattcacctgctgcttagaagcttattttctcttgatttctgttataatgattgctcttaccctttagttttaagtttcaaaataggagtcatataactttccttaaagctattgactgtctttttgtcctgttttattcaccatgagttatagtgtgacagttaattcttatgaaaattatatagagatggttaaatcatcagaaactgtaaaccaacgattgggaggggaagcggatttttaaatgatttcctgaccaagcttaaccagtatattaaatcctttgtactgttctttggctataaagaaaaaaggtactgtccagcaactgaaacctagctttcttccatttagcataccctttttggagacaaattatgcacagttgcaactcttcgtgaaacctatggtgaaatggctgactgctgtgcaaaacaagaacctgagagaaatgaatgcttcttgcaacacaaagatgacaacccaaacctcccccgattggtgagaccagaggttgatgtgatgtgcactgcttttcatgacaatggagagacatttttgaaaaagtaagtaatcagatgtttatagttcaaaattaaaaagcatggagtaactccataggccaacactctataaaaattaccataacaaaaatattttcaacattaagacttggaagttttgttatgatgattttttaaagaagtagtatttgataccacaaaattctacacagcaaaaaatatgatcaaagatattttgaagtttattgaaacaggatacaatctttctcaaaaatttaagatagacaaattctttaatgtattccgcagatatgtatatatggttgttataattgatttcgttttagtcagcaacattatattgccaaaatttaaccatttatgcacacacacacacacacacacacacttaacccttttttccacatacttaaagaatgacagagacaagaccatcatgtgcaaattgagcttaattggttaattagatatctttggaatttggaggttctggggagaatgtcgattacaattatttctgtaatattgtctgctatagaaaagtgactgtttttcttttttaaaatttagatacttatatgaaattgccagaagacatccttacttttatgccccggaactccttttctttgctaaaaggtataaagctgcttttacagaatgttgccaagctgctgataaagctgcctgcctgttgccaaaggtattatgcacacgaatagaaaaaaagagtttattatccaacctgattttgtccattttgtggctagatttagggaccctgagtgtctgatacaaactttcccacatggtcaaaaaagccttccttttatctgtcttgaaaatctttcatctttgaaggcctacactctcgtttcttcttttaagatttgccaatgctgatctgtcagaggtaatcactgtgcatgtgtttaaagatttcaccactttttctgctggtgatcactatagtgaaatactgaaacttgtttgtcaaattgcacagcaaggggacacagttcttgtttatcttttcatgataatttttagtagggagggaattcaaagtagagaattttactgcatctagatgcctgagttcatgcattcattccataaatatatattatggaatgctttattttcttttctgaggagtttactgatgttggtggaggagagactgaaatgaattatacacaaaatttaaaaattagcaaaattgcagcccctgggatattagcgtactctttctctgacttttctcccacttttaaggctctttttcctggcaatgtttccagttggtttctaactacatagggaattccgctgtgaccagaatgatcgaatgatctttccttttcttagagagcaaaatcattattcgctaaagggagtacttgggaatttaggcataaattatgccttcaaaatttaatttggcacagtctcatctgagcttatggaggggtgtttcatgtagaatttttcttctaattttcatcaaattattcctttttgtagctcgatgaacttcgggatgaagggaaggcttcgtctgccaaacagagactcaagtgtgccagtctccaaaaatttggagaaagagctttcaaagcatggtaaatacttttaaacatagttggcatctttataacgatgtaaatgataatgcttcagtgacaaattgtacatttttctgtattttgcaaagtgctgtcaaatacatttctttggttgtctaacaggtagcactctaatagaggtcaaaatcagaatatcaatgacaatttgacattatttttaatcttttcttttctaaatagttgaataatttagaggacgctgtcctttttgtcctaaaaaaagggacacatatttaagttctatttatttataaaatcttggactcttattctaatggttcattatttttatagagctgtaggcatggttctttatttaattttttaaagttatttttaatttttgtggatatagagtaggtatacatatttacggggtatatgagatattttgatctaagtatacaacatatataatccctttatttaattttatcttccccccaatgatctaaaactatttgcttgtccttttctgtcttatagttaaattcagtcaccaactaagttgaagttacttcttatttttgcatagctccagctctgatcttcatctcatgtttttgcctgagcctctgttttcatattacttagttggttctgggagcatactttaatagccgagtcaagaaaaatactagctgccccgtcacccacactcctcacctgctagtcaacagcaaatcaacacaacaggaaataaaatgaaaataatagacattatgtatgctctctagaaactgtcaattgaactgtatttgctcatcattcctaccatctacaccaccaaaatcaacccaatttatgaaaaaaaaaccgccccaccatacaattctacacagataaacaggctatgattggttttgggaaagcagtcacctttacctgatttaggcaactgtgaaatgactagagaatgccgaaaattagacgtttacatcttgtcatagactttgcagatagtgctggatctttctttttataagtaagatcaataaaaactccctcattctgtagaagttatgatttcttttctaagagacctttagaagtcagaaaaaatgtgtttcccttgcgaaaaaagataactggagtttgtgtagtacttcccagattataaaatgcttttgtatgtattatctaatttaatcctcaaaacttcttcaatttagcatgttgtcatgacactgcagaggctgaagctcagagacgctgagccctctgctaacaagtcctactgctaacaagtgataaagcccgagctggaagtcacatctggactccaaacctgatgcttctcagcctgttgccccttttagagttcctttttaatttctgcttttatgacttgctagatttctacctaccacacacactcttaaatggataattctgccctcaggataagtgattaccatttggttcacaactcgaactaatgaattttaaaaattatttctgtatgtccattttgaattttcttatgagaaatagtatttgcctagtgttttcatataaaatctcgcatgataataccattttgattggcgattttctttttagggcagtagctcgcctgagccagagatttcccaaagctgagtttgcagaagtttccaagttagtgacagatcttaccaaagtccacacggaatgctgccatggagatctgcttgaatgtgctgatgacagggtaaagagtcgtcgatatgctttttggtagcttgcatgctcaagttggtagaatggatgcgtttggtatcattggtgatagctgacagtgggttggattgtcttctgtgctttcgtctgtcctatcttcaatctttccctgcctatggtggtggtacctttctgtttttaacctgctataaattaccagataaacccattcactgatttgtaactcctttcagtcatgctctaactgtaaatgaaggcttaaactgaagtagaacagttacaaggttttacttggcagaacatcttgcaaggtagatgtctaagaagatttttttttctttttttaagacagagtttcgctcttgtttcccaggctggggtgcaatggtgtgatcttggctcagcgcaacctctgcctcctgggttcaagtgattttcatgcctcagcctcccaagtagctgggattacaggcatgcgccaccacacctggctaattttgtatttttagtagaggcggggtttcaccatattgtccagactggtctcgaactcctgacctcaggtgatccacccgccttggcctcccaaagtgctgggattacaggcatgagccaccttgcccagcctaagaagattttttgagggaggtaggtggacttggagaaggtcactacttgaagagatttttggaaatgatgtatttttcttctctatattccttccctaaattcactctgtttgttagatgtgcaaatatttggaatgatatctcttttctcaaaacttataatattttctttctccctttcttcaagattaaacttatgggcaaatactagaatcctaatctctcatggcactttctggaaaatttaaggcggttattttatatatgtaagcagggcctatgactatgatcttgattcatttttcaaaaatcttctatattttatttagttatttggtttcaaaaggcctgcacttaattttgggggattatttggaaaaccagcattgagttttaatgaaaaaaacttaaatgccctaacagtagaaatataaaattaataaataactgagctgagcacctgctactgattagtctattttacttccgtgggaatgtttttgtagtcctatctccatctccaggtttaggagcaaacagagtatgttcatagaaggaatatgtgtatggtcttagaatacaatgaacatgttctgccaacttaataaaggtctgaggagaaagtgtagcaatgtcccttcgtgttgaacaatttccaccaacttacttataggcgccccttgccccgtatatctgtgaaaatcaagattcgctctccagtaaactgaaggaatgctgtgaaaaacctctgttggaaaaatcccactgcattgccgaagtggaaaatgatgagatgcctgctgacttgccttcattagctgctgattttgttgaaagtaaggatgtttgcaaaaactatgctcaggcaaacgatgtcttcctgggcatgtacgtagataagaaattattcttttatagctttggcatgacctcacaacttaggaggatagcctaggcttttctgtggagttcctacaatttccctgctgcccacaatgtttcttcctccttccctttcccacgctttcccaatttttgacatcgttaattcgttgaatacattgtcataacataatacatgttcacggcaaagctcaacattccttactccttaggggtatttctgaaaatacgtctagaaacattttgtgtatatataaattatgtatacttcagtcattcattccaagtgtatttcttgaacatctataatatatgtgtgtgactatgtattgcctgtctatctaactaatctaatctaatctagtctatctatctactctatgcaatgatagcaaagaagtataaaaagaaatatagagtctgacacaggtgctttatatttggtgaaaagaccagaagttcagtatcctggcaatatggtaggcaactcaattacaaaataaatgtttacgtattgtcagaagttgtggtgataaactgcatttttgttgttggattatgataatgcactaaataatatttcctaaaattatgtaccctacaagatttcactcatacagagaagaaagagaatattttaagaacatatctctgcccatctatttatcagaatccttttgagatgtagtttaaatcaaacaacctgttaataaaaataacaagtatcattcatcaaagacttcatatgtgccaagcagtgtgtgttttgtgtagattatgtcatatagttctcataatccaccttccgagacagatactatttattttttgagacagagttttactcttgttgcccaggctggagtgcaatggtgccatctcggctcactataaccttcgcctcccaggttcaagcgattctcctgcctcagcctcctgggattacaggcatgcaccaccatgcctggctaattttgtatttttactagagatggggtttcaccatgttggtcagactggtctcaaactcctgacctctggtgatatgcctgcctcagcctcctaaagtgctgggattacaggcatgagccactgtgcccagccgacagatactattattatttccattctaccgagaaggagactaaggctctgatcatttaaataagttgcctaaggtgatgcagtgatataagtagcagagctaggaattgagccttggtaactttaactctggaccccaagtccttagctactaagctttactgcatggggtttagtcaaattaagacttttggaatatgcgttacttttgagattagctttgtgatattttttgtgctcatttgtccaacaaagtctattttattttcatcttaattcgctttttgtatgaatatccaagaaggcatcctgattactctgtcgtgctgctgctgagacttgccaagacatatgaaaccactctagagaagtgctgtgccggtgcagatcctcatgaatgctatgccaaagtggtaggtttattgttcgcaaaaaatgtagttctttgactgatgattccaataatgagaaagaaaaataatgcaagaatgtaaaatgatatacagtgcaatttagatcttttcttgagatcgtttcaattctggaatcttaaacatgaaagaaaaagtagccttagaatgattaacaaaatttagactagttagaatagaaagatctgaatagagcaatctctacacacttttgatctttttttctctttttcacaatcctgagaacaaaaaaaaattaaatttaaatgttaattagaagatatttaacttagatgtaaagtgagttaacctgattccaggattcatcacgtactagaattagtatcttatggtaaattatagaacctatccctttagaatattttcaaatctttttgaggatgtttaggaatagttttacaagaaattaagttaggagaggaaatctgttctggaggatttttagggttcccactagcatatgtaatggtttctgaactattcagaatcagagaaaactcatttttcctgctttcaagaagctactgtatgccaggcaccatgcacaaacaatgaccaacgtaaaatctctcattttggagagcctggaatctaactggaaaggtgaactaataataatactatgtacaatcatagccatcatttattaaacttttcttctatgcaaggcactgtttaatttccttagcttacctggtttacagagcagctctatgagatgagtgccatctttgcccctattttagggataaggattccgaaatgtggagatggtaagtcaaattgcacaactgaagcatgacttacatgacttggctcaaatactggtcattgaactccagagcctgaatattcttaaccacttacatgatgcaagctgaccaaataaatagttcgaatgtattgtgacagagcggcattgatattcatctattcatgtggctttgagtaggaagaagaaaggatatcattctgaccagagcggtgaaaaacaacctgcatctgatcctgaggcataatactattaacacaattcttttatgtttcagttcgatgaatttaaacctcttgtggaagagcctcagaaatttaatcaaacaaaattgtgagctttttgagcagcttggagagtacaaattccagaatgcgtaagtaatttttattgactgattttttttatcaatttgtaattatttaagacttaatatagagccacctagcatagaacttttcagaatgaaaatacattgcatatttctaatcactctttgtcaagaaagataggagaggagagataaaatagttgatggggtggagaggtctatatttgwatgtagtctaaaaattgttctcttaagattggaagtatgtaggctgggagggtaaataccaaatcttggtatatcagaactgagcatgtcccttgacggttaagaaatagttaatgggcaaatagagcatggcaatattttgtagagcagcaagtagtaggccttgaatagatgtcgctcaaaaagtaatatgtaagctgaacacaaaaatgtaacaaatgaatttagatacatatttgaatattaaattcaggttgtttgggagatgcacctagtctttgatggttaaacctttccctccatagaagagacagagacagaatggcttgctggactaatgtcccaattcaatagagtcttatctacgaaggttaaaaacaagaagagacatattatacagtagatatttcttgtgtggctcatacacatggtgctcttctgattatggattttagagataataacagtgaacaagacatagtttctttcctcgagtagattaaagtcctacattgacttttaatggtgactggcattcttaatacatgattattatatattaggtactatgtcacattaattataatactttactatttttaatttaacccttgaactatccctattgagtcagatatatttccttccattttctacttgtatctttcaagtttagcatatgctgatacatatgaagctctctccaggttttattgaaagaagaaattaatcaatttattactgtccctgaattaggcaactcactttcccaagattatgcccgtggtacaggtggaactcaaagccaagtttaactagttgttcaggagaatgttttctaccctccactaacccactactctgcagatggagataatatgatgaatggaacatagcaacatcttagttgattccggccaagtgttctctgttttatctactatgttagacagtttcttgccttgctgaaaacacatgacttctttttttcaggctattagttcgttacaccaagaaagtaccccaagtgtcaactccaactcttgtagaggtctcaagaaacctaggaaaagtcagcagcaaatgttgtaaacatcctgaagcaaaaagaatgccctgtgcagaagactatgtgagtctttaaaaacatataataaattaataatgaaaaaattttccctttagatattgctaatgctacctttcataagcagaaggaagtaatgtgtgtgtgtgcatgttttgtgcatgtgtgtgtgcatgcacgtgtgtgtatgtgtgatattggcagtcaaggccccgaggatgataattttttttttttttttgagacggagtctcgctttgttgtccaggctggagtgcagtggtgccatctcggctcactgcaacctccgcctcccaagttcaagccattctcctgcctcagcctcccaagtagctgggactacaggtgcatgccaccatgcctggctaattttttgtatttttagtagaaaattttcagcttcacctcttttgaatttctgctctcctgcctgttctttagctatccgtggtcctgaaccaggttatgtgtgttggatggagaaacgcccagaaggggacagagtcaccaatggctgcacagaaatccttgggtgaacaggcgaccatgcttttcagctctgggaagtcgaagaaaacatacgttccccaaagagttttaatgcttgaaacattcacccttccatgcagatatatgcacacttttctgagaaggagagacaaatcaaagaaacaaacgtgaggagtatttcattactgcatgtgtttgtagtcttgatagcaagaactgtcaattcaagctagcaactttttcctgaagtagtgattatatttcttagaggaaagtattggagtgttgcccttattatgctgataagagtacccagaataaaatgaataactttttaaagataaaatcctctgttataatattgctaaaattattcagagtaatattgtggattaaagccacaatagaataacatgttagaccatattcagtagaaaaagatgaccaattaactgataaatttgtgcacatggcaaattagttaatgggaaccataggagaatttatttctagatgtaaataattattttaagtttgccctatggtggccccacacatgagacaaacccccaagatgtgacttttgagaatgagacttggataaaaaacatgtagaaatgcaagccctgaagctcaactccctattgctatcacaggggttataattgcataaaatttagctatagaaagttgctgtcatctcttgtgggctgtactcctcgtctaggcttaagagtaatattgcaaaacctgtcatgcccacaccaatctctccctggcattgttgtctttgcagatgtcagtgaacgcgacccagcagctcccatgagtttgcatagccttattttctatagcctccccactattagctttgaagggagcaaagtttaagaaccaaatataaagtttctcatctttatagatgagacccattttaaataaagtccaagataattaaatttttaaggatcatttttagctctttaatagcaataaaactcaatatgacataatatggcacttccaaaatctgaataatatataattgcaatgacatacttcttttcagagatttactgaaaagaaatttgttgacactacataacgtgatgagtggtttatactgattgtttcagttggtcttcccaccaactccatgaaagtggattttattatcctcatcatgcagatgagaatattgagacttatagcggtatgcctggcccaagtactcagagttgcctggctccaagatttataatcttaaatgatgggactaccatccttactctctccatttttctatacgtgagtaatgttttttctgttttttttttttctttttccattcaaactcagtgcacttgttgagctcgtgaaacacaagcccaaggcaacaaaagagcaactgaaagttgttatggatgatttcgcagcttttgtagagaagtgctgcaaggctgacgataaggagacctgctttgccgaggaggtactacagttctcttcattttaatatgtccagtattcatttttgcatgtttggttaggctagggcttacggatttatatatcaaaggaggctttgtacatgtgggcccgggatcttattttacacacaattgtcttacaaaatgactaaaacagcactttgtttttatctcctgctctattgtgccatactgttgaatgtttataatgcatgttctgtttccaaatttgtgatgcttatgaatattaataggaatatttgtaaggcctgaaatattttgatcatgaaatcaaaatattaatttatttaaacatttacttgaaatgtggtggtttgtgatttagttgattttataggctagtgggagaatttacattcaaatgtctaaatcacttaaaatttccctttatggcctgacagtaacttttttttattcatttggggacaactatgtccgtgagcttccatccagagattatagtagtaaattgtaattaaaggctatgatgcacgtgaaatcactttgcaatcatcaatagcttcataaatgttaattttgtatcctaatagtaatgctaatattttcctaacatctgtcatgtctttgtgttcagggtcaaaaacttgttgctgcaagtcaagctgccttaggcttataac

SEQ ID NO: 154916 - DNA, 311 bp, Homo sapiens
  misc_feature (1)...(311): n = a,t,c or g
atcatggatcattgttattagctttgtggctttgtgaaattctaaaggaatcaaataattcatcatgatttaaattttctagagattttgatttttttataatgtttctttcctgtagatcagtgtnnnnnnnnnnnnnnnnnnnnnnnnnnnnnnnnnnnnnnnnnngttccccactctttctttctcctttgctttttcttctctttcatacatatatgcgtgcctagatctaggaggaaacgtgttaaaaattgttttaaactacatcttgaaaatattgaagaatttgtttaagcaaaggggtcagc

SEQ ID NO: 154917 - DNA, 3212 bp, Homo sapiens
  misc_feature (1)...(3212): n = a,t,c or g
ggtgaaggtgagactcatgagggaatacaaggtagtggtgttagggagtggaggggttggcaaatctgcccttactgtgcagtttgtcactgggactttcattgagaaatatgaccccaccattgaagatttctaccgcaaagagatcgaagtggactcttccccctccgtgctggaaattctggacaccgcaggaactgagcagtttgcctccatgagagatctctacatcaaaaacggccaaggtttcatcctggtttatagcctggttaatcaacagtcttttcaggatatcaagccaatgagagatcaaattgtcagagtgaagagatatgaaaaagtcccactaatcctagtaggaaataaagtggatctggaaccagaaagagaggttatgtcttcagaaggcagagctctggctcaagaatggggctgtcctttcatggagacatcggcaaaaagtaaatcaatggtggatgaactttttgctgagatcgtcaggcaaatgaactattcatccctgccggagaagcaagatcagtgttgtacaacttgtgtcgtccagtaaagaagataacctcaatcatggccataccgagcagataaaactcagaggaaatttgcacagatgctgctttggagaactttacaacctgggttgcagaactgagccttggtaaacctgtctctattacagcatgttgccatacatctatttaagtgcataaggtctttggccttcaagatccatcgaccttaaacaggaatgcttagcacgtttaccatacgtttaaaatccattctttatcaatcagtccttttatagctttctaagttcttattgatggctaatatacaagggttaatttttaatattttaattgatttctttaatcagtttctcgacttgtatttattaaatactcaaactcagtattacctactcaatgccttttaaaagaaagttataatggagaaaaaattgagccttaaacaaatggttacttctgtatattacctcgtaccagtgcttcatcctatttgtaaaatctttctcctttaaaattattggttaatactttgagactttgtttacgtgtggcagtgttgtaaaaagaaactaaagatcacattttacctgtatggatggaatatcccttttcttcaagtgcagtttgtgatgtgttttgttttttttttttttttttttgtaattaacatgttctgaaggttacaattgatatttgaaattgactgtagagcatttagttgaagagttaagcattcagtttccataaggttttcacatgtgttaatctcatttccagcattgaattgcggcagtaacattttcctttctgtgaagtttctaaattaagttatgacctatttagcaatgcctttgaaaagggatattgtatccatggtaaattaattgtatacctaaacagagatagctcatctttgcctatcaggcttgtaattgacatctagtagacttctgcacatgtaaaattgaattcaaataaaatcatacacactttctagttcttaatatttgtctttctgaataatagtttaaaagcaatattttggttaaagttttcttggcaccaatcacaattgctttttagttatttctcaagaagcatggtcgtaattagagacaaaatctgtgtaacaggagggagaatagcgccaagtctctgggctattttttatttttgcaaatgtgctttctaatagccattgccttccatgttgtttacctaatcagcatatttttgtctgaatacttgaacattttaacagtaacgcaggtgtagaatcagaaaggaaacttatgcagagtaatattttggttcagttttaacatcgtgacaatgagggctttttctagcaatgatttttaaattgtgtaagtttgacagtattttattgttgggtttttatttgattttagttgtgtgcttttcatttgcagaagttagtaactgcagctcacctactgcaccaaagttctcgattttaggagcccagctttagtcatttgaacatgcttctaaataaaataaaacaaaaccaaaactatacttttgatctataataagagctcaataactttgtcaaggaaagctctaatatatgcagtgatggtttatgaaagggtgtggcaattttaaatttatattgtgtgtgatgttcaaataaagtggtatctacattcatgtgatttatgggtcagcatgaccattaattactgagtagaaattgactaaactttgatttactttcttgtaaatcgtggagcatttgattcctgagctaatagcgtcctagtggactcttgttcttaaattttgaattttatggggagattgtaaagatagaggcaattgaaacattgttccttatttatgaactgcttgaagtgaatacttaatttaagtttgcactttaataccaaacttaaaacctaacactcatttaaaagtaggttaagtgatcatgggatcattgttattagctttgtggctttgtgaaattctaaaggaatcaaataattcatcatgatttaaattttctagagattttgatttttttataatgtttctttcctgtagattgtgttcttgtttctctctctctctctctctctctctctctctctctctctctctctctctctctctcaaaattacagtgttcattgtcattgacctcagcagcaaatttgacttgaattcacttaggatcgcagggaatcagggggaaagtgattttaaaggtggtntccccccagcacattttaaggaaaaggggacccaaaagttattttagccttccctcaatagattgcatgttgccttattaggataataaattaatattaaatgcaatatatgtcttgtctttattatggcatctatttaggagttgttcaaatcactgcagtagggctctgcaaataaaataatgtaacctattattaagggtttaaatgtcttgtacttttacaagtgaaaggtaaattttcaaataccaagtacaaacattgaacaattacctataaagatttgtaaaagtaaaatttttccaatagatttcattcttgtcattttgtaagacgaccctgcagtccacctgtttgtaacttttttaataaaatagacatctgtattactgaaaaaaaaaaaaaaagggcggccgct

SEQ ID NO: 154918 - DNA, 608 bp, Homo sapiens
ttttttttttttttacaagaatatttagagtaactttattatgtgtaatacctctaacctggaaatgacccttgttaattaattaacaggagagcagatggataaattgtgtgtattacaatagaatactcctcagcaagggaggaggtcatacacaacaacgtggatgaatcccaaaaacctgacactcaaaactctccacaatctggtcctaacattcattagttccatagtcacttctttcccgctaatcacaccatggtctattttaattctagaagattgtcaattatctttgatcagaagcattaaagttctgacctattttccgttcttctatgtcaaaagtgatctgctatctttcctaaatattttgtattttcttatccccaaacctttccccatatcattcctcctacctagaatgcccttgctgctctcctatgcttatccaaagccccatctttcaaggacaagttcaaaacctacacttacccaccagaatgctttggggctgtcatagcactcattctggacagcacgcacatggcactcagttacaaaaatgccacatatggttaggtctttttttacccacgtctcgtgcc

SEQ ID NO: 154919 - DNA, 657 bp, Homo sapiens
  misc_feature (1)...(657): n = a,t,c or g
attgaaaatgatatgcgctgacaacaccaaacgcggagctaggcactaggggatgtcccagtcttttgcattaaaaaatattgtgacaatcttttttaaaataatttttatcttcatcaaagcagcctatggtttaaatgtcaaaaagaactaaaaggggcctctctgggtcagcttcttaatacagagggtgaacctcagaggcccagtcaacaaaggtctttgggtctggatgttggggttggtctaatcaattaaattcaaactttccactcattctcatttttagcctcatccctctttctgccgtagctaggcctctatgtgctgagccctgtgtgagcatagggagttgccccttccacttctctgttcaatcaggaaccatttcacatttgctttgcatcttccccaaaaaatgttggacgtccctcggttatatcctttttttcctcattctctgtaattcttagttttcaggagggaggaggaggatggangtatatgttagttactgccttactgggaatccttttttttaatgtattatcagctttccctttttaggcaggactacctttatggaggttatgtgcttcttcctttaagccatcctttctactctgaaataatagtgatattagggagtagctgggg

SEQ ID NO: 154920 - DNA, 969 bp, Homo sapiens; identical to SEQ ID NO: 148954

SEQ ID NO: 154921 - DNA, 963 bp, Homo sapiens
atgtgggagagtttggaacttcctagagacttggagggctcagaagactttttgaatggctttaaccaaaatgctgatgtggacaatgaagtccaggctaaggtggtctcagatggagatgaagaacttgttaggaactggagcaaaggcaaatctggtgaaacattatatctccgccttcgtaaagcaggcaataaatttctgccgggtggtattttacataatattgtcattaaacatggtctatctttagcggaagaagcagacggtaataagtcaaataggggtgaagaattatctgaatctgaggagaagttgttctatacaagtatccacgaagctaatcagttaaataaaactgtaaagtcagcccagatcagtgaatcagatttcaattttccatctgtttcaagtgagtcacatcctacagattcagggtcaatcttatgtgagtgcacagtccagaggccagcagtgcaaggaccaggtgccagcagagccacactcctgctgcagcctctagtggagaatcctcccttgcttccaccttctagtggctgctgccactccttgtggctgcatcgccccaatctctgcttccatttccacatggccttttcctctgtctatccatccaaccaagtcctagcaatgacaacaggactctcttgtagtgacagcagcaaggaggttctggaggagacaagcaagagtggagaacgggctgtcccacattcggcagattttttgaagaagcgcatctttcagattcacacaagcaggatgacgctggctgatgatgtaaccctggacgacctgatcatggctaaagatgacctctctggtgctgacatcaaggcaatctgtacagaagctggtctgatggccttaagagaacgtagaatgaaagtaacaaatgaagactacattgacttttctaaaatagaaatcagggaaggttaa

SEQ ID NO: 154922 - DNA, 2212 bp, Homo sapiens
  misc_feature (1)...(2212): n = a,t,c or g
catgtttagtaggtagctccgcatagctcttctcttgagaatgagcaatctcagggggctctccctatggccacagttcgtgctgtgcgtggcgttccaagcatgctttaggctatgctctcacaggagccagctaacatctgcacagtaactgtgaacgtctggagagactggtcagttatgaataaccatgtcttgagcacccgccctgatccaggaccatctggactctagggacacagttgtgagcacaagtctctgccctggaggagctcacaggttgtagggatcagataccaaacatggaaacagaataaatgatacaatttcagacacagaaactgctatgaaaaaatatgatctgtaacttggctgatgggagcnnnnnnnnnnnnnnnnnnnnnnnnnnnnnnnnnnnnnnnnnnnnnnnnnnnnnnnnnnnnnnnnnnnnnnnnnnnnnnnnnnnnnnnnnnnnnnnnnnnnnnnnnnnnnnnnnnnnnttgatgtctagtgagggctgctctctgcttccgagatggcacctattctgcagaggagacaaatgctcaggggacaaacaaaagagcaaaaagggcctacactagttccctgcagcattttttataaggaatacatgctgtataaggcctttttctctttttagaaggaactcatgctgtattaagctctgcctcatgcctttagccctttccaaaaggcctcatcttttagccacacagtagggattaagtttcaacacataaatttggggaaatacattcagaccatggcaaggggtgctgaatttattttttccgagcataattgagggagtgccatgtgagttgaaacaggaatgtttgttaaggtgttttgtcacaatgaggtctttgctgtaattccccttgagcaggcgatcagttgggttttcattccttcccttttttttttttccaaagatatgactccaattctgatggtaagagagaaattcagcgaacaatgttggaactgctgaaccagttggatggatttgattctaggggagatgtgaaagttatcatggcctcaaaccgaatagaaactttggatccagcacttatcagaccaggttaaatttgctttggtttcatcatggagattaactctgtgtatatatttgtgtttaagtgtgctttgggaggcctataaaatgatacataaaaaagcatatactgcagtgaaacttaggataatttacaaaaaaataggtcctcttgagatgagggttaaaacagagcatgatatggtctgtgcaccttggccctttgaattccagtcttatgtcttgtcttttcttttccataacattccctttttagcctcaagaacttgctgctttttctggaagaaataattcatgtgatggtaggatttgtcctttttacattcaggtagcatcagaagaaacagtgatttgtttgctgtcttttgtaatgtttttaacacaataggtctgcccagtttcactcaggaattgctcctttcatttatttctgaaggtatcaaagcagagagagtttcttttaaatgaagagaattcaaatgtagaaatctacaaactacaaaaatatatgtttactttttaaaatttagacatccttcccacagaattctgtccgactgaaacttcgtatgtaaggagatggggctgaggcctctgaggccatggccgagcctggggtttgggatgttgggtgtgacttccaaatctctttgtacctgcaggccgcattgacaggaagattgagttccccctgcctgatgaaaagacgaagaagcgcatctttcagattcacacaagcaggatgacgctggctgatgatgtaaccctggacgacctgatcatggctaaagatgacctctctggtgctgacatcaaggtgagagcctagccgtgtcagcttatttctgggaatgtggccgtcaatcaggaaagagtctatatgtgctcttgggatggtggttggcctggacaggtgggtgtctgtattttaatcatcatattggtttacgattacatccaaatggtatatgtgttgatattgaagtcattcttaatgcatcattttatgcagtgaatgacgctaaatcacctggagccacaaggctgagtcgctggtactaagccttaggcccaggtgactttctcaaggtgtcccgggaattccgg

SEQ ID NO: 154923 - DNA, 1668 bp, Homo sapiens
aattccggcggaagtggtggaggaacttccggcagcggcagctcaagtggccaaggcaagatgggtcaaagtcagagtggtggtcatggtcctggaggtggcaagaaggatgacgaggacaagaaaaagaaatatgaacctcctgtaccaactagagtggggaaaaagaagaagaaaacaaagggaccagatgctgccagcaaactgccactggtgacacctcacactcagtgccggttaaaattactgaagttagagagaattaaagactatcttctcatggaggaagaattcattagaaatcaggaacaaatgaaaccattagaagaaaagcaagaggaggaaagatcaaaagtggatgatctgagggggaccccgatgtcagtaggaaccttggaagagattattgatgacaatcatgccatcgtgtctacatctgtgggctcagaacactacgtcagcattctttcatttgtagacaaggatctgctggaacctggctgctcggtcctgctcaaccacaaggtgcatgccgtgataggggtgctgatggatgacacggatcccctggtcacagtgatgaaggtagaaaaggccccccaggagacctatgcagatattggggggttggacaaccaaattcaggaaattaaggaatctgtggagcttcctctcacccatcctgaatattatgaagagatgggtataaagcctcctaagggggtccatccttttggtcccacctggccacgggtaaaacctttttgcccaaggcagtagcaaaccaaaccctcagccactttcttgagagtggttggctctgaacttattcagaagtacctaggtgatgggcccaaaacccctcccgggaattgttccggagtttctgaagaactggccccgtccctccggtttattgatagaattttgcccccattgggacacaaaagatatgacctccaattcctggtgtgagaagagaattacagcgaacaatgttggaattggaactgctgaacccagttgggatgggatttgattcttaggggagattgtgaaagttatcatgggccacaaaccgaataggaaactttgggatccagcacttatcagacccaggcccgcatttgacagtaagattgagttgccccctgcatgcatgaaaagacgaagaagcgcatctttcagattcacacaagcaggatgacgctggctgatgatgtaccccctggacgaccctgatccatgggctaaagattgacctctcttggtgcttgacattcaagggcaatctgtacagaagctggtcttgatgggcctttaaggagaacgtagaatgaaagtaacaaatgaagacttcaaaaaatctaaagaaaatgttctttataagaaacaggaaggcacccctgagggggtggtatctctaatgaaccatggcttgtcatcaggaaaatggttgggagatttctcaatccctgaaagggatgaggttggggggagttgcccagaggaatccctgttcccactgattttttattagcaaaacatcctgtgtcttttggaataacaagtgtaaagtgcccattgggtggcctgttggtcactgtgcatcagtctgctttcccaataaagcgtgctctttcccaaaaaaaaaaaaaaaagaacaaa

SEQ ID NO: 154924 - DNA, 667 bp, Homo sapiens
gaggacaccactcaccacagatagccacatgggggttgcactatgcataagagagagcaaccagggactgtggtatgtaagcttttctgaatcaagaaggtgtgatagcccctgattcccttgaaaggatgcaactggcttgtttttaatttttgagacagggtctcgctctgtcactcctgctggagcgcagtggtgcaattacagctcactgcagcctgaactttccaggtttcagggatcctcctacctcagcctcccgagtgggctggggaccataggtgtgcgacacccacacccagctgtaactgggcttgtttgaaataaactctgtgtgtaggaaatgaaattcaaacttggctacaaataaattaataaacaggaactcttgcttagtcctcttgattaaaagggtagttaggctaggacacattatacaaaagagcagagtgggaagggggatttgtactcagaccatttgaggtaatactagtatcaccagatatgaaggtagcacatgatattgaccttaaatttagggctcacaccataatgtggctgacatcatccacagtagtcttggtgaattaaaaagcaatccaaaattatcacagaattccaatggttcctaatagcagtggtagtaccaagtcattatactcgtgcc

SEQ ID NO: 154925 - DNA, 1670 bp, Homo sapiens
ttctctagaccagcgtggtggaattctaaactgctgtccagattgttaatttcatttatatttattttaattaatttgttttgaatatggacaaagccttttctggggtgtgtgtgtgtgtgtatgtttgttttttaagtcgtcattattcattcgtattctttttctgtgtaatgtaatcatataaagttactttggacagagacccagttaattttctcttttgataggatacatggtttagataaggtataaagtgtccctttttattctagaggcttttcctttaattcagagattagtggagataataacatcagtcaaggctaatgtggtacatggaacttgctaatggaggttggacattctgtttcagtcttacatggatattgtttcattggtgttgaggaagaaaaaaattagatactaccatgcattgggacagcataattctaatattacattgaatatggctttttaaaaataagtattaaaaagccaatcgttttctccatttatctatcttttttgtttgtttttaatttggttgattgatatgcacccaggccgtcttatttttacttgttaaatgtctgtctaggaagaactgtgattggaaaggaattaattattatacaaataaatctggtaggatatgagtggagtaagtttgcttgaaacagaagtatattttctactttgaatcacctcaccagagtcatctgtcaagaattatgtataacaatttatctttattgcctacatacaacatactttttctgaattaagataacttctatttgtgagttgaacttcattatctgccattttgtgggaatccaaccttacattctttgggtgggactagagctgattgtcaccacaagggtatatgacaactctgttctaagacttatacctattatatagggttatacctttttttcttatgcctcagctctgtacctgacaatttatgattcagtggagccaagctagaaggaacaaaggtcatctaacactgtgatggggatgaattcctgagttttacctgcacaatgaggtggtgccccggaattcacaacagagtagtgattgatagagcataagatggctgctccagatgactcttgggtttagtgtacttgtgattgaacaagattttttatctatgaagcttgattctacaaccaaaataatagaaatggggggggggggggaatcatgtctgcttatgctttttaaaagcttatagtttaagttaaaaggtaaaatgtaaaaaactgattaaacctatacaagtctggccaatgagctctgcatgaggaaatggaaggaggaatattgaaaatgattcctaggaaagtgaacgtaagaaaggaaaatgggttttcccttttctgatcatgggcctctggaaagtattccatggcctttacccagcattcagtataaaccagagataaggacatatgtacttacgtgtgtctgtgagtgtgtgtgtgtctgagtgttattctgaacagcttgtaaatattgtagttgtttaaaatggaaaataaaagctgagttcttttggcaaatatattgcatcaaaaatacagtattgacagtggataaaacactgaggaaataaattttttttcattttgcaaaaaaaaaaaaaaaaa

SEQ ID NO: 154926 - DNA, 2945 bp, Homo sapiens
  misc_feature (1)...(2945): n = a,t,c or g
gacatcattaacggattttttttttttaacagcaaaaatggaagataattaaatgcagcacagtagttgtaaaacagatttcattgtgttatacatcacttcataaagtaagcatagttcccagttcttgcacattatgctttttgcagcattgtaccacagaataatgactccctaataactcagctgaaaaatatttagatctacttgctctaagaataaggtcaacattaaacattctcaggatgaaaagcttgctggatgaaatagtgcaccatcaggaataaaggcatgcaatatatttacagtcagatgaaacaagtgtgtccataaatcaaccaaaagaccatctcctcctttagggaaatacatggtattgcttagcccagtaccaataagttaacgtcgtgtgaaataattttgggtaattctggccctccttgaatctcatacagcccaaaccaacccagaaggcttaccccgctgggttgatggtggcttatccatttggcatctgggaaacttctcttattttgctgggatatgggctgtctagtgggtgggcttactggacttggcctaagaaaaaataagtccatcattcagattaatctgggaggctaattctaaaatcggattttatgagaattgctagatttggggctaggttaacctcatttccaaaagaaaaactcttactggagagaaaccatcatgtgggctcattctattgtgtttatatatttcacagtaaaatgattcagtcttgccaggttccatattaggaggattagaactacatcactcaatattttcttttgtctggtctaaaaatattatcaagttaaattatggacttatggattttttccattccaggacttcatttgcggggagccttcagaaaaaacaggtcacttgcagtaatatagaaggactaaactgtgattctggaagacccgggtttcccctttcctgtcccacccagtgagtcctttgtgtgtctgttaacagtgatttctggctcagtgaaatgtgataatgacttcatatttgtgaagagctaagtatcctgatattttgatcttttcaagcagataatttcaggcagaaatgatatagcttgtcttttgttaggtctcactaggggaaaaaaaaatcgctcacaagagccttgcctacctcaacaagaagtgtctctacttatacaaatggcatggtttccttttctggttactgggtccacaggtggcctcgcccatttgactttgagtttgcaaataaagtacatccttgggtttccttatctttaaacaagtaaagataaattaggttaaagtgggaagaaggttcacaggatgagaacatcaatttcagctcacagcaggtatgggtctaaagtgcctctttgcaggaaagaaagccaccaccagcagtccacctgctctcaggggaagggaccaggcattggaaaggctgcctcgggagaagtgactcaacaaaatcataagccggatgtagctttgtttcctctttctaatacgggcatatttattgccatctcaattgaagccgtgcttcaattaatggaagaaaatgcacatgaaagttctgccagaaactaaaatggctcattgtaggcaggatgtgttattaatatttaatatctatccaaccctgttctggcagggctgttctctcctcagtacttaccagagagggagtagagctaatgcacagccatactcctccccttttcatgaaatagtttcatctttacctagaggtcacgctacagatgaagagtaaaatgaaagactgaatatgatcaatactaattaaaatgggggggaggtattgaaaagagtcctaaaatgggcctacaaataatggagatacattggactcttccgtcattaacaagatttagaataggctgggaaatttcctgtttggaactgtgaactgtgacgggtgtggtccaacagaaaaaacactggagagtcatggataccgaaatacaatctgagaagttacggaaagcacacaatgccctagggcaagcttgtccaacctgtggcccgcatgaagtccaacacaaatttttaaactttcttaaaacagtctgagatttttttttttttttttgcaattttctatttttatttttttaagctcatcaactatggttagtgttagtgtgttttacatgtggcccaagaaaattcttccaatgcggtccagggaagctaaaatattggacaccccctgcctaggggaacattgtttcgtctacttggttagttcgtcctaattgcattttacctgcagtccaaaggttattttaggatgataggaactgcaaggaaccccaaacccaaaggaaaggaatcgttgaagtgggttgggggagagggagggtcatttctgaggatacatttcnggggggggaaatacaagtttgaggaggagggagctggggaggttacctgtggttgccaagtgtttttcctttgatggggaaggagtaagttggcaaagggaccaggaatctgtgtgtacatttcctggctcctgtttcccttaaccaccatcccttcaggggcattctctgggcacctttggggtcgggtaagatgctctctactgccctccgttttagctgcctttatctcgtctatatggcacttttctgcgtgaaaagacatttgccttacagggatgaaactggacttgcaagagtttgctgtagaaggtgttcaagtcaaggaagatgctcagaaatgaccactgagagggtggcatcagtgctgacttaaaaaaaaaaaaaaatctgacctcacatgttcatttttccaaaagtagagaggctcagtttctagcctctcaaaccataaggaagtaatcaaaatgagagtagatggaaatcatctcttaccttaagg

SEQ ID NO: 154927 - DNA, 1231 bp, Homo sapiens
aaaaggaagcacagaagcctttatttctggtacggctgggtgggggactggtctcctcccgtcctctgccgggctgcctgggggttgggggcctgctggtgggtgggccggcactgacaggagagggccgcgtgccaggcccatcccacagaaaagccctccttggccatggtcgggagatgcagccaaaggacagtcaggcttcctcccggtggcggcgtgggctgggcagggaaggcttcccggaggaggcatcattgtccactgagaagcaccgtggggcctggccactgcctgtgtgtctgcttggagctgggcacggctgggcccttcaaactctgctgcagccgtgggaggacagcagggtgaggggtgtggcagggtggggggcatggtggggcagggaaggtgctggggggaccacaggcgggacgtgcaggggcccactgggtcactggtactggttgggggaggacagcgtgttgcagcggctgtgcgacatgtcctcgtacaccacacatgccgccgaattcttatcccgccacgagcacagtttctttatctgtgtcctcgccagcacacacgccacccccaggcccagcccgaggaggaaggagatcaccgccagggccgcagggagggcagaggctgctggcgggtcagggagggcagaggctgtctgcgggtcagggagggcggagcctgtcggtggggcagggagggcagaggcccttggtggggcgtccgagcatctgtgccatccttgggactgttcctctgtcaccaggaccagggtgccggagccgtagacattgacctccgtgatggcctggcaggtgtaggtgccagtgtccgacagctgcaggcggtgcatggtgatagtcaggttgtcctgggaccctgagaagtcgatgcggccccggaaccgtctgtccgtagtgggcaccaccccgtcctcgtagtaaatgatgtcttggggctgtggcccgagctgcctcaggtagatcccacgcaggcccccgctggtggagcaggtgatgttgacggaggctcccacggggacagtcgtgcagtggggagactgctgcacctcttgggcagccagggccccaggcaggccgcgagccagcgccagaagcaggggcagcagcaggagcctcggaggcccggccatgttccccacacccagctctcccagccgggcgagtgcagctgagcctctctgggtcta

SEQ ID NO: 154928 - DNA, 1860 bp, Homo sapiens
atggtgttagccgacccccggaaccctccgggaagcccaccgggccccacgcggggcgccaccgacccggtccccaaggcgcgcgccgggggacgcggacgccgggccgatcagtggccggcggcggcgccccacgaggcggtgccgggttcggtcccaggcggggccaccaacgaacgtgaagccgatcatatggaagttcctgttcccagtgggacagtatcaggtgaaaggacagctgaatcgatagaagacactggggagtctgtattcaaggagtactttgaattggaagattctaaattccatccgtttcattcgacggtgtcctggggtgtttccgcgcgatattttctcgcggctgatggcagcgacccgcgtgtcgctcggttcggtaatggcctgcctgctgctggtgctgacattagggctggttattggcggcagcgccgggttgattggcgggcgcgttgcagagaatgcgccaacgtagcagaaaacaacggctttgttttgcttgcatggactctgaaagtttacaataggcccttccgatttggcacagtacccaaccggtattgcagagaccatgaagaccgggaggacgacaacaaaatttccgataataagaggaataaaaatataagaggagagatacgagaacaggatatcatcaaacaacaatacgggagcgtccctcggcgcctttgcgggcccgaggaggagcggctggcggatggggggagtgtgacccaccctgggtcccgagaagcttctgccgcgtttgggcccggcttcccagtgtgttggtacgcgtggtccgtcgggagctgggtgtgcgcgcccggcgatttctttcgcgtgtggttccctcctcggcgagtcggctctccgccggctcccgtgttaagtagtgaccggagccgacgaccgtgtttgagtggcacggggtcgggcccgcctggccctgggaaagcgtcccacggtgggggcgcgccggtctcccggagcgggactgggtcggaggatgtccgagaatcacgagggacggtggtggtggcgtgtccggttcgtggctgcggtcgctccggggcccactgtggcggtgccccctcgctaccgagctgccaccgcagctccggaagccgagagcacgatctcaaagcggccgccagatggagcccgacaaccgccgcggacgtcagcgagacagatccggctggcagggcgggccgtggaccgcgaaagcgaaaccgggagtcgagaagctctttccgaggccgaaaacgcaggccctctgccccaaccccacacaaacggtgcccaaaacgcgtctatgccttgatcccgacagagtcagaagacaacccacggcgtatagtcaagttcgaccgtcttctcagcgctccgccagggccgtgggccgaccccggcggggccgatccgagggcctcactaaaccatccaatcggtagtagcgacgggcgttacgcgacccccgacggtcggcgtcccccacttcttagaggcaagtggcgttcaccacccgagattgacatacaggtctgtgatgcccttagagtccggggctgcacgcgcgctacactgactggctcagcgtgtgcctaccctacgccggcaggcgcgggtaacccgttgaaccccattcgtgatggggatcggggattgcaattattccccatgaacgaggaattcccagtaagtgcgggtcataagcttgcgttgattaagtccctgccctttgtacacaccgcccgtcgctactaccgattggatggtttagtgaggccctcggatcggccccgccggggtcggcccacggccctggcggagcgctga

SEQ ID NO: 154929 - DNA, 1677 bp, Homo sapiens
tttttttttttcaaaaaaggaagcacagaagcctttatttctggtacggctgggtgggggactggtctcctcccgtcctctgccgggctgcctgggggttgggggcctgctggtgggtgggccggcactgacaggagagggccgcgtgcccaggcccatcccacagaaaagccctccttggccatggtcgggagatgcagccaaaggacagtcaggcttcctcccggtggcggcgtgggcttgggcaaggaaggcttcccggaggaggcatcattgtccactgagaagcaccgtggggcctggccactgcctgtgtgtctgcttggagctgggcacggctgggcccttcaaactctgctgcagccgtgggaggacagcagggtgaggggtgtggcagggtggggggcatggtggggcagggaaggtgctggggggaccacaggcgggacgtgcaggggcccactgggtcactggtactggttgggggaggacagcgtgttgcagcggctgtgcgacatgtcctcgtacaccacacatgccgccgaattcttatcccgccacgagcacagtttctttatctgtgtcctcgccagcacacacgccacccccaggcccagcccgaggaggaaggagatcaccgccagggccgcagggagggcagaggctgctggcgggtcagggagggcagaggctgtctgcgggtcagggagggcggagcctgtcggtggggcagggagggcagaggcccttggtggggcgtccgagcatctgtgccatccttgggactgttcctctgtcaccaggaccagggtgccggagccgtagacattgacctccgtgatggcctggcaggtgtaggtgccagtgtccgacagctgcaggcggtgcatggtgatagtcaggttgtcctgggaccctgagaagtcgatgcggccccggaaccgtctgtccgtagtgggcaccaccccgtcctcgtagtaaatgatgtcttggggctgtggcccgagctgcctcaggtagatcccacgcaggcccccgctggtggagcaggtgatgttgacggaggctcccacggggacagtcgtgcagtggggagactgctgcacctctgggaggacctgggctgtcaccatcagtctggccagaaggacagagaatgtcctccctgcaggggacagtggtggggatggtggggccctgagacagcccagggctgacatgtcgccaaagacacggtgccttacggggcatggagcagatctgggcaccggctgtggtgttgggggaggtgctgtcctcgtgttccgagactgtgggcttcttcctcccaaagcagcggccctgcctggacagccccggccactccccaccgggtccaccctttttccttctcttaaatgagtcctcagacactggaggccgctcagcaccccacccgcttcctgggggctgtgctgtggctcagactgggggctctgagctcatggggcagggagagctccggagctgtggccatggagagcctgggaagctcttaccttgggcagccagggccccaggcaggccgcgagccagcgccagaagcaggggcagcagcaggagcctcggaggcccggccatgttccccacacccagctctcccagccgggcgagtgcagctgagcctctctgggtcta

SEQ ID NO: 154930 - DNA, 949 bp, Homo sapiens
gtagtgggtgttgagcttgaacgctttcttaattggtggctgcttttaggcctactatgggtgttaaattttttactctctctacaaagttctttttcaaacttttccttacggtacttgttgactattcggtctcggggccggtatttagccttagatggaagtttaccacccgctttgggctgcattcccaagcaacccgacttccgggaagacccgggcgccggcgcgccgggggccgctaccggcctcacaccgtccacgggctgggcctcgatcagaaggacttgggccccccacgagcggcgccggggagcgggtcttcccgtacgccacatgtcccgcgcaccgccgcggggcggggattcgagcgctgggctcttccctgttcactcgccgtttactgagggaatcctggttagtttcttttcctccgctgactaatatgcttaaattcagcgggtcgccacgtctgctcgtgccgaattcggcacgaactgtgatgcccttagatgtccggggctgcacgcgcgctacactgactggctcagcgtgtgcctaccctacgccggcaggcgcgggtaacccgttgaaccccattcgtgatggggatcggggattgcaattatttccccatgaacgaggaattcccagtaagtgcgggtcataagcttgcgttgattaaggccctgccctttgtacacaccgcccgtcgctactaccgattggatggtttagtgaggccctcggatcggccccgccggggtcggcccacggccctggcggagcgctgagaagacggtcgaacttgactatctagaggaagtaaaagtcgtaacaagggttccgtaggtgaacctgcggaaggatcattaacggagcccggagggcgaggcccgcggcggcgccgccgccgcgcgcatccctccgcacacccaccccatgtatt

SEQ ID NO: 154931 - DNA, 443 bp, Homo sapiens
  misc_feature (1)...(443): n = a,t,c or g
cagccaaccgagggcgttcctgtcggggctgcagcggcgggagggagcccagtggaggcgccctccganngcgccactgcccatgctgaccacccagccctccggctgcttgatgtnatgagtaacaccactgtgcccaatgccccccaggccaacagcgactccatggtgggctatgtgttggggcccttcttcctcatcaccctggtcggggtggtggtggctgtgggtggaccggctgcgcatcacctgctccccatgtacagctatgacccagctgaggaactgcatgaggctgagcaggagctgctctctgacatgggagaccccaaggtggtacatggctggcagagtggctaccagcacaagcggatncactgctggatgtcaagacgtgacctganccccttnccccacccttcaaaagcctgggggttcttgaa

SEQ ID NO: 154932 - DNA, 979 bp, Homo sapiens
tttttttttttttttagccacaaaacattttatttacaaaatatatactgaatactatacatctggccccatcaccatggaaacaactccaaagcctgcctggggatttgtgcccaagcccagcccaggagggctagagaaagcaaaggtgtctaccagccgccgccatcccagaaggaaagcctcttcccatgagtgcctgtgggtgggccggtgagctcaacacccacaaagggcagaaggcctgggggcagtgaggtgatggtgagggcatgggaagcagatgctgcttagggtgggtggagggagaaatggagacccagcacccagcaggggtgagccaggtgacagcaggggaagcagatggcagggccccaggcagtccaggaccccaggctctgaagggtggggcaagggggtcaggtcacgtcttgacatccagcagtggcatccgcttgtgctggtagcccatcttccaaagcatggtacccctttgggttctccccatgtcaagaagagcagctccctgctcagcctacatgcaagttcctaaagctgggtccatagctgtacatggggagcaggtgcatggcgcagcccggtccacccgctttttcttctgtacatacattaccacagccaccaccaccccgaccagggtgatgaggaagaagggccccaacacatagcccaccatggagtcgctgttggcctggggggcattgggcacagtggtgttactcatgacatcagcagccggagggctgggtggtcagcatgggcagctggcgcttcgggagggcgcctccactgggctccctcccgccgctgcagccccgacaggaacgccctcggttggctcccgggccccggaaaagccgtcaggcgcgtgatcaaaggacccggggaaatgggccgggcctcagcacccggacgcagccaatccggtagcggaaagccggtggcctggagatttctg

SEQ ID NO: 154933 - DNA, 6577 bp, Homo sapiens
aattgttttatttatttattgagacaggatctcagttatccaggccggagtacagtggcacaatcatagctcactacagcctgaaattcctgggctcaagcaatcctcccacctcagccttcctagtagctgggatcacagataagagccactgcacttggcccaaaaacatatttaaaatgttaatactttagattggtttcagtcatgttatagggaataatggaacgtatttataccagagtattaacaatgtagaaggacccttgaaacgaagccaaaaagataggagctgtggcaattaaggagacttccaagaagtctaatactaagtagggcatccctgcttaatcaataacacttcatttcgtgaccatgagacaagaaaactacagagacttcatccctaacatccttcagctccagaaccaatgccaaatcacctaactccaggttatatgacaaaaaaaaacatctgtttaggacattctttagtgggatttgtttttctggtcacagtcacaatgacggatttaaaaaaaaaagagtatctcaacttcctattgggagtacatgttttcccctgattttaaactcatgggacaaaaagaaagtgttgactggcatctggcaagataattaaatatctgaaacaccctgaaggaaacaaagagggtactgtggtcaagagtaaggtggacaggataccatagaagatatatccagtgtatataatgataactgctaaaacaccctcaaaactcactagcagaatgtaatcaagtttattttcttgttcaaagtccaatatggatgtttttggtcaagtagctattatgccctaaatagtaactcaggtattcagacttcttctatgctatgactccatcaccgtcaaaacatgtgcttcaaggttaccttgaagaggaaggaggaagagaataatggaaatggctcagccaccctttaactgccttggtctagtattgaaacatcacttccactcattttccactgttgagaactactcacataggcctagatgcatggagctgggaaatgcagtttacctgtgtccagaaagaggacatttgggtgagcatctggccagtttcttccacagaagcaaaggtaatagtggtatgaattcaggaagatgaaaatgagctcactggggaaagagtattcaaggaagatggagcatgtgcaaagactctcagtacaaacagtttggaaagcttgaggaataaaaagcaagtctgtgtggctggagttttgtgaaaggggaggagtgggttaagatgcagatggtgatggtgacggaggcctgggcaagatcacacggggcctgaaaagtttgtcttttgttctcgaggcagtgagaatccattgaaggattttaagcagagaagtgacataagctgatttacattttaaaaagatcacatggctgtgtggaaaattaattgctttagggacacgagtagaagcaattagaccaccagtaagacagttactgcaggaagttgggtatccctaaaacccagatggctggtcagagaattcacctgggaaggaggatgaccaggggatgaaaggttctaattactggtctctgtgaaaagctgtagagagttttgtgcagttacataaatggttgggtttggagctgagcggtgtctctgccaagatcatgttgtttcttttagaactgtgttcccttaggactggactatattatgggaacagaagctggagcacaccaataactgcagaagcagtaactatttatttggagaactctcaaagggatgctgaacaagcatgaggcacggataaccaaacccaattttattcttgtctcttaccaccctccaaattttattcactgggaggtactctccctgctatggaaaaaagctgcagcgaggttgtgatgttcttaatagatagtcctgtgatcagtttaaggaacaaacataatctcaattaattagaatgtctaatcctgtgtaacaataatctgcacctgttgcagttttaaatccctttttcctctcccagctctgccccagctaagtctaggagcctgcactgggaaagggaggagtgattggtatgctcttccctctcctcggctcctctctacctaatcactgctgattgctctgggcccaagtgatgaggagaggtaaacagataaatcattttgccctgactgggtatttctatgcactgtgggcctgaaagatatttcctctcccctattctcactctcaaatgataaactgggttcctggtcccccctgaaaaaaaatcaaagcaatcagaaatgaacttctggggccctatcaggaactctggaagagggctttcataatggagcaacctcttaccactgccatttacctcaaacaggcccctccacattactcagcaatccttaccccactgcattctgagttctctctcatctcaatagcactcgacagctaacaacctgcccatcctcccataaaaaaaaaaaaaaaaaaaaaaacactggctgggcacagtggctcatgcctgtaatcccagcactttgggaggccgaggcaggccgatcactcgaggtcaggagttcgagaccagcctggccaacatggtgaaaccccgtcactactaaaaatacaaaaattagctgggcgtggtggcatgtgcctgtattcccagctactcgggagtctgaggcaggagaagtgcttgaaccagcaggcagaggtttcagtgacctgagatcacgccaccgcattccagcctgggccacagagcaagactctgtcttaaaaaaaaaaaaaaaaaaaaattaactctcctggttttactcctacatctctgggtgaaccttctcctcttccatcaccttcactgcttcattttcctttacccatccatgacatgctcctcagttctattctgagccattttctcttctcattatcttaccctgaatatctcatctattctgactttaattaccacctctaggctgctgattcccagacccccagcacagatttcacgcatgtcccacttcctaaaatccaacactttgaatggcatcaccagcctacccacagttgagcaacctggaacttacttcagattcctctcttaccaacctcaacatcccaccaattctacctaatgaagttctcctgtctgcctacttcttccatcatgactagtcaacagtgccctcatcttgtgccctagtacctgggtttctataacacccctgttctcatctatcccactcaactggaccctgtcattccttatctctccctaggtgaataagtacactggctatatctcaaatgacaagctccgggaatacaaagataaacatggcttgagaaaacaacagccaaatgcacaaaggaatcacaatgcaatatttagaagctgaagtagcactcttcacatagtactttgagagtacagatgaagaactgattttgctttgggagtagaataggaaacaactaggctgttcggaaagatgagcaaactgccagtccgatgaatatccagcagaaagaacagtacgtgtagaggcactgtgtagtgcctgcctaatgattcacagcccagcctccaaacatgccctctggactacagcctgtttcaaaacctccatccccttattagaggcatccaactggctcagggcatagaacctatgatctcccaatgggtactgtcaggtattcctggaaacaagtacaagaggccatatctttatacctgggcacatggcagataccttttgggggaggcctagaatctatcattcaaactcaccttccctcagcaccttgcctatagctttcccaggacatgctgatctgagtccactgcaaggcagagatagtggacagactcttccgccaatgaacagcccaatgcccccaagcccacatggcatcaacaagttgtttatgaacagagacccagctccctcactacccctccaaggacagaagctcagaatctattaaaagtcattaaatagcctatgaagcaggcctgttgaaaggtctagcctctcccagaggcttccttagtcaacaaatccattctttacccctcagcctccaaccagcctagggaagatcttcaaaaaacaataaggcttacaacacataatagtcatagctagtttactgagcacctcctatgttcccagccctggctacagatttctccagttaacccacacaaccaccctgcaagacaaaaattctaccattttccaaatgaggaatgtgatatacagagattaaatgactttaagtgcctctgggtagcaggccaagaattaaatccaggtctacctgattccaaaatctgtgctctcagctatatacatcccaaagtcccacaggacaataggtgttgggagtggcttgatgctatatggttccaaaaatggagatgaggggagaggggaaagataaaccactagaaatgctcggtatggggacaaccaaacagtctcaagttggtggctcagactgatgtcttgagccaagatgttggtggacaaccagttgcctcagagtcaaacagcaacagctgcctgtctgcaaccttgaaggcctgggcaaactgaagctgaaggagcagaagctatgggtgagcagaggaagctgatctgtagacagatcagatgacagcagagtggagatggcaggacaggaaggccatgtggcttcttagttggaaagaagagcaaaacctaaagatgccttgaattccaaaccatctagttttcataacacctgaagtgtcatgagacagatatccccatgttctcacaataaactctttattgtttagctagccccagtgactttatgcatcttataaccaagaagccttcagtagagcaagtctgagccagaggttttatcacactttgtcctcagggtccaccaggaaccaggtcttggctcacagccaggctggaaacagtcttcacagttctgagcctggagtttgagatctgcctcccctttcaaggaagatccagaggtcacctgcgcttgtagagacatggctgaagctgcaggcctgaaagctgagccttgggccctaccagagggggcccagtcttttggaaatcaaacaagaagaaatggctgttggtcaggtccttggagacaatcttgaagcctagcttggtcacagcccgcagaaaggttcgaacatcctcaaagcggctgctgacctcagccactttcaggagaccccctggcttcagtactctatttgcctcctctaggaagtccctgatgttggttcccatcagtgaaaggcaaaacacagccacatccacagactcatcctccagaggaacctgggccatgtcacacacagtgaccctagggtccagagaagccaagtcaaagcaatgcacagggttccggatacttgaagccaagcggcaatccccacagccgaagtcagccaccactagggatgcaggccgctggcgaagatccctggcgatgcggtccactggctgcagtggccacttcttcacttggctctggaagccgcggtggtagagaagaaaagcctcagggtcttcctggaagagacgctgtgcagcactgctgggccctgagtacaactgttcattgaggtagcgaaatcgggccccatccagccgctgtgccatgcgggctcgcaaagcccctgcccgagcctcatggctgtctgtcctgggaacaggagacacctctgtcttctctgtgggggcctcagctggggcctggtctggcacctgaggtggctgaaacttgttcttacatcttctcttattcttttgccggttccgccactgcttgcggcttaatgtatgagggggtttaggggaagtggacccagggctttgctttggtggatcatttgtagtactacccttccaggctttgggacctgtttggtcaacattgtccaggtgctgggctgaatttataggggcatgtttctggcatttcctctttcttttctcatcttcagcagagtcactgccaacaagagcctgtttgtggcattttcttcttcctttctacttcttcctcagagtcactgcaaggtgggccctgtttttgacatttcttcttccctttcttccctacttcagcagaggcactggcaaatgatgcctttttggggcatttcttcttcctttcctcctcctcctcctcagagtcacttatacataggctggggggatgcttggaaagagatgctgcctctagggcccgtaatgtggccaagagctggcggcgcttggagcccttgttttgcgaggaggccgcaggcggaggtcgtgagattacgggcccaaggcccgggctaacttggggccgcctcggcccactcaggctcttcgaacatgagggtcgggagggcagggtcgccgagtccccgctcttctccacgtgcacagcgctcctctggaagtcggagcgctcagacctgccagaaccgaccacgaaatcgtcgacccgggaattgcgga

SEQ ID NO: 154934 - DNA, 496 bp, Homo sapiens
  misc_feature (1)...(496): n = a,t,c or g
gcaactcctcgcacgtggccatctcggcgcctgtctntgcacagcctgttgatgccagcgtggggctggcctggctggccgtgggcagcatgtgcctcttcatcgccggctttgcggtgggctgggggcccatcccctggctcctcatgtcagagatcttccctctgcatgtcaagggcgtggcgacaggcatctgcgtcctcaccaactggctcatggcctttctcgtgaccaaggagttcagcagcctcatgctcctgctgctgctctgaggactcaggaacaccttcgagctttgcagacctgcggtcagccctccatgcgcaagactaaagcagcggaagaggaggtgggcctctaggatctttgtcttctggctggaggtgcttttggaggttgggtgctgggcattcagtcgctcctctcacgcggctgccttatcgggaaggaaatttgtttgccaaataaagactgacacagaaaatcaaaaaaaaaa

SEQ ID NO: 154935 - DNA, 1445 bp, Homo sapiens
ctcaccgggtgccccgccctctgccgccctcccgcgtgcaggtgtggtcatggtgttcagcacgagtgctttcggcgcgtacttcaagctgacccagggaggccctggcaactcctcgcacgtggccatctcggagcctgtctctgcacagcctgttgatgccagcgtggggctggcctggctggccgtgggcagcatgtgcctcttcatcgccggaggtcctcaggccctatggagccttctggcttgcctccgctttctgcatcttcagtgtccttttcactttgttctgtgtccctgaaactaaaggaaagacttctggaacaaaatcacagccccattttgaaggggcgatgacaagccactcactaggggatggagcaaagcctgtgactccaaagctgggcccaagccccagagccccttgccttgcccccaggggagccaagaatccagccccttggaaaccttggtcctgccagggtcccctcccttccctgtccatgctcccctcccagccccatgaacccggggcctaagaaggctcactgccctccctgttcccagctccctgctgcctgcctctgaggactcaggaacaccttccgagcttttgcagacctgcggtcagccctccatgcgcaagacttaaagcagcgggaagagggaggtggggcctctagggattctttttgtctttctggctggaggtgcttttggaggttgggtgctgggcattcggtcgcatcctctcacgcgggctgccttatcgggaaggaaatttgtttgccaaataaagacttgacactagaaaatcaggtcagtgtctctgggctttgtgcaagctcagtttgaaaagggtttattcccttcactgcccaggacaccctgtggctttacttgctcatggtcagccaagcttacccttcacactgagaagtcatttctggctacttccttgggctcagttccctgggtcatcagccatcaaatcttgttgagtttaaaaaataaccagcaaaaaaaaccaaaacaaaaaaaaacaccttttgttctgttgactttaatggagccagaagtcttttataattttattattaattagctaatatgtgttcattgtagggaaattaaaaaagatttaatatcatttttatagctgttaaccagctgctaggcactgtcctaagcactttacaaatattaactcatttatttggataaacaatgataaaactatttacagccacccctttccagagataacatctctgttgggattttgttctgccaggcacggtggctcacacctttaatcccagtgctttgggaggctgaggcaggaggatctcttgagcccagaaattcgaggctgcaccactgtactccagcctgggagacagaacaagaccccaaccccccccccgcaaaaaaaaaaaaaaaaa

SEQ ID NO: 154936 - DNA, 488 bp, Homo sapiens
ccaagaacatacaaaagaccgtagcgacaaccatttctgacgccttcaacttttaaattcaaattacgtgaaaccaccaagcctcagtgggggtttccccagaggaatccaagaccccccggccggttgccaagccgccggaatttcagcaggagaggaaggctcacccatcccaaccgcaatgcgatgcccgggagactggagaagctcaggcaggcttggaagccaatccccggcatacagcagctctcgggaatgcagagccctagagcaagaccaagcggcctcggccgacactgagagcctccagggagaggtcaggtctctctttctgtcctatttctcccttcgacttccctcccagcaggctgctattgagcattcagcaatcgccagacaaagcccttctggtctgcagaacgcactccggcaagcccaccgggagaaccaaagccgcctcctcgcccctgtggggaaaatggcgctcg

SEQ ID NO: 154937 - DNA, 351 bp, Homo sapiens
  misc_feature (1)...(351): n = a,t,c or g
cggacgcgtgggatacttcatgaagtaattttgactcatgcagtnnnnnnnnnnnnnnnnnnnnnnnnnnnnnnnnnnnnnnnnnnnnnnnnncagtgtttcatcaggtccttccatctctgggagttttttcaacccatatttctagaaattacagctgccagtttatagtagtttgagcagaggatgatttgcaaaaataaaaataaagttattttactctcnnnnnnnnnnnnnnnnnnnnnnnnnnnnnnnnnnnnagggggggcgggnnnnnnnnnnnncacaacccccccccgccggcgcggaaaaaagcaattttttttacctcccaaacaataaacacgcccc

SEQ ID NO: 154938 - DNA, 2381 bp, Homo sapiens
cttcccccggggaaagactgggccatgtgggtaatttcctccgagcctaataataaataaggctctttaaggtttaaaagtgttcaattcggggctagaggccactctggtcctcaggcacatgcagttccctccccgcaaccctaaaaaaaccctccctcctgccccaaaaggattagagttgttccccggccttcatgagccctaatacctataaaaccaagcagctactccctgtcaagggcattaattgtagtaaatggggaactgtgtgtttgcataactttagtaaaggctgcctaaaaactgttctatacaacaaaattttgcaagatatgtgtccactttaatgtatctttcacattgaaaacaaaagccaatatattttataattacagcctataatcctaagtttttaaaatatataaccatagatgttatatttccccttcaggaactgtagtagtgttcttaataagggctcactgttagtcaaatcttcatctccaaataatacaaatttgaatgttcaacaggtcattcaaataaacatcatataactcaaaattaagacattcatactatagaaaccagtctttaattactaaagttaacatatattattgcaaactaacatagctcaatctatatttgctacactcctaaagtggccgcttatcagtaatggggaaacatttattattgacatgcattactgtgaacaagaaaataaatagggttttgaaaatatctcttaaaaatttaattttaattaacaaaaataaccattcaggttgctgaacattaaaatggccaatctattgaaaatggcttcaataattgcttttaaaaatgaatacaaaactaaacagtgattaaggtgctagcctcatcaataggacaattaaaatctaaaaacattagtgttgattttctataataaacttaagccaaaaacaatgacctcaatatttacttaagacttcttgttttcatacttttctcctcattaatataaaaacaaagagctcaaggcctcaccttggtttattcactgctggttttctatgtgctgaaactagactgtcaactctgtaagagcttggaccaagtctgtcttgttcaccactatgtcctacagcactctgcacagtgcctgggaaataggaggtgatcaacgaatatctcaataactgaatcaatgcaagaggagagtaaaataactttatttttatttttgcaaatcatcctctgctcaaactactataaactggcagctgtaatttctagaaatatgggttgaaaaaaactcccagagatggaaggacctgatgaaacactgaaacacacaaatacacacacacacacacacacacacacacacacacacacacacacacgactgcatgagtcaaaattacttcatgaagtatgagatgtcaacattatgtaaataaaatttaatattgaaaaagtgatctgggaaccccgtgaaattttaacccaaaaaattttggaggaaatcacaatgggttaaagaaaacaccacaaaatctcatttgttcagataatcatttgaatgtttacatacatttttggttatttatttataactaatttaatttacatttcctcatattaacatatcctcttatttagtatgtaatcaaattatgtcagtgagaaaaatcctcatagtacccttgagttgctgattctgagaaaacactaaacatgaacatgtacaaaagagggcatttggaataaaacagcatgtgcattttttttaatatttgcacagtttgatctttgcatttctgtcgggaggaaaataggaaccaaacccggggggttacccatggctaagataatgggttcatatgactggccataaaagtaggtacatacaaacaattgaaaacaaatcacacccttagggttccatggattaccgaggatggatttcccctgccctaaggtgctttattatatttccttaaaaaataataggagcagcagcttatccacaagtctcccacaagtgcatttaatgatggaatcaaaacaacacaacagattcataaggatgagagaactgcagaacaaacccagaagtcagttttatgcttcttcttgttctggataattcagaattttgcggtgtgcctgtcgtaaatattgctgctgtttgaagtaaactttaaatgctccttttatggcaacaaacgcaattccaccctaaaataaaaaggaaaattagctttttataatgcagatttagagaaacagagtaataaaaataattttatttagatcacaaaagacgtaggctttgatgctaaactaattcagatgactgcaaatgaaacagttttcttttt

SEQ ID NO: 154939 - DNA, 1386 bp, Homo sapiens
atgccaggacgcgctcccctccgcaccgtcccgggcgccctgggtgcctggctgctgggcggcctctgggcctggaccctgtgcggcctgtgcagcctgggggcggtgggagccccgcgcccgtgccaggcgccgcagcagtgggaggggcgccaggttatgtaccagcaaagtagcgggcgcaacagccgcgccctgctctcctacgacgggctcaaccagcgcgtgcgggtgctggacgagaggaaggcgctgatcccctgcaagagagagatctttcgcgaggagggtctcttggggatagcatggtccgggactgggaggggcgctgcgcccaccgagggcggcctgctggcgggggactcagtaacacccagcgaggcggtggcagaatgcattcccaagatgtggacacaaaatggagccatgtggagcaaaagtggaagtgagaacacaatcttggagattgtcgtagtggtccaggtgactgaccaggcatctgtggcccttgatgccacacagggccatgctgggcctttcccagcacagctgtgctggcagctgctccccgggtctctccatggagcactggagtcctcaattctaacagaaatgatagaactgagtagcataaaaagctgcaagccaaaaatgaaggaaagtttattagaacaaaggaagcttattgtaactctattatttgaatatattttgctgtataaggatggagtgatgtttcagattgaccaagccaccaagcagtgctcaaagatgaccctgacacagccctgggatcctcttgacattcctcaaaactccacctttgaagaccagtactccatcggggggcctcaggagcagatcaccgtccaggagtggtcggacagaaagtcagctagatcctatgaaacctggattggcatctatacagtcaaggattgctatcctgtccaggaaacctttaccataaactacagtgtgatattgtctacgcggttttttgacatccagctgggtattaaagacccctcggtgtttacccctccaagcacgtgccagatggcccaactggagaagatgagcgaagactgctcctggacactcatccattatcttggctgtgagctccttgggtacgggtaccttcaaaaagaggtgaagaagaaggagcaggaaggggaggaggaggacacgaagaagaagaggaagaagaagaagaagaagaagaggaagaggaagaagaataagaggaggaggaggaggaagaggaagaggaggaagaggaagaggaagagggagaaggagaaggagaagagaaaaagaagaggaagaagagaagaagaaagagaaggaagaggaatggaagaagaaaaaagaaggatgtag

SEQ ID NO: 154940 - DNA, 2333 bp, Homo sapiens
atgccaggacgcgctcccctccgcaccgtcccgggcgccctgggtgcctggctgctgggcggcctctgggcctggaccctgtgcggcctgtgcagcctgggggcggtgggagccccgcgcccgtgccaggcgccgcagcagtgggaggggcgccaggttatgtaccagcaaagtagcgggcgcaacagccgcgccctgctctcctacgacgggctcaaccagcgcgtgcgggtgctggacgagaggaaggcgctgatcccctgcaagagattatttgaatatattttgctgtataaggatggagtgatgtttcagattgaccaagccaccaagcagtgctcaaagatgaccctgacacagccctgggatcctcttgacattcctcaaaactccacctttgaagaccagtactccatcggggggcctcaggagcagatcaccgtccaggagtggtcggacagaaagtcagctagatcctatgaaacctggattggcatctatacagtcaaggattgctatcctgtccaggaaacctttaccataaactacagtgtgatattgtctacgcggttttttgacatccagctgggtattaaagacccctcggtgtttacccctccaagcacgtgccagatggcccaactggagaagatgagcgaagactgctcctggtgagcctgtgcatagggaagcggcagcatcggatgtcagccccctgcggccccagctggagatggatatgagactagtcaagatgtgaatgctaattggagagaaatataattttaggaagatgcacattgatgtggggttttgatgtgtctgattttgactactcaagctctgtttacagaagaaaattgaatggcgagggtgtggccatatgaactgactagatggctaatatggacactttgggtatttctaatgcctgttcagggctggttttctgcatgcacgggtatacacataatgcagtgccatgccactagggaagggtcagtaagagaagtttgccttggagtcaagtatttattgttgacattattcagaattagtgataataaaaagcagagtgattttggtcaattttattattaaattcttaaaattccctgcagagaatgccccctttattgctggcaccagggtgggcattgctccccactgggcccctacttccaacccctgtccctgcactcccttgggttgccaaaaaaatgataacttaaatcccttccagacttaagaaatttatgggcatggcccaattgatattaaacatttagaaggaaatgaaaagctaaaataggaagtaattattcctctaaagaaacattttggagcaaggcagtttagagaatcctaatgtctacactggcatagcacgagccatgtaagcttcttttttttctatgcaagagtattgatgtatgtgctgaatcttcacagacttgtcaatacacaggcagtattctaaaatagcactgaacagggagtcaggagactattgtctcctaaaacccaggactagagttccctcgtactgtcactcctttggtcattaaatgcactgggcttgcccgcactttggccttcctagaacgctgcttcataacctctctgtctgacttctgcatctccttccaggtcagctcattcacaagagttgctcccaagcctggatgagttgccaccttgcatcttggagcatgccattcctcaccaataattattaagctgtgtgataatttcctgctttcaggacactcatcccattatcttgggctgtgagctccttgggtaacgggtaccttgtatgtttaattttatatccctaagcacaaagccaagtgcctggccacataggtcagtgcccctaagtaatttgtagagtggaagaatgcccagcctctcttgtccctggtttccttatgtgttgaatgtggttgagtttgtccattgctagggagagacttccagtaataaaatttacgtattctagatgcttcgtactgttatgttttatctgcccatttatctttcttagttaccaggagaaaatgtgtgacacctatattataatgaaaacgaatcttattacttatagtttatctatattaaacaaatttaattggcatttaaagcattctttgatattgttgcttttgcaataaatatggataatcttggttataagggagttaaaacaatgctgtaataaataaagtgtttcatgtgatcaaaatcaaatttgttatcctctctcaaaagcctgctctccctcttaccttccctaaactccagtgtccatttgccaaggccagaagctt

SEQ ID NO: 154941 - DNA, 393 bp, Homo sapiens
gagaattgtcagagctgaaagttcctttggttgctcacaactcaggtatgcacccatgtggcagccaggcagcggagccctactagactgccagtctcatgcacccagacctgtggccagattgtggcctctggctgcctcaggcattttcctctttgcattgggttttcctgcattagtaactacagctgcaacagacatcctccacattgtgcacactggttttgcctttgtcctcaagagttgatatgaaacttgtgggtgtgggaggatggagagagaactctaacacaaaacatcttattaaaattgtacttgagagacaaaaaaaaaactctgttgtattttgacagaattatttttattaaaatacacatccatgagcaaaaaaaa

SEQ ID NO: 154942 - DNA, 2050 bp, Homo sapiens
  misc_feature (1)...(2050): n = a,t,c or g
ttttttttttgactgctcatggatgtgtattttaataaaaataattctgtcaaaatacaacagagtttttttttttgtctcctcaattacaattttaaataagatgttttgtgttaaaagttcctctctcccatccctccccacaccccacaagtttgcatgctaatgcccaagtatcaactcttgaggacaaaggcaaaaccagtgtgcacaatgtggaggatgtctgttgcagctgtagttactaatgttggaaaactccaatgcaaagaggaaaatgcctgaggcaggccagaggccacnaatctggccacaggtctggggtgcatgaagactgggcagtctagtaggggctccgctgcctgggctgccacatggggtgccataccctgaggttgtgaggcaacccaaagggaactttcagcttcttgacaattctctgcctcatcttctttgtgcttgcttaaggagtgggaaggcgctaggtggcccaggcagtccccacttctgtctcgtggtgtccattttgatggcctgcacccagccacagacccatgaggatgggaatgggggttctggcttgctatgagtgccagtttttgctctggaaggagtgaccatttggtgccgcaaggggaaagtgagtagggaaggctgctccccagggccggacaaaccaagaaagccaggtcttcctcctgcctccatgggtcaggtccagcccttcaccagggctcccccaggtgcctttcccactctaggctcctggaagcaggctggtaggactggatgtgcataaggggcacctctggctggcaggcaggcaggcctggactctcagcaagagagtgggctcaagcagcttggttttggccctctccacagcttgtggggcaaaggcttatgtcccaaaggtgagctgcccaactgggacagagagcccctctggagaggaacagagtaaacaacttggaactcagctgaaaacagtgaagataaggcaacagaaaaatggggaggtggcccatgggtaaccaagtgcgagccaggcagacacccaaccccatgcagcaacacagctgtccccgaagcctccctgggccctcctcaagccactcccacaacctaagctcaggcacccgtccctcatcccctgacacaccccctgaaaggtagcaagcttcctcaagatactgcctggaagggcaacatcagccctggaaccctcatggggtttatctgcccattcggtttcaggactaaatagtgttgcccaaacccacagggataagggatagtcccggctctgctactaatttgctatgtgactttagccaagtcacttaatctcctgggcctgtttccttatttgtagcaagagaggaatgggggagatgttcactgaaccccattccagctgcaaaagcctgtggttttaatccaatcctgctaggctatgatcatttaaacagcctgatgtctccaacttctgggtttgggagctaggtagccccaggctgtcacaagagatgaatttcctttacagacaggacgcctcctaacaggccatggtctatgggtctgccagccccaaggaccaagaaaaagcagcagctataggatcatttcccaaggcagaattctgacagcacagggcccagggccactggccccatcaccagcagttggtccaattcaaacatttttcttgttgcccagctgtgggcccagtgaggcctggtgagcaatgggtatctcaggccacaccatccattcccatgtccaccaatatggagcagtagcttgcaaagcccagattcaggcagggactgaaagttcaacttccggccttgccatggctgaccttactctttgcatgggcggcttgtgcactcccctcgcaatgtgaagcacatatgcaaattccagccgtcctgctgctcctctgtgtagacttcctccctttcctcctccagggcagccagtcctctccacaggtgggccaccccaagtcccgccgacgatcgcagttagtcgtttcgtgcttggt

SEQ ID NO: 154943 - DNA, 482 bp, Homo sapiens; identical to SEQ ID NO: 146605
  misc_feature (1)...(482): n = a,t,c or g

SEQ ID NO: 154944 - DNA, 567 bp, Homo sapiens; identical to SEQ ID NO: 146606
  misc_feature (1)...(567): n = a,t,c or g

SEQ ID NO: 154945 - DNA, 1062 bp, Homo sapiens
atgcggaaaaagtttcttggcagtactattttggacctgcactatagtggatgccgagcactcgggtacagctgtggtgaccattacgtggccgacgtggacctctttgtgccttttacaagtgctgcccatttgtcatgtagcggtaaatggaactgcacattggagtccagggacacattgtgcgatgcggaggaggaagccaagaatctggtgagcgaagccatcgcagctggcatcttcaacgacctgggctccggaagcaacattgacctctgcgtcatcagcaagaacaagctggattttctccgcccatacacagtgcccaacaagaaggggaccagccccgaggaagtgagcaccaccttctgcaggcttgcttccatctcccactgcacacacaactccacatcaggagtaattcacaaggaaggaatggaacgttcagaaccagcaggtattcactgtgggctgcactcaaccttgcggaagctcagtgggctcctgatggggtggggcagcacggggccagagaacgctggcactggggttggggagtgttggtggctggcttggtggcttccagcaaatcagtctgtcttggaaatggagctaaaccagatgacctctaatgagcccacgaagtccctcgggcctttagcaggaaggcaagccacctttcaggcccagagctgtgttggggaaccgggctttgccgagctccagccctccagcacacggtcttgcagtccactggcacgtaaggcggaagctctgaatgcatgccgcaaaaatcgggcactgtcaccacagtgcccgtgtgtccaggggagaggatgggtgttccgggagcacaaggccatggcacagccagcagccttctggcagttcctgaaggacagcaagtttgacagagatattaccccagctggggctagagcagaggaacagcttggccggtacaggtgtgagaaagggactactgcagtcctcactgagaaaatcactcctctggagattgaggtgctggaagaaacagtccaaacaatggacacttcctga

SEQ ID NO: 154946 - DNA, 1942 bp, Homo sapiens
gtcgaccaggctccctgaaagcagggaatctggttcatttttgtcctcgttgtatatagagcttgaacttggtgttccccaggtccagtaccactgccgttgctgcctgccttctgtttcactgctgttttctgagtgcctcgtgtgcagcctgtccttcagccctccctgaagctctgctgaccagctgtgttccaggttccttttcacgtgctcttaagccagccttaccttgcattgtacttacttgggtcaggtgcccctgctagactcttaagcccctagggggcagggatctgggggcgtcatccacctctgcagccctagcttctggtatagcatgtgataggacatagcaggtgatgggggctctcggataagaaagggatgagtcccatctgttccacccagtaactattaggggatgggggatttgtgtttaaaaggtggggccaaaaggagagagtgattcaaagtaatggattacttcaagtgaacctataggttccttagtaggagagagagattattctgggcaagaggtcccgcccttggtctgccagcatttccccagaactaccggcttgtgttttggtgttagtttcttcctcctacagtgctgactttctcaagtaactttcagctattgttggacattctttaatcaggggatagttagtaaactgcagtcagtgggccacatctggcccactgcctgttgataatagagttttattggaacacagttatacccattttttaatgtatttgtgtgtggctgttttgtgctagcgtgacagagttgagtaggtgtggtagagacttttggccacaaagcctaaaatatttactacctggcccttttaaagataagttactaaccctctagtaactgtcagcccattgttttgtggtgattgtctgatgtggtcaagaggcggtgcatgcataaaaagttttaaaggcctggctcgggaactttgggtaacatcatcaaggtactttgagatcttttcctcatctgtgagatgggcattaaaaacaacacctgtctcgcgggaggtcttgcgcactgctagtggacgtacattgcggatgtcagagcaggccctagtttggccggggacattattgccgccgttctgtttctcaggaggaggaagccaagaatctggtgagcgaagccatcgcagctggcatcttcaacgacctgggctccggaagcaacattgacctctgcgtcatcagcaagaacaagctggattttctccgcccatacacagtgcccaacaaaaaggggaccaggtgagtgaaggagccgaagttcttcctgggtccccgggcgtcgggggccacccttggtatctccatggcatctggatggagttttcctggttctttccacattaagtacatccagtgttcccaaatcaacctcccacacagaccttcggcttgttacttgctttatgacagtgggctgctgtcaggtgtaggaaagtgatttaatttgatgggagaggtggagggtggcccaggaaagagccctaggctgggaggtggggccggagaggtttggatcatctgctgtcctttctcaagtgtcttaaagaatcccctgatttctgggagaaggtgcatttttcagggcagccccagcactttccctcagagtgccccgagattcctaactgggtgtaagtcagcaatgctaacagcctcccagaggtggccttgggagctagtgtgtgtgtgctgtgctacagggagttgtgccattgagcctgagcctacatgctgagtgggcccctcggctcagtggtgcagcgcagactcagagcagtgggagaaggttctagttgatttgctgagcagaactgggaggtttccaaacctggtggctagcatgtgtcagaggagcagctcgtttgcagctcgtgcc

SEQ ID NO: 154947 - DNA, 1078 bp, Homo sapiens
  misc_feature (1)...(1078): n = a,t,c or g
gctttcttgggaagatggcggctgtgtcggtgtatgctccaccagttggaggcttctcttttgataactgccgcaggaatgccgtcttggaagccgattttgcaaagaggggatacaagctttccaaggccccgaaaaactggcacgaccatcgctggggtggtctataaggatggcatagttcttggagcagatacaagagcaactgaagggatggttgttgctgacaagaactgttcaaaaatacacttcatatctcctaatatttattgttgtggtgctggggacagctgcagacacagccatgacaaacccagctcatttcttccaaacctgaagctccactccctcttccactggccgttcttcccagagttcgtgacagccaaatcggatgctgaagcagatgcttttcaggtatcaaggttacattggtgcagccctagttttagggggagtagatgttactggacctcacctctacaagcatctatccctcatggatcaactgaaaaagttcccttatgtcacccatgggtttctggctccattggccagcaatggctttatttgaaagataagtttaggccccagacatggaggaggaggaagcccaagaatctggtgagcgaaaanggnnccccccaatttnntcngcccagctggngcatcttcaacggacctgggctcccggaagccaaacattgaccctctgccgtcatcagcaagaaacaagcttggattttctccgccccatacacagttgcccaacaagaaggggaccaggcttggttggccggttacaggtgtgagaaagggcactactgcagtcctcactgagaaaattccactcctctggagcacttgagggtgctggaaagaaacacgtccaaacacatcggacaccttcctggaatggcatcagctggcgctggctgggcccgcggtttctggaacggtggtgacgcattcacggcccagctaagacactcactgctggctaagtgtttgccgaatgaaactcaactcaataaaaaacaaaaaccaaattgggcagctgaaaaaaaaaaaaaaaaaa

SEQ ID NO: 154948 - DNA, 520 bp, Homo sapiens
tagtcgtgtgtacatcattgggaatggagggaaataaatgactggatggtcgctgctaacataagtttcaaaattgaacattccaagacaaaggggtgcctgaagcccgtgccctgtccttcagatcttcacaagcacagttcccctgggaaggtggagccacccagcctctcccctgaataactgggagatgaaacaggaagctcatatgacacacttgatcgaatatgacagacacttgaaaatcacggactcatccccctccagcacctcttacctgttgcccgccgattcacagccgggattgcagcttgaaaggattccctgggggcctggttccaaccggcccacttgtggactctgaggcctcctgcatttgcgggtgggtcttgccctgtgatatttttggtcatgggctggtctggtccggtttcccattttgtcttgggcaagtctctgtgtgtcttaaatcccttgtcctttcaattaaaaagcaaaacttaaagaaaacagaaaaaaa

SEQ ID NO: 154949 - DNA, 470 bp, Homo sapiens; identical to SEQ ID NO: 146768
  misc_feature (1)...(470): n = a,t,c or g

SEQ ID NO: 154950 - DNA, 270 bp, Homo sapiens
gtgtttgatgtacagaggaaagtcacctataggaacctgagcacctggtatacagagcttcgggagttcaggccagagatcccatgcatcgtggtggccaataaaattgatgacagaccaatgtcctaccttctctctacagcagacataaacgtgacccaaaaaagcttcaattttgccaagaagttctccctgcccctgtatttcgtctcggctgctgatggtaccaatgttgtgaaggtgtggttgactgcagaggtagctagcaag

SEQ ID NO: 154951 - DNA, 345 bp, Homo sapiens
acttttgggacacggcaggccaggagcggttccagagcatgcatgcctcctactaccacaaggcccacgcctgcatcatggacgcagtcctcacggctccccctggtgacccgggtgtggtgaagcagtcgctccaagagaaaaatgcagccgaggaaagggctgagaaaggaaaaaggagctctgtatacctgtgtcctgtagaagttcctacccgtgaattccctggctgggtgtttgatgtacagaggaaagtcacctataggaacctgagcacctggtatacagagcttcgggagttcaggccagagatcccatgcatcgtggtggccaataaaattgatg

SEQ ID NO: 154952 - DNA, 1773 bp, Homo sapiens
tcagatgcgcagttgagaaaccttgctattgctacttcttgttaaaatcaacaattccttccgtaacggcataaacacggcactaataccaccgtaattggcgcaatagaggcggagatttactcgcaccgaaacggggtggaagcacgacgcaatctgagtactctgtatgtcgtatgtatgttggagcgatcggcatgtcatgcgaatgagcaaattccaccctaagcggtcgtaggtgcattgacctgattgatagctcactaggtgggctttattatcactagtgtctgaatagtaactgtgaaaacttatcagggcttggtaccctgaattcttctgcgtctctgtgtttgtttctgtgcgtgctctgtttcgtgtgttgtcgtttctgttcttggcttctcgtgttagtatgttgttctgttcgtcgtgtcttcgttcttctgtatgcttggccacatcactgtcatagagcttcttcacagcctgtctgatctggtgcttgttggctttaacatccacagtgaacacaagcgtgttgttttcttctatcttcttcacggccgactcagtggtcagcggaaacttgatgatagcatagtggccaagcttgtttctcctgggggtgctcttccgaggatatctgggctgcctccggagtcgcagtgtcttgggccgcctgaaggtgagtgacatgcggatcttcttttttgcgtgtggctgccttcgtggcggctgtatgggcgcagtgctacatccctgacgcggcgcgtgggtggtgtcgtgtaccacgggcggcgcttcggcttcgttgctctgccctgccgcttcctgcaaataggcgataaatgcctcttccagactggcggctccgcgtttctcaaccagttcctgcggtgtaccgctggcaagcacttttccggcgtgcatcagtgagatgcggtcgcaacgttccgcttcgttcataaagtgggtggagatcaagatagtcactttgtcctggcgcgagagatcgaccatcaactgccagaacatatccctcgccaccggatcgacaccagaagtaggctcatcgaggattaacatctccgggcgatgaatcaccgccaccgccagcgaaagccgctggcgaatgccgagcggcaatgactccggcagaatatcttcaacgtcgttgagcttaaaacgctcgctcatttcagccactcttgcgggaatttccgcttccgggatgtgaaacaaacgggcatgtaactcaaggttttgccgcacggtgagttcgttatagagcgaaaacgcctgcgacatatagcccacccgacggcgggtatcgatatcttttggatcaaccggttgcccgaacagccacgcctcaccttcgctggcgggcagcagtccggtgagcattttcatggtggtggatttaccgcagccgttcgaaccaagaaaaccaaaaatctccccgcgtggaatgcggaaattaacgtgatcaacggcaacgaaggaaccaaaacgcatggtcagatcgcgcgcttcgatggcaatctctgcgttttcaggttgatacggtgggatcactaccgcctgatgcgcctggcgttgcgcttgcggtaacagatttataaatgcttcttccagcgtagcgctttgcgtttgctgccgtagctcttcggcgctgccagttgccagcacttctccggcattcatcgctaccagccagtcgaagcgttcggcctcttccatataggcggtggcgaccagcacgctcat

SEQ ID NO: 154953 - DNA, 465 bp, Homo sapiens
gttggaccaagggaagtatgatgctgatgacaacgtgaagatcatctgcctgggagacagcgcagtgggcaaatccaagtatgttgggagattagggaataaataccagccccagagagggtccaggtcatttaaaaagtcctccagaggcagaggagcatggcttcttggggctggtgaaggagcagtcttggctggagcccagatgttcatgggggaacgaggggaatcacatgacccgttgtgtgtgtcgggtggagggggcaggtcataaggactgaggaatttgaatgtttcctctgagcccgcagcgcactccacttccggctcgccccgcgtcctcgcagctgctacgcaaccgcgcaaggaccccgagggaggctgcccggccgaaggcctgaaggaccccgccgggcgctggctgcccagcgcggcgctggcgggagggccgcagggagtgcgcat

SEQ ID NO: 154954 - DNA, 619 bp, Homo sapiens
gccccctttcacctgtaccctgtagagagagcgacagaaagccaaatccagcttcatggctccatgcttgaagacgttctttcttttgtttagagatagggtctcactctgtcgcccaggctggagtgcggtggcgcgatcacggctcactgcagcctccaactcctggactcaagcgatcctccctcctcggcatccctggactataggcgtgagccaccgcttacgggcgaagacttgcttgtcggtgtcctcgccatctaagtgggtatgctatctttcgataaatgtttctggccaccaaccatgtccaggcatcgccaggctgcccgtcccgccccccacaacagcctcgcgaagccacctttccgtgcttcccccgacccggacgccctttcgcccaccccgatagggaggcctcggaggggctgtccccgcgtgataagccagccgccggggcggatttgccctcacgtgcggttccgagtgagggctggagagaccagggacgctgcgggtcggcccctcgggccctgccgccagtctggactttgcgcgctctcgaaccacgcccgccggcccagctcgcgcctcgttccaagctaggcgtatcgaatct

SEQ ID NO: 154955 - DNA, 1451 bp, Homo sapiens
gacttttgggacacggcaggccaggaacggttccagagcatgcatgcctcctactaccacaagacccacgcttgcatcatggtgtttgatgtccagaggaaagtcacccataggaacctgagcacctggtatacagagcttcgggagttcaggccagagatcccatgcatcgtggtggccaataaaattgatggtggggccatccctgcacctgggtgttagcaattcaactggggacgctgccctcatacatttcctcctccattccccgggcaggcaaccttcagtgattggtcctccctcccacgataagatacaacccttggttggttgcttgcattcttcccaccttataaagaagccagctaagccgacctgccctctttccaagacacagatccctattaactgagctctttctaggacctgtttcccaatcatccctgcctatcccactttctggaatgaaggcctccagtggcccccccctccaaaccttcttcccttcccttgacagaccagaccaatgtcctaccttctctctacagcagacataaacgtgacccaaaaaagcttcaattttgccaagaagttctccctgcccctgtatttcgtctcggctgctgatggtaccaatgttgtgaaggtgtggttgactgcagaggtagctagcaaggtcagggcgattcaaggcccgtgatacagggatgaggtcagcaccagcaaactctggactggtggaagaattccccaccagatctcctccccttttattgattttgctccttaacctgagtgcagtcagccacagcagctgtccacgtacgccctgaccctgtacaagcacacagccacggtagatggcaagaccatccttgtggacttttgggacacggcaggccaggagcggttccagagcatgcatgcctcctactaccacaaggcccatgcctgcatcatgcagacataaacgtgacccaaaaaagcttcaattttgccaagaagttctccctgcccctgtatttcgtctcggctgctgatggtaccaatgttgtgaagctcttcaatgatgcaattcgattagctgtgttttacaaacagaactcccaggacttcatggatgagatttttcaggagctcgaggtaggtcaggtccacatttcgggtgggatggaagaaacggctcctcttcagggatagggactacaacccagtagagtgactcttgcctaagtttgccccactaaatgtatcagagctgcggttgagcaaatgcagggccaggcctcacctgcgaccttgttcacagaacttcagcttggagcaggaagaggaggacgtgccagaccaggaacagagcagcagcatcgagaccccatcagaggaggtggcctctccccacagctgaggggctggggctaggggtgggtggagcccttttaaaataccct

SEQ ID NO: 154956 - DNA, 2207 bp, Homo sapiens
gacgcgggccgagccggaagtggagtgtgctgcggcgcgagctgggccggcgggcgtggttcgagagcgcgcagagtccagactggcggcagggcccgaggggccgacccgcagcgtccctggtctctccagccctcactcggaaccgcacacagtgacaataccctcccctcccttgggctggacccctctctacagctaggagccaatggcagaagacaaaaccaaaccgagtgagttggaccaagggaagtatgatgctgatgacaacgtgaagatcatctgcctgggagacagcgcagtgggcaaatccaaactcatggagagatttctcatggatggctttcagccacagcagctgtccacgtacgccctgaccctgtacaagcacacagccacggtagatggaaggaccatccttgtggacttttgggacacggcaggccaggagcggttccagagcatgcatgcctcctactaccacaaggcccacgcctgcatcatggtgtttgatgtacagaggaaagtcacctataggaacctgagcacctggtatacagagcttcgggagttcaggccatagatcccatgcatcgtggtggccaataaaattgatgcagacataaacgtgacccaaaaaagcttcaattttgccaagaagttctccctgcccctgtatttcgtctcggctgcttgatggtaccaatgttgtgaaggtgtggttgactgcagaggtagctagcaagctcttcaatgatgcaattcgattagctgtgtcttacaaacagaactcccaggacttcatggatgagatttttcaggagctcgagaacttcagcttggagcaggaagaggaggacgtgccagaccaggaacagagcagcagcatcgagaccccatcagaggaggcggcctctccccacagctgaggggctggggctaggggtgggtggagcccttttaaaatacccttcccttcaacaactctccagctctgaatggagaaactctctaggccatcccctcttctacctcctgcaacccacccatcctattagcgtcccacattctagggcccgtgatacaggggatgagggtcagcaaccagcaaactctggactggtggaagaattccccaccagatctccttgaagcagaattagggatcagcatcattaacaccttccccaccccctccccccaggcagacagtgaagagaatcagaaaacatgattatgtgtcactttaatacaggaaatttaggtgttttttggtgtttttgtttttgtttttgtttttgttttctttccaaagctcacctcggggacaattccttgggcttctcctgaggtaatgatttacccccccacccacagctgagtctgtgaggccccatcctttccctacgttttctcccatcttttttcctcttcagtctcccagtcatctggtttgtttgtttctttgttcgttctgagacggagtctcgctctgtcgccaggctggagtgcagtggcgcagtctcggctcgctgcaacctctgactccctggttcaaacgattctcctgcctcagcctcccgagtggctggcatcaccacgcccagctaatttttgtatttttagtagagacggggtttcaccatgttgcccaggatggtctcgatctcctcacctcgtgatccgcccgcctcggcctcccaaagtgctgggattacaggcatgagccaccgcgcccggccccaatcatctgtttttaaacaatcgtttttgagcagatagctattcattccagattttcgtgtacccattctgtttcaggagctcttctaggtaaagctgagatcacaggaacagcaggtgacaggcctagctatagttaggaatacacaagccgtaaaatcgagtccttacagccataccacaaggtacgtccatttggactacaagaagagcttcctttaaagttcctatttcagcataaagaggctgtcctttttttttgaggaatagtttggaccttgtgcctcctgtgggaggctgaggactgcaagaggagagctagcagatatgcctgttcacccctctctggtacttgtggcttgctagtatgtttttatgataatctcgggcattgtttgcattgtgtttattaatagggttttgtttttattgtttccttttttacagtaaaggctgaattacat

SEQ ID NO: 154957 - DNA, 2137 bp, Homo sapiens
tcagccagctggactcagtttaggtgatcccaattttgttacaacatcgaaagcatcataatcaggagcaagtcgaacatatgccttcttctctttatcaggacaaatcagggttttgaccttggccacatcaatgtcaatacaagcttcttcaaaagccctgttaaatctggtgcttgttggctttaacatccacaatgaacacaagtgtgttgttgtcttctatcttcttcatggcagactcagtggtcagcggaaacttgatgatagcatagtggtcaagcttgtttctcctgggagcggctcttccgaggatatctgggctgcctcccggagtcgcagtgtcttgggccagcctaaagttgagtgacatgcggatcctcttttttgcgtgtggctgtggacacctttcaacactgccttcttggcctttaaagccttcgctttggcttcgagctttaggaggagcaggagcttccttcgctttcggtgccgtattaagtcgcagatggtgggaaccaggtttctcacttcctcaatgggcctgcagccacgtctccccaggtcagtcttaaggacaatggaaactctgggtcttcactgtggacatgccacactaccaggtggttccaaagccatggtgacccatcctcaggcgggcggcacccgctgaagcctcagtaccacacccacagccaggagccccagtcccgcactcggccgcatgcgcactccctgcggccctcccgccaggcgccgctgggcagccagcgaccggcggggtccttcacgttcggccgggcagcctccctcggggtccttgcgcggttgcgtagcagctgcgaggacgcggggcgagccggaagtggagtcgctgcggcgcgagctgggccggcgggcgtggttcgagagcgcgcagagtccagactggcggcagggcccgaaggggccgacccgcagcgtccctggtctctccagccctcactcggaaccgcacgagccaatggcagaagacaaaaccaaaccgagtgagttggaccaagggaagtatgatgctgatgacaacgtgaagatcatctgcctgggagacagcgcagtgggcaaatccaaactcatggagagatttctcatggatggcttgtatccttcaaggtttgaagtactccttgttcctgtgggtcttcccacgctcatgtatcagtgtcccactgcccacccctttgtaccagcagcccaggaacaggaaggaggattggacttcgatggccaggacacactctcatctcctcccacccctcacccttccatggagcttgtaccagtgtgcagtcagccacagcagctgtccacgtacgccctgaccctgtacaagcacacagccacggtagatggcaagaccatccttgtggacttttgggacacggcaggccaggagcggttccagagcatgcatgcctcctactaccacaaggcccatgcctgcatcatggtgtttgatatacagaggaaagtcacctataggaacctgagcacctggtatacagagcttcgggagttcaggccagagatcccatgcatcgtggtggccaataaaattgatgcagacataaacgtgacccaaaaaagcttcaattttgccaagaagttctccctgcccctgtatttcgtctcggctgctgatggtaccaatgttgtgaaggtgtggttgactgcagaggtagctagcaagctcttcaatgatgcaattcgattagctgtgtcttacaaacagaactcccaggacttcatggatgagatttttcaggagctcgagaacttcagcttggagcaggaagaggaggacgtgccagaccaggaacagagcagcagcatcgagaccccatcagaggaggtggcctctccccacagctgaggggctggggctaggggaatagtttggacctatgctgctcctgtgggaggctgaggactgcaagaggagagctagcagatatgcctgttcacccctctctggtacttgtggcttgctagtatgtttttatgataatctcgggcattgtttgcattgtgtttattaatagggttttgtttttattgtttccttttttacagtaaaggctgaatgacataaacattg

SEQ ID NO: 154958 - DNA, 502 bp, Homo sapiens
  misc_feature (1)...(502): n = a,t,c or g
ggcacgaggggcaaagagaaagcaaagcagctgcgctcagacctgagctcctttgacatgttaagatatgttgaaactctactcacacatatgggtgtaaatccgctagaagctgaagaactcatccgtgatgaagatagtcctgattttgaattcatagtctatgactcctggaagataacaggcagaacagcagaaaacacctttaataaaacccatacattccactttctgttgggttcaatatacggagagtgccctgtgccaaagccacgagttgatcgtccaagaaaagttcctgtgatacaagaggagagggcaatgcctgcccacctgatacccccaatgtccttctttgactttgtgggtgatcctcattctttcccccgtacagtggaaaacatctttcatgtttccttcattatacgggatggtnttgcagaataaacttgaccaagaccgactgccagtaatagagcctgttagtattaatgaagaaaan

SEQ ID NO: 154959 - DNA, 346 bp, Homo sapiens
  misc_feature (1)...(346): n = a,t,c or g
gccaaagccacgagttgatcgtccaagaaaagttcctgtgatacaagaggagagggcaatgcctgcccagttaagaagaatggaagaatctcatcaagaagcaacagagaaagaagtagaaagaatcttgggattgttgcagacatattttcgagaagatcctgataccccaatgtccttctttgactttgtggttgatcctcattctttcccccgtacagtggaaaacatctttcatgtttccttcattatacgggatggttttgcaagaataagacttgaccaagaccgactgccagtaatagatactgaaaacatggccagcgtctaaaattttgatggattn

SEQ ID NO: 154960 - DNA, 487 bp, Homo sapiens
cctcgcagcggcagctgcagctgcagcggcacgcgagagctgtcaaatgcacgttctcggaccccacccggacccgcggaattcgaatctctgggtgggtccgcgcaactgtggagtggccctccaggtgatgaaaaccgtgaggacatactgaatgccggtgacaaattaacagaggtccttgaagaggctaacactctgtttaatggagtgtcccgagcaaaagaagcagtcctggatgcccactttcttgttttggcttcagatttgggcaaagagaaagcaaagcagctgcgctcagacctgagctcctttgacatgttaagatatgttgaaactctactcacacatatgggtgtaaatccgctagaagctgaagaactcatccgtgatgaagatagtcctgattttgaattcatagtctatgactcctggaagataacaggcagaacagcagaaaacacctttaataaaacccatacattcc

SEQ ID NO: 154961 - DNA, 424 bp, Homo sapiens
atattttcgagaagatctgatacccaatggtccttctttgactttgtggttgatcctcattctttcccccgtacagtggaaaacatctttcatgtttccttcattatacgggatggttttgcaagaataagacttgaccaagaccgactgccagtaataggagattgtgaagacctttgagatttcagagcctgtgattactccaagtcagaggcagcagaagccaagtgcttgatgctagctgaaggactcaaatggatagtgaagtccaaaacggaaagcggcatgtattgtacatattgtatgattcaacatttttaaaggcagattgtttttagtaaaatgtagcttttgatagttaataaatttgtcatggttgtctttgattaaaggaaactcaccgccatattcacaaataaaaaaa

SEQ ID NO: 154962 - DNA, 515 bp, Homo sapiens
agcggccgcgggccagagggccggggccggggccgcgacccgcatcgggatcgcacccgctcccgctcccgctcgcggtcccctttgtcgcccaggtcccgccgcggctctgcgcgggagcgcagagaggccccagagcgcccgagcctggaggacacagagccgtcggattccggggacgagatgatggacccggccagcttggaggcggaggccgaccaaggcctgtgccgccagatccgccatcagtaccgggcgctcatcaactccgtccaacgtaaggcggcgcctccgggcggcgcgggcccggacgggccgctgtccccgccctgcgccgggcgcggggggagggcaccggaggcaggtgccgggcggaggcccggcgcggcgttagtagagacgcgccgggtgccagcccctcgccgcaccttaaattgttgacaaagtgctcccactttgtggctggagccgtacgaccttggcgcgggtccccgagtggcgggctggaaaagctg

SEQ ID NO: 154963 - DNA, 546 bp, Homo sapiens
tgttattttccaggagtcatagactatgaattcaaaatcaggcctatcttcatcacggatgagttcttcagcttctagcggatttacacccatatgtgtgagtagagtttcaacatatcttaacatgtcaaaggagctcaggtctgagcgcagctgctttgctttctctttgcccaaatctgaagccaaaacaagaaagtgggcatccaggactgcttctcttgctcgggacacttcattaaacagagtgttagcctcttcaaggacctctgttaatttgtcaccggcattcagtatgtcctcacggttttctatttttaaaaatacaaactttgggaaatttgttcagcattcactaataagcagttgacaaggttatcacctgcaacagtaaagccaagccccggcccctgcgctctgagtaattacttcgaacatctttatctttttaaccaaaatgacccggaaaaggagaaaggccaccctaccctttatgcagcatgaattttaaaaggaaaccctagctccctctaaccttaacccaaa

SEQ ID NO: 154964 - DNA, 1661 bp, Homo sapiens
gcggccgcgggccagagggccggggccggggccgcgacccgcatcgggatcgcacccgctcccgctcccgctcgcggtcccctttgtcgcccaggtcccgccgcggctctgcgcgggagcgcagagaggccccagagcgcccgagcctggaggacacagagccgtcggattccggggacgagatgatggacccggccagcttggaggcggaggcacactaaggcatgttgccgccagcatccgccatcagtaccgggcgctcatcaactcccgtccaacaaaaccgtgaggacatactgaatgccggtgacaaattaacagaggtccttgaagaggctaacactctgtttaattgaagttgtcccgagcaagaagaagcagtcctaggatgcccactttcttcgtttttggctttcagatttggggcaaagagaaagcaaagcagctgcgctcagacctgagctcctttgacatgttaagatatgtttgaaactctactcacacatattgggtgttaaatccgctagaagctgaagaactcatccgtgatgaagatagtcctgattttgaattcatagtctatgactcctggaagataacagggcagaacagcagaaaacacctttaataaaacccatacattccactttctgttgggttcaatatacggagagtgccctgtgccaaagccacgagttgatcgtccaagaaaagttcctgtgatacaagaggagagggcaatgcctgcccagttaaggaagaatgggaagaatctcatcaagaagtcaacagagaaagaagtagaaagaatcttgggattgttgcagacatattttcgagaagatcctgataccccaatgtccttctttgactttgtggttgatcctcattctttcccccgtacagtggaaaacatctttcatgtttccttcattatacgggatggttttgcaagaataagacttgaccaagaccgactgccagtaatagataaatgatactatgtttggaaaaattagttttagagtaaatatatttgttagtagaatttaagtattttactaaatgtaaatgaattttcaatgtagattaacttttacaatattgtatcttgctcaactacctgaagatactgaaaacatggccagcgtctaaaattttgatggattcatctatatcattgattcaacatctgctgtaaatattaacaaagaaatgatataatttccctcagatcttaatttagaaagttggcgattgcagtcatttttgtagtatccctctttctaatcacgttttgtcagatgccggcaccttcttttctctttgagggtctatgaatctttcattcttacctgaattaatttcacactctccattaactcatgtcctcctaagggcctcctgtggagagtgaatatttccatcgcacttacttgctactttcaatgttctcaatgtcctattggactcactagggcttagctctgtggttgacacatagatatgcagatttttcaaatgtctggaatgtgttactctactacatgttttttgaaatgggaaacagatggaatggactgtgctactgttaataatactacagcagctccataatggcatggaaatcctaaaaaagtatgtgaatgatttattaaggt

SEQ ID NO: 154965 - DNA, 1405 bp, Homo sapiens; identical to SEQ ID NO: 141778

SEQ ID NO: 154966 - DNA, 1895 bp, Homo sapiens
ccgcgctcgcaccccgccgctctggccgcgcgcccgcggcccgggatcccgagtgtccggagctccgtggtttctgttggacctcgcgggaggcggttttctcccgcctgctgtgctctgtgacctctctgctgcctcctccacggtctctgggcggagcaatccacactgctgagcctggggtggtttggaattcttcggcgaagtggagcgggccgagagtgggtttcccgtccccgagccctccctcatctcggagatgccgcacttgtgagcgacagggcttcatttgaattttcgcacctcgcgagttgcggagcctgcatctctgaagctgcctcggtgaagagccacagcattattttttttctctttgggagagtagctgtctgggatttgagatcctatcttccctgcaaattaccaggttgcatcttcactgataggaatacatttcttcaccaaaggacatggatgaaaatgaaagcaaccagtctctgatgacaagcagccaatatcctaaagaggcagtaagaggacgtcaaaattcagcacggaattccggagcaagtgattcttctaggttttctaggaaaagcttcaaactgggattatagactagaagaaggtgtaactaaatccaagaaaggaaaagatgggagatttgtgaatccgtggccaacatggaaaaacccctctattccaaatgttctcagatggctgataatggagaaagatcacagcagtgttccaagttctaaagaggaactagacaaagaactcccagtgcttaagccatattttatcactaaccctgaagaagctggagtgagggaagctggcttaagagtcacatggctgggacatgccacggtaatggtggaaatggatgagctcatatttctcacggatcccatctttagctctcgtgcttcaccatcgcagtacatgggtccaaagcgatttcgtcgttccccgtgcacaataagtgaactccctccaatagatgcggtccttatcagtcacaaccactatgaccatctggactacaattctgtcattgctttgaatgagcgatttggtaatgagttgagatggtttgtgcctttgggtctccttgactggatgcaaaaatgtggctgtgagaatgtgattgagttggactggtgggaggagaattgtgtccccggacatgataaggtcacttttgtctttacaccttcccagcactggtgtaaaaggactctaatggatgacaacaaggtgctatggggcagctggtctgtcttggggccttggaatcgattttttttcgcaggagatactggttattgccctgcttttgaagagataggaaaaagatttggaccttttgaccttgcagctattcccatcggagcttatgaaccgaggtggtttatgaaataccagcatgtagacccagaagaagctgtaaggattcacactgatgtccaaccaaagaaatctatggcaattcactggggaacttttgccttagcaaatgagcattacttagagcctccagtgaagctgaatgaagctctagagagatacggacttaacgctgaagatttttttgtcttgaagcatggagaatcaagaataccttaaataataatgatgaaaacttttaataaataatttcctgaggtgaaaaaccgatattgaagattcatttttcttttttccattcttcagagaccttcggcaagagccttcagatgagagggaacagtatattctattgcacgtctacaattcccaaaagacctcttactttgggaggccaaggtgggtgggtcacttgaacccaggagtttgacatcaacctgggcaacatggtgacctcccgtctctctcggaaaaaaaaaaaa

SEQ ID NO: 154967 - DNA, 1812 bp, Homo sapiens
  misc_feature (1)...(1812): n = a,t,c or g
ttttttttttttttttactttttaaaacatttatatttatatatataaaaaaattaaatatatataatatatagggggtttgagactaaaaatatagtacataatattttttaaaaaaaggagaaaaaagtagaataggaaaaggtgtgagggacacacagatgcacattgctaaaatcctacaatggtttgtcctaacaaaaataatatcttttttttctcttctcttaattatcatcacngggatccatttattttggggggcttgggtgggaagaaaattcaactggagctaggaaatggaggttgcaatgccaagaatggcctggggtagaaaatgtgacccacagggaacccctgggccctcttctgggtgaaattgggacttctccaaaattttctggggtcactgttgcctaacaaggttgtgtgggagttttaccgtattgggattttgggctgctctcttccccagagttagggtattctcaggggggacagcatctgaagagctccaaaagcaaacagaagagctcagggcccatcgatactcaacaaggccagtggttggggccagccaaaaacccagggtagggacagcagactggcaggaatgagtgacagttctatgcaaaatggagttattattattattgttattattaataagggcaggtttgtaccagaactgcccagctatggcctgtgacttctgcgcagcaattatttctcccagggacagggcctgaagctacctcacagtgatgccaaaaaaatgggattccccactaacccccacacacacccccttcctaccaaaccacacatctctcagtcctctaccagcagacccagaggtgaacgtcaggaaccacgactgacaaagatgagacaaatgcctttacacaaaaagcctggaccttgaggaagaggaggagaaataccatagggggataggaggaggaccaagagcaagggaaatgggatatttaaatgctaattttacagcatcttcacaaaaataaatgcctttcaattacatcccttggcctgtgcacttcagtgttcattatggcctcgccagggtcaggagcttcactaatccttttgggcaattctcaacatgcacagtggcctgtagaggcaccaagcagtggcctggctcaggtcagacagcactaacttggggaagccaggatttctgaggccagggtgcttggggaggaactggagttcagcagtagggacagaaccttccacacagcaaagaacaaggcagttcgctccaaacgggtcttggctttaatgtggttttcttcaaacccaaatggctgaacattgctatgaacataggtcatgtatattgagacactgattccgttttatggagccctgtggctcctgacaggttaacgagagggcacgaaactccagtgcgacgtgctccattttgaaagcagataaagctcccctcatcagagtgaagaggaaagtagccctgctggaataaggggagagcgtaccgcttgaagacagggtgctcagatgttttcattccaagcaagacagtgataacagcacagcactgctcccatccctggcccctttcctttctcacttactagggctttttgcttcatgcaaactctgtggctggactttgagggatccagaatttaggatatagggcgggtccttcacgagggaagtgaccgtggctcagccaaaaatcacaagatcctcctcaagattccagaatgtattccaaagctgttgtacccctttccctccaccggctcccctttgcaagct

SEQ ID NO: 154968 - DNA, 1875 bp, Homo sapiens
atgaggaagcattgctgtgtgctgctcacctgctgggctctacagacgctggtgagcctggcattcggggccccaagtgcttgggctgagcaccgtgcttgttctgaattggcattcgtgaacatttgcgcgctggatgccagagaggtcctggttaaactctcagatggaaggagagaagccccatctccactgccccagccccactggccagactcccctgccgccttccacgccaccctcaagccgcaagtcctgcccacacacaggattccacagagcgcctctgtcctctggccatctggaggcagggtgggagctaacacacgtctgcaggctgaagaaggacagcgccgggtcagcacagccgtgcaggggcttctgtttatccctgatgtctgctttcctgtggctttttctttaggagaagaaaaccgaaaacacttgtcaagtgtttctgttttctgccgtgctgtgtgcccccgcccctggcgctgtgcagggaatgggcagtctgctttcatgggggaacaaccgctgcctggtccctggctgtacgccacccacatcgagcgctggctcagtgcctatcacgccaaccaggagctgctgtccctgacccttgttatttccctgataaggcacctggccaacaaagccaaagtcttgaataattatgagagagagaagttagttaggtttgatccaaagaaaggattttggtgccaactgcttgaggaggaaaaaccaagtgtctgggcaaaagcaagggccggaaatatcccagatggacttggattcccgagccttcctgaaggactattaccggaccacaacatcgagctctccaagctgctgtataagatgggccagacattcccacttggttacgagaggacttccagaacaccaggcatgcacacgtgcccacatgtatgcacaacctatacacatggtgacttggtcaacgcagatcattttcactgggttaaaatggaagatttcccagatacagcagaggcctatcctagggcagccacgggggcatctcaggcctcacatgatgggatgagctctcagtttcccaaggatgggaacctgagctacccaccccaccacagccccagtggcgacctcgtgccaggcacacagcaggacagggtgggtgagaaccccaccccaattctgaacagagccaaagtccaggagagacagccatcggccaaaggcagcagtacagccaacgccacctgggcccagctgctgaggagaaggaggagagaggttcgccgtctgggcagctgccctctggcccgctgccggcctccctgcccccaccccagctccccaaaggccaggaacatctggctgctggctagctccaggaaggctcttcagtcccaccattcggtaggtcccgagttcttgtcctgtgtccaggaagatgaggccaggcccaggttagagggcctcatggcccagtgggcggttctgagctgctgtgttgctgcaggtaccaatgctgaggacgctggggatgatctgctgcgtcctgtacgaggcttggaagcaggtgtggacatccgcgtgaccagcacggaggagtacccccacctgaagccagcccgcaccgccgtggcttcatccacaatggcatcatggccccatggaaggaggagccaagaggttcctagtggctgtccacccccagcgagggacactgccaggggccggcacaagtaccaggctcgaaggtcctcaggattcattggcatcaggttccctgctgtatggcgcagtgcaagccagcatgcaggactggcagagacacacctagccagctcctacgatcgcgtagccaagtctttgcagtaa

SEQ ID NO: 154969 - DNA, 701 bp, Homo sapiens
atgaggaagcattgctgtgtgctgctcacctgctgggctctacagacgctggtgagcctggcattcggggccccaagtgcttgggctgagcaccgtgcttgttctgaattggcattcgtgaacatttgcgcgctggatgccagagaggtcctggttaaactctcagatggaaggagagaagccccatctccactgccccagccccactggccagactcccctgccgccttccacgccaccctcaagccgcaagtcctgcccacacacaggattccacagagcgcctctgtcctctggccatctggaggcagggtgggagctaacacacgtctgcaggctgaagaaggacagcgccgggtcagcacagccgtgcaggggcttctgtttatgccctgatgtctgctttcctgtggctttttctttaggagaagaaaaccgagaaacacttgtcaagtgtttctgttttctgccgtgctgtgtgcccccgcctcctggcgctgtgcagggaatgggcagtctgctttcatgggggaacaaccgctgcctggtccctggctgtacgccacccacatcgagcgctggctcagtgcctatcacgccaaccaggagctgctgtccctgacccttgttatttccctgataaggcacctggccaacaaagccaaagtcttgaataattatgagagagagaagttagttag

SEQ ID NO: 154970 - DNA, 4112 bp, Homo sapiens
tgaagaggaacctcacgccactgcctggagctccgccttagccccgtgggccccacggagtgagcggcatgcagcacccccgggcctgtccagtgtcctctggcctgctgccctgcacccccagaaggccctgacgccctggggcacttctgctctgcacaggaccacgcgggggtttgccatggtgacataaaggggcgcggaggaaggaaggagcgtgaccagcctgtggactgcgcccctggctgggaggaaggactgggggcccagatcctccactcccagtgccccacaagggcgtacgcttcctaagtctctgtgaatttgttggtcagtggacgattctcgtgtctcctcctgtgtggggccttggggtagccagggcaggccgggcctccggtggccaaggtctcggaggccaggatgcctgccctggcatgcctccggaggctgtgtcggcacgtgtccccgcaggctgtccttttcctgctgttcatcttctgcctgttcagcgttttcatctcggcctactacctatatggctggaagcgaggcctggagccctcggcggatgcccccgagcctgactgcggggacccgccgcctgtggcccccagtcgcctgctgccactcaagcctgtgcaggcagccaccccttcccgcacagacccgttggtgctggtctttgtggagagcctctactcgcaactgggccaggaggtggtggccatcctggagtccagccgcttcaaataccgcacagagattgcgccgggcaagggtgacatgcccacgctcactgacaagggccgtggccgcttcgccctcatcatctatgagaacatcctcaagtatgtcaacctggacgcctggaaccgggagctgctggacaagtactgtgtggcctacggcgtgggcatcattggcttcttcaaggccaatgagaacagcctgctgagtgcgcagctcaagggcttccccctgttcctgcactcaaacctgggcctgaaggactgcagcatcaaccccaagtccccgctgctctacgtgacgcgacctagcgaggtggagaaaggtgtgctccccggcgaggactggacggttttccagtcaaatcactccacctatgagccagtgctgctggccaagacgcgctcgtctgagtccatcccacacctgggcgcagacgccggcctgcatgctgcactgcacgccactgtggtccaggacctgggcctgcacgacggcatccagcgcgtgctgtttggcaacaacctgaacttctggctgcacaagcttgtcttcgtggatgccgtggccttcctcacggggaagcgcctctccctgccattggaccgctacatcctggtggacattgatgacatcttcgtgggcaaggagggcacacgcatgaaggtggaggacgtgaaggccctgtttgacacacagaacgaactacgcgcacacatcccaaacttcaccttcaacctgggctactcagggaaattcttccacacaggtaccaatgctgaggacgctggggatgatctgctgctgtcgtatgtgaaggagttctggtggttcccccacatgtggagccacatgcagccccaccttttccacaaccagtccgtgttggccgagcagatggccttgaacaagaagttcgctgtcgagcatggcattcccacagacatggggtatgcagtggcgccccaccactcgggcgtgtaccccgtgcacgtgcagctgtacgaggcttggaagcaggtgtggagcatccgcgtgaccagcacggaggagtacccccacctgaagccagcccgctaccgccgtggcttcatccacaatggcatcatggttctcccacggcagacctgcggcctcttcacacacaccatcttctacaacgagtaccctggcggctccagtgagctggacaagatcatcaacgggggcgagctcttcctcaccgtgctcctcaatcctatcagcatcttcatgacgcacctgtccaactatgggaatgaccgcctgggcctgtacaccttcaagcacctggtgcgcttcctgcactcctggaccaacctccggctgcagacactgccccctgtgcagttggcgcagaagtacttccagatcttctccgaggagaaggacccgctctggcaggacccctgcgaggacaaacgtcacaaagacatctggtccaaggagaagacgtgtgaccgcttcccaaagctcctcatcatcggcccccagaaaacaggcaccactgccctctacctgttcctgggcatgcaccctgacctaagcagcaactaccccagctctgagacctttgaggagatccagttttttaatggccacaactatcacaaaggcatcgactggtacatggagttcttccccatcccttccaacaccacctccgacttctactttgagaaaagcgccaactactttgattcagaagtggcgccccggcgcgcagcagccctcttgcccaaagccaaggtcctgaccatcctcatcaaccccgcggaccgggcctattcctggtaccagcaccagcgagcccatgacgacccagtggccctaaagtacaccttccatgaggtgattaccgccggctctgacgcatcctcgaagctgcgtgccctccagaaccgctgcctgggtcctgggctggtacgccacccacatcgagcgctggctcagtgcctattcacgccaaccagattctggtcttggatggcaaacttgcttcgcacagaacctgccaaagtgatggacatggtgcagaagttccttggggtgaccaacaccattgactaccacaaaaccttggcgtttgatccaaagaaaaggattttggtgccaactgcttgaaggaggaaaaaccaagtgtctgggcaaaagcaagggccggaaatatcccgagatggacttggattcccgagccttcctgaaggactattaccgggaccacaacatcgagctctccaagctgctgtataagatgggccagacacttcccacttggctacgagaggacctccagaacaccaggtagccgtggccaccacagccagactgaacgtttgtgaaagctgggacatcccaccacacgctgagccagacctgcagagtgggaagctggaccagggcagctgcgcacttatgagcaatactctgtggaggtctggtggggctgggggagcacccaggcggatctgcaagcacctcggagcacccaccgctgggtctgcggcctaagggacctccctcgccagcagaggtccattccgttcccagctgctcctggggaggccgcttcctggtaggagggagtccacgagactcttttctgtccctcactgtgttccgccgactgtcccctctcgtcacccatcactccctgcttccgcagggcgcccctcagtattcgctgccatatgtccctgtcctccaggctgtaggggaggagagcctggccgggggagacagactggacatttccctgtttcgagccaggctcttccaaggggccagctgggtccccggagtcagtcctaggctggatgggagggtggccccctcaagaggactcccagcctccacatctggttcctaccttcacatctcaccctcccgttctggggaagaatttctggttcctacagtatccactccatcctcaaggcttcccgcagggccttggggcactgccttgccatcgggcccagttctccgggccccacctgcacccctttcttccccctgggatatgatgtgtggtgtttcctgtggtaaaagactgaggcaggccaggggtctgccagtaacatgttcccatgtacagacacggtccccacaccctcccagcctcaggcccaggcagacatgggcgagctggtgagactgccagccacggctttgcttagccacctgtggccgagggctctcagagacccccttaacctcccaaatactaagaagctaaaatattttaatattttgtttttttttttcttggtgccagagtttataccctgggtgctggggtcgcactgtgttatatatatatatatatatatatataatgtgta

SEQ ID NO: 154971 - DNA, 1250 bp, Homo sapiens
  misc_feature (1)...(1250): n = a,t,c or g
ggcacgagtggactacctacctgtaggctggattctagatgtggaatgacaataccagccctggactacctacctgtaggcnnnnnnnnnnnnnnnnnnnnnnnnnnncagagagagagagatatagagagataccacaagtaacacaaagcatcatacctgggactgggaaggttaatgtttaaacattttaaatgtggcattggtttgttgaagacagtcaagcagtaggtgctgcaggctttgttgaggctaaaaagctgttggtctttattaggtgatggcaaaacaatggatcacattttcatgtgctgtgtcttgggaggcaaatgatgagaatgtaggattggggaaaatggtaaggaaaatccaaaatgttcatgttttctaaccccttcttgccaatcttaaaagaaggacaaacaggctagattaagcaagtctacagttacaattggaaggaaacacagccgtactaaggaagtactctgtctgtggcctgcagtctagttttgactaggtccngttattttgagcttttgaaagagtaaagggttacaagtgctcgtattacccctgaagtagttaccagcagtgactgcaaggaggtaatcttatgggatgaaactataactctgtattaaccatcatatatagcatatatgtgtatatgtatgtgtgtgtgtgtatatgtgtatataaatatatgtgtgtgtatatacacacatgtacacacaccctacaacccagtgatttcaaaaaattaaacatttgtttagctcatgaatctgtgggttgggtgaacatttctattggtcttggctgggctcacctgtacccagtccagctgcagggtctagctcttcttatcttggctgggatctccacacatgtctaggatcagctgctttactagttctaggattgtcttggctgagacaagggtggactacttcagttctcctccactgccttatccttcagctggccagcccagaaatgttgccatgtttacagcataagagcaagcaagaaagaataatatgcaaccacttttccaagcctaaggtgaaagggcgggcagaacctgtggtgttaggaggcaactcataccagcccatgggtctactgtttaattttcagaaatttggcaagctgattgttaacacagctgttgtttaatttatgtacttgtaattaaataatttacattaaaacaaagataataggtactcaaaaaaaaaaaaaaa

SEQ ID NO: 154972 - DNA, 502 bp, Homo sapiens
ggatggaaacttttctggatttctgcttccttgccagagtaatgggaagattggactcatgctgtctgccttctttaaaattctgtgccctttctttgaaaagaatatttatttcagcctaatgaggtgttttgtgtttattttttatctttttaagctaaatctcccctgagagtatagatattgatgctagtggctgctggttttagttccccttccccttataatggctttgtttttccctattgcttgtgttcgatttagggctatatggccagtgttttttagtgtagtttttttattttcctcaagttgttttttttataccccctcaaggacttgagttggtccttgtaaaaaaaaacaaaaaaaaaagtacactggatagagaggaaagcaggcaggagaatcacttgaactcaggaggtggaggttgtggtgagccgagattgtgccattgccctccatcctgggcaacaagaacgaaactctgtctcaaaaa

SEQ ID NO: 154973 - DNA, 1158 bp, Homo sapiens
atggatgaagaaattcgggttcatgacgagaggcttgctcagaagcacaccaacaggggaattgcagggctgacccctgaacctcagtcgctgcactttgagttggtggctctgactgtcacactcaaaactgaactgagtctaaagggtttagtcctgttttattctcttcgtgggtcgggaaagaggttaaagaagacacgcaagtatgatatcatcaccactccagcagagcgagtggaaatggcgccactaaatgaagaggatgatgaagatgaggactccacagtattcgacatcaaatacagagcccgcaggcctgccgtggccagatctgctctggcgcagctatggcgatcaggtccctgccctcagctccgattcttggtctttaaaatcttcactgctcctctccagttcctgtgcccccacccttcatcctcgacattgaccttccagcaagatgcagtggaaggcctgatggtggaatcagacctgggttttcgacaactgcagctgaatctcatggaaaagctggattcctctgccttacgcagaaacacccgggctccatctgccaggtgcttgccactggtcctggcagaaatggcggctgctgaaagtgaccttccaaatccttggtggcacttcagcgccacaggctctccaataaaaaccctttacacacaaaccatgagtaccttgggcttggatgttttctgtggtgccggccagcggggcaccttttgtgaagacagagttggaatcaccatccatggaaaatacttcctggaaacgttttggaatagaaagggaagaagaaatagaaatgaggtgaaggagagcggcggcggcggcgcgggtcggcagcgggagggcgcgcggcggggcggaggcggaggcggagtcggcgccgagaacatggccggaggcaaagctggaaaggacagtgggaaggccaaggctaaggcagtatctcgctcacagagagctgggctacagtttcctgtgggccgcatccacagacacttgaagactcgcaccacaagccatggaagggtgggtgccactgctgccgtgcacagggctgcgattccggggtacctcactgcagaggtgctggagctggcagtgcctccacttgtaaaatgggaataa

SEQ ID NO: 154974 - DNA, 499 bp, Homo sapiens
tttgtgtgtaaagggtttttattggagagcctgtgccctagaagtgccaccaaggatttggaaggtcacttttcagcagcccgccattttctgccaggaaccagtggcaagcacctggcagatggagcccgggtgtttctgcgtaaggcagaggaatccagcttttccatgagattcagctgcagttgtcgaaaaccctgtgtgagccagcagttccagttcaaaggttgagggggcgaacagctgcgaggtggccaggctcccgtgagtcaccactcaggcctgtatttgatgtcgaatactgtggagtcctcatcttcatcatcctcttcatttagtggcgccatttccactcgctctgctggagtggtgatgatatcatacttgcgtgtcttctttaacctctttcccgactcttccaagacaaaagcagcacacagtaaatccggcaacagcaaatgccccaagacctgttcctccagctctcgggtgtgtttgc

SEQ ID NO: 154975 - DNA, 1721 bp, Homo sapiens
tttgattttaaagaagtttttttaagacaattgttgacaatagtaaaagagatcaggaggatcaagaatctaaaacaagcctgaaggatgtccaactgtgtatttagaatttccgacattcttctctactggatctacacattggaccccatctgatcctttgctgcttttttggcttggtcaggtcctggcctcattttggcgttacctgtgtcagagttcaaggtggatgtgcttagagctggtcagccccttccagacctggacacgtctgtggctccttttctttcttcctttttttttttttttttaaaaaaaaaaaaggttcagcagaaatcagcgtggctagttcacaaagaatttccagtatcagggaaaaactgtgcgtgtgtgtgtgtgtgtgtgcgcacgtgtgtgcgtgtgcacgtgtgtgatacctataaaacagtttctccttctctgaagggaaaggaaagtgctaggcagcctgtgattagcaacattctttgtgcttttttgttgttcctctgctctgtcacagttctacgttgtttgccttaggaaatgtaatttttaaaaaccattttaaaaatgaacggtgatttggctggctggaaaaaatcacactgtcaggggactatatttgaagccagtctagacggggctggactaggaacccacctggacccaggagaccccacaggacccaggaggtccctgccggaaggcagaggttcaggtgagagtggctcacctctgagctggtgaagtgaggacttgcctgtgacatgacccaaggatctgctgctggcttctggagacagggccttgggctgacttctcaggttgattgaggcctcctgactagcggtgttcccaggctagaggtgattggctgcaacaaagatgcttctattagtctattagcagtgccttcggggaccctgggattttgctctctctagaaaggtgttttttatttttttattttttatctcccccttttttcctggctttgctccagggtttgtgtatttgcctgtttattgtcctgctctttttttttttttggatgaaaactccagcctttcctgactcacctccatcttcggttcttcagttttctgagaagagttgggatatgtgggaaggggcatgggagctcggcagcctccgcctgccaggaagggcagttttcgcctctgcaggaaagagcagagcccgtgggaagccctgggtgagggtggcgcagccggcccagcacgcatggtattgccagccacggggggcctgcgtgtagtctctgctccctgcatttcaccttctttgttgactttccttctctgttttcccccatctgtttgccagaggggtgggactggcaacaggaacagccgtggctgctttatctctcctctccacggtgtactcaggcctgagctcgtgactcacgggagcctggccacctcgcagctgttcgccccctcaacctttgaactggaactgctgggttcacacaggggttttcgacaactgcagctgaatctcatggaaaagctggattcctctgccttacgcagaaacacccgggctccatctgccaggtgcttgccactggtcctggcagaaatggcggctgctgaaagtgaccttccaaatccttggtggcacttcagcgccacaggctctccaataaaaaccctttacacacaaaaaaaaaa

SEQ ID NO: 154976 - DNA, 828 bp, Homo sapiens
atgggggtcagcccccccacccgccagccgcccgtccgggagggaggtgggggtgtcagccccccgcccgccagccgctccgtccgggagggagtgtgtccacgggcacaggctttcctcctggcaggtggcagccggagacctcctgggtgtcctgccgccactgtggacctcacctcagtgctgtctggggccttcccagaccagtcccctcccagcgggacccaacccccgccagcctcagctttcagagttcccccggccgaaagaattcctcactccaaggacccagaaaacgaagccaaattaaggacttccacccagccccagcctttcagattccgccttaaagccagacctctagaccccagtttctccttattctctaagacgagtagtattgcctggacgaggaacgccctacacagtgcctcgcaaaggctgactgtcatccctgtgtcatttgaggtttcagaagaggagccccgccgaggcatgagggccgtgctccccccagaggaagggatggttttcctggtcctgaagactttggtccagaggagaattttgatgcttctgaggaagcggcccgaggacgagatctcagaggtcgaggtcgggtacccacgagttcagaagagagccccgccgaggcatgaggccgtgctccccccagagaagggatggtttcctggtcctgaagactttggtccagaggagaattttgatgcttctgaggaagcggcccgaggacgagatctcagaggtcgaggtcgggtaccccacgagtccctgggccgccccaaccgcaaacgcgtgcaggagatg

SEQ ID NO: 154977 - DNA, 1015 bp, Homo sapiens
aatggcccccgggcccccttcagccaagagggacagagcacaggccccccacccctgataccacgcctagggcagcacggagcacaaggtcgcattccccctctgaaccccggacaaggacctggccccaacaaagatgactcccgcggccctccaaaccatcacatgggcccgatgtcatagaggcggcgtgaacagagcggcggacctgagcatgggcccgagagggggcctttgaggcgcggccataactgcaggggtccccctgataggcgaggccctgacccatactttcccgatgacttctgaagaccaaatgacttccaccctgacaagcgctttggccaccggttacgtgaatttgaggggcgaggaggacctttaccgcaagaagagaagtggaggcgagggggccctgggcctccgtttccccctgatcacagggaattcagcgagggggatggccggggtgcagcccgaggccctccgggggcatgggaaggccgcaggcccggagatgaacgtttcccccgggatcccgaggacccacgttttcgagggcgcagagaagaaagtttcagaagaggagccccgccgaggcatgagggccgtgctccccccagaggaagggatggttttcctggtcctgaagactttggtccagaggagaattttgatgcttctgaggaagcggcccgaggacgagatctcagaggtcgaggtcggggtaccccacgagggccaggtcatgaacattttcgtgatactccccgccctgatcatccccctcacgacggtcattccccagccagcagagaacgctcctcttctctccaaggcatggacatggcatccctacctccccgaaagcgcccctggcatgatggcccaggcacttctgagcacagagagatggaggccccaggaggcccttctgaagaccgaggaggcaaaggccgagggggcccaggacctgctcagagagtgcccaaatctgggcgttccagctccttag

SEQ ID NO: 154978 - DNA, 3875 bp, Homo sapiens
  misc_feature (1)...(3875): n = a,t,c or g
atggctacagaaattggttctcctcctcgttttttccatatgccaaggttccagcaccaggcacctcgacagctgttttataagcgacctgattttgcacaacagcaagcaatgcaacagcttacttttgatggaaaacgaatgagaaaagctgtgaaccgaaaaaccatagactacaatccatctgtaattaagtatttggagaacagaatatggcaaagagaccagagagatatgcgggcaattcagcctgatgcaggttattacaatgattggactccagaaggaagacgcttggtcactggagcttctagtggggagtttaccctgtggaatggactcactttcaattttgaaacaatattacaggctcacgacagcccagtgagggccatgacgtggtcacataatgacatgtggatgttgacagcagaccacggaggatatgtgaaatattggcagtcgaacatgaacaacgtcaagatgttccaggcacataaggaggcgattagagaggccagtttctcacccacggataataaatttgctacatgctctgatgacggcactgttagaatctgggactttcttcgttgccatgaggaaagaattctccgagggcatggtgctgatgtgaaatgtgtagactggcatccaaccaaagggttagttgtttcaggaagtaaagatagtcaacagccaatcaagttctgggatcccaagactgggcagagtcttgcaacacttcatgcccataaaaacacagtaatggaagtgaaattaaacctcaatggcaattggctactcacagcatcacgtgatcatctctgtaaactttttgatatcagaaacctaaaagaagagcttcaagtcttccgaggtcataagaaagaagccacagctgtggcctggcatcctgttcatgaaggactttttgccagtggagggtctgatggttctttgttattctggcatgttggcaaattctggactcgaaaccgaccaggtgataaaatgcgagatcgatataatctaaaccttttacctggaatgtctgaagatggagtagaatatgatgacctcgaacctaatagcctggcagtaattccaggaatgggaataccagaacaactaaaattagctatggaacaagaacagatggggaaagatgaatcaaatgaaattgaaatgacaattccaggtttagattggggaatggaggaagtgatgcaaaaggatcagaaaaaagtacctcagaagaaagttccttatgcaaaacccattcctgctcagttccagcaggcttggatgcaaaataaagttccaattcctgctccaaatgaggtgctgaatgacagaaaagaagacattaaattggaagagaagaaaaaaacacaagcagaaattgtttatagaaatggctacattacaatatactaacccacaacttctggagcaacttaaaattgaaagacttgcacagaaacaagttgagcaaattcagcctcctccctcatctggcacccctctcctcggaccccagccttttccaggacaaggtccaatgtctcagattcctcaaggttttcaacagccccatccatctcagcagatgccaatgaacatggctcaaatggggcctccaggtccacagggacagtttaggcctcctggaccccagggacaaatgggaccacaaggtcctccactgcatcagggaggtggggggccacaaggattcatgggaccacaggggccccagggcccgccccaggggttgccacggcctcaggacatgcatgggccccaaggaatgcagaggcatcctggacctcatggccctttgggacctcaagggccacctggaccacaaggtagttctggtcctcaaggtcatatgggtcctcagggtccacctggcccacagggtcacataggcccccaaggcccgcctggccctcagggtcacttgggcccacaggggcctccgggtactcaaggtatgcagggaccacctggtcccagaggaatgcaagggcctcctcatcctcatgggatccaaggcggaccagggtctcaagggatccaaggtcctgtgtctcagggacctctgatgggattgaatccaagaggaatgcaggggcctccaggcccccgggagaaccagggtcctgctccccaagggatgattatgggccacccgcctcaagagatgagaggacctcaccctccaggtggactactgggacacggccctcaggaaatgagaggtcctcaggagatccgaggcatgcaggggcctccaccccaaggatcaatgctgggacctccccaggaattgcgagggcctccaggctcacaaagtcagcaggggccgccccagggctctttaggacctccaccccagggtggcatgcaaggaccccccggacctcagggacagcagaacccagcaagagggccacatccatctcaagggccaataccattccagcaacagaaaacgcctctgctaggtgatgggccccgggccgccttcaaccaggaaggacagagcacaggccccccacccctgataccaggcctagggcagcagggagcacaaggtcgcattccccctctgaaccccggacaaggacctggccccaacaaagtttcagaagaggagccccgccgaggcatgagggccgtgctccccccagaggaagggatggttttcctggtcctatgaagactttgtgccaaaggagaaatttgatgcttatgaggaagcggcccgaggacgagatctcataggtcgaggtcggggtaccccacgaggaggaaggaagggtttacttcccactcctgacgagttccctcgctttgaaggagggcggaagccagattcctgggatggaaacagagagcctgggccaggtcatgaacattttcgtgatactccccgccctgatcatccccctcacgacggtcattccccagccagcagagaacgctcctcttctctccaaggcatggacatggcatccctacctccccgaaagcgcccctggcatgatggcccaggcacttcttgagcacagagagatggaggccccagggaggcccttctgaagaccgaggaggcaaaggccgagggggcccagggacctgcttcagagagtgcccaaatctgggcgtttccagcttccttaggacggagagcaccacgatgggattaccacagagattgaaccttttgggggccctccagggagttggcaccccttctcgagggggccggagtggcagtaactggggtagagggagtaacatgaactctggcccgccgaggcgaggangctttcacggggtggttggaagggggtcggtagaaagctggaactgagtaccctggaggccctctctgggacaagtatgtaaagaactttcttgtggacctcacccaagagaaacaaaaggaagccctgccacccattgtagcccctgaactccttttcctgggcaccctgaatccccaggaacccctcaatgagggtcttcaagatgaagatgactgctgcccagctaaccagcctggctggccctgtccctgtccaccctcattgccccaactccccatgttgttttgtgaagataaaagctgggatctttttctttttttttaagtctcacaagacatggggcatctccacaaatttaagttcctgtccatttggaaatttgtttctatgtgtacaggttggcagaaaaaaacaaaatttttgtgttgattccaaattgtgatttacgcaagaattgacagaaaactagttgtgaagtgcttgccttaaggaaacctttggtttccatcgcatcccatctgccaaggaatg

SEQ ID NO: 154979 - DNA, 2544 bp, Homo sapiens
tccagtttccaaaacaacctttatcctgtttgaaagacctaatacaatgcattaaagcacacttaaaacaagacatagctcccattgaatcctataactttgaacgaaatgtcaaggaggcacactacccccaccccccaccccagttgccttgtgaaggcaaagttacaactgaccgtgacatcctccctctcgtcaaaagaccaactttattttaacaatgtcatataaacagatttttaaaaacattgaacagattgtacgctttaaaaaatacacaggtataaatgagtttttttttgttttgatttttttaaatacatatacatatgtggcgtatatatacatatatgtatatacatatatatatacacatatacatacatatatacacacacacacacatatatatatatatatatatatatatatatatatatatatatatatacacacacacacacacacacacacacacatatatatatatatatatatatatatatatatatatatatatatatagcagcatcctgggcagcaaatgctatctcatggagacaagtttcatgttaagtgggatagtctttccaattgactcaattctatttcctccccacccataataccagtattttatagaactagcttttttaaaaaaataagaattttggcattttggaactttgtcccatgtgagacattgtgcttttaaactgcccctttctaaaaatgacccctaaactcaaacagatctcagtgtctgcgtttcaactaacttggataccatacatagcaaaagcacaggttgttaaaaccagcagattttttcttccaaaggaacatcagtaggacttcccaaacatgttactagttcataaccagctatatgacaaagcaattggttccccacagtgacagctcacataaacacattttgactctgacacactgaaaacaaggatttccaagctaagcaagtcatcagaccagctccctaaaaggagtaacttttaaaaacacaaaaaagccaaagaaatatgaacttctcacttcacttacaaacaattttcacctttgtaagtcaaaacgtgagcatcatccccgggacccatcccatacacataagtaaggattgtactatccgttcgcttgttatgatcgttatgtacttgaactcaacaactactgtggatctgttttggctgaaaggtgtactggaaacacagtccatgcacatataccataatatacattttatccaaaggcccatgaagttatccagaggtggcaaaacacatgctttttttggcccttttccacatggttatggatcctctccgtgtgtgtaaatgtgaggtccccaatggctccccacttcctacgccccaatccacagcctccactggcagcttagcttcctggctttatccttttaggatggctacactgggtgggaaaaactgaacgccatggataaaaaatccatataatccaggagtgccctcctgactgtatcctattccatattccagcccgttccagacaatattgttaggactgtcctgatgaaatcccaaagtggccggctagcaaagtatcctaaaacgacaaatgcggtgggcaagctacactgtaatcaaaaaggcattgggcagaataggtctggtgtaactcaagtccatatggaatgatgaaaccctactttgctgttcaatgaaaagatctattgcacttatgtttgtgagatgcaaaaaataaggcaaatgcctaaatacccgtatcatcttgcaaagaaatgttgaagcacaaagattcacaaaactgtagcttttaatgaaaatattcaatctcagatcttatattttagaaataaaaatttgtatgtaatagcatacatgtgctaccaaaaaaatacccacaaacctagtttaaaaactgttaactaattaactgttagacttgtgtatgatctagaaggatatcacaataactttaaaggcagagacgcagactaaaaccagggaaatcgtcagttgtctggcgatgagagggaaatggtcagatcagtagagtcaagtttgagggctaacagtccttgctataagactgacttttgcttaagtatgagtagttttcatgtaaagaggacaaataatacattccacagatttttcactcagctggcaaggactgatttctttccaaaagggaacaacattaaaaaacaaagtaacagaaaaccctcaccctagtacttaaacagaaatatagctgtgggtaaatctaatatggagaaagagtaatttgaaattgcaagatttcatttagtctattagggtagtgaccatattatggttgctaattagtctttatgcctcccaacacatgtacagttcctactgaacataccagcttttgcatatctaaatcaggaagagagacctctcactcctgccctaaatgggaaacatgatgctaacgtttccttctcccccccgtagtgaagcacatacaatgattagaatgaatgagaaggactgc

SEQ ID NO: 154980 - DNA, 456 bp, Homo sapiens
  misc_feature (1)...(456): n = a,t,c or g
ccgggtcgacccacgcgtccggtggggagccatgctcaccgtggcaaacacaggaaccccatgactcgcccctcacctggcgtggagctgcctggtttgggctggagcagagctggtttcctggaatgttcctttggcccacatatggttctggcccggngagctctgntgtcagaggctcacgggacagaaccacatgctagggtctagggcccctgtctactgatagtcagtttgctgtgtcagaaagcacttctgaaagcagatatgagtcaccagacaggcaggatcttacaaaacttacgggcctcttttgtctgggtggaggccccatgccgttcataagctggccactggaccggatttgcttgctaaggggaagagcccacatcagttttttaaagaaaccaatggaatctgcgcccccacaagcattttggtaacgcaagcccttgg

SEQ ID NO: 154981 - DNA, 1984 bp, Homo sapiens
  misc_feature (1)...(1984): n = a,t,c or g
cttcagggccctggcattgaaccccagcccctgtcccagagccttcccctctggtcccacccccagaagcnacgcacaccttcctttccgcccagctttatctttccttgagctgtgacttcaccccagcatgtgctcagagttgttacaaattttctctgccaaaattaagctgacagagattggccaacttttcaaaccaagtccttttcaatcccaactgttgtctcccccctcttcgccttgggaacaggcccaatgcctggcccagtgcaaaccttccaggatagacacatggtgaaccagagcacgcccaggcttcctgcaggtggcagtgtcgaagcaagtgtaagatgtctgtgggaaaggagaagctccctgcaaatgaacgttctgcaaaacagaaggctgaaggggtcttccccaggcatgtcccagtcactaggagctgcccaccggtgggcttgagtgcccaggctctaggctttgtgcagaaagtcacccggggcggggggcggtaagggagagtctaaaatgggtctctctcaactgcagtcagtgctcctggaaacacggttctcacagacagcacattattctacgtcacaagttctagggtttcaaggacttagccatccaacaggcctcaccataaaaggtaaaagtggacaacccctgaggtcacgctgtcccaggtggcgaacaggccacgcatgccaaaatcctccatagcccactcccggctccagcacccagccaagagggtcgggcccatcgggttctcgaacatacttggttatcagggagggacaagcctgaacaaagtttcacaatctggcccaatgagtgtgggaggcccctggaaacaggccaatcctgcaagccaccccacccttactaacttcctgaagcatgggaagcttctcgagaccaggccaaggtttcctttcccttccatggcacccacgcaaaaggcatttcctgcagtgcctgccaggtccccccttcagccacacagtcccaggtctgtcagggattaaagggccgagcaggaaaaggggtggtaaggagctcaagggcacgcactgggaatggcctcacaaggcagccttgagacgcacaggtgctacagctgaccacccatccaccatcaggcatgtttgcaaaacgaacgcgaggcatgcgttagacagatgcatgtgggggctgcagattccagtggtttccttaagaaactggagttggctaatcccactcagcagacaatcccgcctcagtggaacaccctatgaaaacgccatggggcccatcatgcaagaccaaagaggcccgtgagtttttgtaagatccttgccttgtctggtgacttcaatcatcttgctttcaagaagtgctttcttgacacagacaaactcgactatcagctagacacggggccctagacccctagacatgctgttctgtcccgtgagcctctgacaacagagctcaccgggaaagaaccatatgtgggccaaaggaacattggcaggaaaccagctctgctccagcccaaaccaggcagctccacgccaggtgaggggcgagtcatggggttcctgtgtttgccacggtgagcatggctccccacgcactctccctcagagcagacaagtaggctgaccacagagctacaaaagtcacctgcgtttcactaaaccaagcgaatgtctctttcccctctcctcccccgccgcccccaattacatttttaagcaaacaagcaggattctggctttgatgctcgttcttgacatcggtcactcttgctaccaaaacagggacacagggtggagggtgagcacctctccccaacacaggataaaactcatctccggtgcagaaatgattgctaaagacctttctcatgtcaacccgaaggccacacccagccccctatggaatcagatgggaaacaggcctacgaattgcttcatacttatcc

SEQ ID NO: 154982 - DNA, 1868 bp, Homo sapiens
cttttacttttcttaaacttaggcttcatttacaaaatgttttatttaagcaaggaacaatgtaatactcaataatgacctaaaacacctttttgaaagggtttgcacttggaagagagtttatgttctgttgaaaccaactttgatagggtcctcacctttccgttaaggaggtgccgcactacaagtttcaaattatatggaaaaacctaaaattaaccctctgttggtgatctcataaaatggttttgaccttttggtatcttaatttctatctaaactttatcagaaaattttctttgaatatatcaattagttggctggtgggaattttccctttccacattaataaatgcctttctgtgtttctgaatcagaagcaaatgattagggaaaaatatatgtccaaaccaagacaaggattaagttttaaaacagttaaggaaccatttaagtccacattggcttgtcagccagcaattgtcatggaagctatcatttttaagagtgccactgtgtggatttttttttcaagtggttattacattaaaattacctcatactgaggtttttgcactgaaatatcacagtttcaaatttcatggttaatgttgtgcgtatgtttgtatgtttttaaaggaaacttgcattttcaatagttgatcctaaatttcataaactgcacttctttactctggtaaagctgatgtttttgtgcttattgagaattgccgtagtacctttgaatgtcaaactttatttagaaatataaaacttatcctttatgatataaatggttgagtgtatgtacccagtatttctaattaaatttcacatgctaaattaatgaaagtaacaagattgtaattttttaaagtcagttgattaaatgcaataaatattggttgctcaaatatgccacaaataactcgaaatttttcatttactttcaacagcataagattctttaatatttaggattgactgttctttccagttaagcactgaaggattatgtcttgtagcttccccaagagaaggggaaggaaaaaaaagcactatgttaaggataatacagaactcttttgaactattttggtagtaccttttaccatactgtttgctttttgatttgggtaaatatcttaagagcaaagaaaacaatacaccaaatgaaaatgctttgaaagtaaatgaaaacagcgcttttgaaaggctggtatagtatgaccctgggagtcagcctttgtgttacagcgaaaatgttggtgctataaattctgattgtttacagatgttgattctgcttatgctccaaagtgtgcatgatgtattttacgtagtactctgagggaagtctctttataaaacctacctaccacttagtattaaatttgtttgaatttatatcttttgttactgtaaattcagcttattccaattaggtgggccacagatttaaactgataccacattccacaaaaacccaattccagtgtataagtattgaagtataagcagtcattgcagcttgatgcccagatcatgtatgtaataacaagtggaagttaatagggccttcctaatactgtatgggtactcctaagaattatttcattttggatataaagaagttatgaggcctcctgtcacattcacagctggttctccaaaataatttggttgtttcaaaaacaaatggtaatcatttggttggattcttcagtatcatgactagatcatggtggttttaccatagttgccaagtggtgggaggtagcatacctgaaaatgtacgtgtgtgtttgttgtattttttcacattttgtgaacaaagcacatttattaaaaattttaaattttctagt

SEQ ID NO: 154983 - DNA, 328 bp, Homo sapiens
  misc_feature (1)...(328): n = a,t,c or g
aaaaccctctataaaatttaataaactgtataagtnaactataatgttttatacttnctttttggtgtcttaaaaatttaaagaagcgaggnacatgccatttggtgagtaccgttggaagctattttaatttctaggaaaagccccaaatatcactccaaatagattttgtttgcagatctcagttcagaatgcacacacacacacacacacacagagatgtatttatctttccaaattggattctggtttcagagatagagagttggtataaataattgaaaggntaaatctaaaaccccctgacagtccgccaaattcaagaaca

SEQ ID NO: 154984 - DNA, 1408 bp, Homo sapiens
atgccatttggtgagtaccgttggaagctattttaatttctaggaaaagccccaaatatcactccaaatagattttgtttgcagatctcagttcagaatgcacacacacacacacacacacacacacacacacacacacacacacagagatgtatttatctttccaaattggattctggtttcagagatagagagttggtataaataattgaaaggataaatctaaaaccccctgacagtccgccaaattcaagaacagaagtggttgccaactctctaacaacaatgtttggggaagctgattccaaagtaggctgaggatgagggtcataaggcatactgtgaaaccccaagattcttcttccctggtagaattacaatagttactcttgataaatataagtattccatgtcttgccctctttcctcactctctgcttatccttttagacctaagtttcattggaaatagcctgaattagaagaaagcccatccggaatctttattagccccctctaatgattagtttccaggctgcgttcatacctttaacctctcagtgtcaaagtcctacctaggcctccccacaacagagagggccgtaacagcaatccctgcccctcctttacctcccaggcctcttgcagaggagcccagttgataacaccatggtgaaagttcctttggctgtcctcttgtagaaggtgctgcagtgcaaagtatttaatacggtctttaggacaaaattaactgtcatgatttgggaccagtttggttgagcttgtcagaagacatttcatttgtttcatttctgcacttctctatgaattttgggatactatatttctgtgaaggacttattgtatagaccacctccaaaaggggaaggaaacttccccgtattaccacttcttccggggaatatagctgtagtatttcctccactggtattattggataccctgtgtaccggaaagtatgccagttattccaggttaatgtttccatattaaaagaatgtaatttgtaaaatgtaacatggatcagtagttacccttttttccaagcctctgaagaagttcagattacggtgttagacttaagttacagtgaaaactgttttaatactacttttgtggctagcaaaggttgtgcatcctatttaaaattatttacaggatgctctaaataaaggggcattaaagataggtttagctcttaattttagaaattgtgacactactgatgtctgtcaaacagttattcttcagaagttctttgagatgtcaaaaataatttttgtttaattcagagataagtaacccctgctttattgattcactattacaacaaaccctaattttgtcattaaatattttaactctgtgatgaaaaaaaaaaaaaaaa

SEQ ID NO: 154985 - DNA, 881 bp, Homo sapiens; identical to SEQ ID NO: 147452
  misc_feature (1)...(881): n = a,t,c or g

SEQ ID NO: 154986 - DNA, 1564 bp, Homo sapiens; identical to SEQ ID NO: 147453

SEQ ID NO: 154987 - DNA, 692 bp, Homo sapiens; identical to SEQ ID NO: 147454
  misc_feature (1)...(692): n = a,t,c or g

SEQ ID NO: 154988 - DNA, 917 bp, Homo sapiens
accccaaacctcagcagtttaaaacgattttcttttctctggatttaatgggttcaggacacgtttggcaggacaggtatcacgtgtgtttgtccaggcagttggaggcatgtgaagactcactgagacgtacagggaagctcttggggctggacactgatgttggctccccctgaggtgcatgccccaagctgagaagactcaaggttccagccagagcctggaatcactaaaggcttgtttgctcacaggtctggctcctgggctggaagggcttagggaccaggactactaaactcaggtgcttcccatgttcagattcaggtcgaaaacattttccatcaccctccaaagtcctcttgtgctcagctgtggccggctcccatttctgcccagcaaccactcatctgcttctctctgtaaatgtgccttttctggacattccatggaaagggaactgccacatgagtggtctttcctctggcttgtctcactcagtgtcccacctttgggactccttcacggtgtggcaagggagtcagcagcctgctcctcactgtcgctcagcccgtcactgcatggagagcgtgcacacttcattttatctgctgaaactctgttctcactcttgctctgctgttttcccttcatgtccaccttcctcccccaccctctggtgtgacagacactgctggggcccttccaacaggcggtcctccttcccccacttccgttactggcagaggtcctgcccactcccatgcttcacagctccctccagcccctggtgaatttgcaccattgaatgagtcctgcagaggctgggcaggcgaagccttcctggaaaaggtttccttgctaatatgaagcaaggagcaatgcctttgcagtagatgcagtcctgcctgcttgaattc

SEQ ID NO: 154989 - DNA, 430 bp, Homo sapiens
  misc_feature (1)...(430): n = a,t,c or g
gtgagggctagagaaaggaaaagattagaccctccctggatgagagagagaaagtnaaggagggcangggagggggacagcgagccattgagcgatctttgtcaagcatcccagaagactgcgccatggggctcagcgacggggaatggcagttggtgctgaacgtctgggggaaggtggaggctgacatcccaggccatgggcaggaagtcctcatcaggctctttaagggtcacccagagactctggagatactatccatgctctttctcactgttgtcataggatcattatgccctctcttcatgactgatcgagtcatcgtcttattatttatctcctttttatatcatcattattgttatgactcttatcacctttttcttacttataatattctatatcgttcttgtttatccatgctgccagg

SEQ ID NO: 154990 - DNA, 2395 bp, Homo sapiens
  misc_feature (1)...(2395): n = a,t,c or g
cggcgtagtgcccttctgccctgcctgacgatgtatcgaaaagatgagagtgaaggagactttgtgcagcaggaaacgggtaggtgaggtgttgggcagttgtgggaacttctgagagtattacagagtggtagaatcggtaagaactcttgatttggacttcgctttggtgggaactgtgtgcctatacctgcctgtgtgtgtgcaagtgtgcaggttcctttgtatgtatgtgtacgtgtgggaacctgtgtttgtcatatttttcttcatttcacaaaggctttttttgaagcagtggcagtatgcttttgtttcaagaacacatgaaattcttttaacaccagattagtgtgttaccccaaatgaacggttctagccctctattaaggaaataaaggggaccataaggcattttgggctgcttatgggctgtgtgttactacttacaagagtcttgaaaattatacagaactttgccttctttttttaatgtcttccacaatgttgtgactgattataaccctgtttcccctcagagaagagctatggctcagggatctgtgttgactctggcatttagtggctttgtgaaggaaagaaaccattaaatgacctgacaaaaactgactcatgtctttaaagtagttgaagccacttttaggaatgttactctcggttgcttttgtctaattcttaatgggcttaaagccaaggaaaaccatagtattaaatcttttttgtgtaccctatggctagtgttttaaatgggcagttccgttgtggataaagtatccagtcacttcaagttttctgtgaaaagtttttaattaggttaaaaataattttggcatacgtctctactcagtttataaaagcagttccacaccatgcaaacaaaaactctaacagcaaagggttatcttggacctgatggttacttgaatctgagagaaagtcattacttactactgcactcctgcttttgtgggaaaaattttcttcttccccagaagagttaacagttgagtgttcagctcctgacttacctttaatttagaggcaatattattactgtttaagtgattatttgcttaacacaggttttattttgtctttttgctggtagattatacaagggacaactttagtgatgaggcatgtggatgatttggtgggagtagggtatatacttagtggaatgggtttattttatggaagagaattccattggaggtggaggattggaagtatattgtgaagtgggatttgaacagcacatatgctctgggtttgctcaaataactgcaagtttatgcttacatctaaaattttggtttcctgttaccctaaacgggagcttctagaattacgaaggcccatacctgccacgatttataaaataatggttttatccctggcccccaaatccatccaggttcccccgggttttaaggagaagtgggtctaattagacagggaatagaagttgtggtggaggtgatttggggatagactaggtttcccttatgcaagtggatatgagcttcctcatagaaaaccagacctactgtaattagaccagtaaccctcctaaccctcaccctcccaagccccaagtaatatggcccctgcctgggttaccctggtgactaccatttcccccagattccactcctaaattccaaggtagtgacccaaataaatttgggaaaggaggggggtcaaggaggaaaagcttgttgaaaaatcttttctcctatttaagagaaatatatgccctagagctgctccagcacccttggtttctgattttttttaatattgaatatggattagaagaatgaaatcagatgacacctgactgcaaagaatgtttcatnaagcgaaatagccttcttacattttggtataaagctgtgaacttcgtaactttgtaaagcaagcacataaagccaatacaagagggaaaataaagtactttttacttaattgacggtttactttcgttaccttgtctggcatattcaaggccagccctttccacgttgggcttagccgaggaagaaggaaactgggtggaaaacacaggatgcctatagatatgccgcaggccatggtccagagaagtttagcaaacaaacagctgcgttcagggttttgtcccacggtcatgcgacaggtcagttagtgagcagaggagctaggatagctcaatctccactccattattcaggtaaccggcccctcccgttgtacatgacccatttattcttgatgtcttttacagcaacaactattcctctgccttccttttatgtcttggaaagtatctgagccattcttatgctcaagaaatagcaataggcatgattacaaaattcaaaaaaaaaaa

SEQ ID NO: 154991 - DNA, 2595 bp, Homo sapiens
  misc_feature (1)...(2595): n = a,t,c or g
ctctccgaannnccgggcgacccacgcgtccgcggacgcgtggcttggaggtcaaataatagtaggaaaagttcagcagatactgaattttctgatgagtgtactactgcagaaagagtactgatgaaatctccatctccagcattacacccacctcagaagtacaaagatagaggaattttacatcctaaacgaggtactgaggaccgatcatatcaaccttctctgaaatctacagacagcaggagttacccaagtcggggtgctaggccttctcctcggggctcaggaaagggctcaaaatctccttcgccaagaccaaacatgcctgatcgatacttcataatgaagagtagcaatttgagaaaccttgaaatttctcaacagaagggtatctggactacaactactagtaatgaacggaagctaaatcgagccttttgggaaagcagcatagtttacttggtatcttctgttcaaggatctggacatttgcagggattctctaggatgtcttctgagattggaagggaaaagagtcaggactggggctctgctggactaggaggagtatttaaggtggagtggatacgaaaagaaagccttccctttcaatttgcacaccatttactcaatccatggaatgacaacaagaaagtgcagataagcagggatgggcaggaactagaacctctggttggtgaacagttgctccagttatgggaacgtcttcccttgggagaaaaaaacacaactgattgacactcagaactcttagctgtggaagaacatcatgcctatttataaccactgaatgcactgactttcaaaaactgaggtggggtgtgtgttacgaatgggctttttaacacttttagagtgttgctttagaactaccatcttcatatacaggagaaaggaagcatttaaatttttatagtgattatagagaatgattatatgatgtttgtaatgaataaaatagtagtttcattatttggcacaatagcagtttattttaaacaaacaatttgaagttaaacatttcatttttaaaaaccctgaatcacagttcttattgatgactttttaatgcagagtaagttgtttaagaaaggcctgaataaatcagaacatttgagccccattttagaagagtcaacttttaagattatcattagaaaacaaatacgtcaacccctatgaaaagaagcggggaaaacaacaacaagggcaacaacaaaaaaccagtgaaattttacaaggggtcccttttaaaaatagtgtgtgctaactaagggctattcattctgccatttttaacttgagacacatttaagaataaagttggatgttctttttctgtgattatgaaatgcaataaaatctgaataaagggcaaagtttcttcctggatcagattagattaagtgcttagttttattcctaattctggccccttttaacctgatgtgtaccttactctttcctccctctcttcctcccttcctcctctccccactcctttcctgcatttctccctccctccttccctcgtcacatctcttatatgagcacagtaattatgacctttttgttttgggctacaacttgattgaaacaagttcaaaatttaaacaagttcatacaagtttttaaaaattctcaatgggtaggttggttggtgtgcggtctttccaaactaaagcctgcaagcgccacaattctaagtgccgccttccattttttttcagtatgttttcactggcttatgttttcagatatgattttcctttttcgcatatatggtttaataaatgggggataattttttttttgtaaatccgtgcttgtgccaagtctcatatttctttgccatctcagaattatctttttaccaccactgtttataaaatttccttagagactttttgaagggaaaatagagcaacagggaaaaatgaaagaaatgtcttggttactgagctctaaatagacaggtttgatggcacttctcatgatacattttagttattcttataaaagcaaacaggcaaacatgagtgtaaattaaagagaaaaagaaaactctggttttatatttgagaacacgtgaaaaatcatgggtcaacataaaatcttgagaaccttctactttctctgggaaagcattatatagtggtgcattagtttagaaagtcagctatgattttgcctatagttctagttattagctttggggttttcttgtactttaagacatacctgtaaattgaacctatttgaattatattccacctgtatgtgtattatggctcttttcctattagaacaaacttgtgtttccctgataatgtgtacaattttttaggcatgtacttaatagttcacaatgttctaaatttggaaggacttaaaaaaaaaaacttgtttaaatttccatctgttttgtaatatcttagctctatatgtaaatgatgggtttgttggtatttaaaatgaatacaacttgaatgtaattaaagtgctgttttttggaagcggataaactttaaatatacttattaaaatgaaattctatattataaaaaaaaa

SEQ ID NO: 154992 - DNA, 410 bp, Homo sapiens
  misc_feature (1)...(410): n = a,t,c or g
ctagagtggtcctgcagcagcccctggcaatgagctgtctgatgatgagtcccaaggtacattgttctactgttttatacccaggtagaagttacacagcaatttagcaatgttgttaacagacatacagnnnnnnnnnnnnnnnnnnnnnnnnnnnnnnnnnnnnnnnnnnnnatataaacgcgcacttaaaattcaaagtttattttttatcacaagcacctttgaaatgtacgtggaaaacgtcggctgctcgtgagaatcatgtgtgacttacgttccttatgttttatggaactctcggaacaggggtttgtttttgcttannnnnnnnnnnnnnnnnnnnnnnnnnnnnnnnnnnnnnnnnnnnnnnnnnnnnnnnnnnnnnnnnnnnnnnnnnnnnnnnnnnn

SEQ ID NO: 154993 - DNA, 828 bp, Homo sapiens
  misc_feature (1)...(828): n = a,t,c or g
gagagagagtcttgctctgtcacccaggctggagtgctggagtgcagtggtgcgatctcaaaaaaacgaaaacaaaaactaaacaaaaacaaaacactgttccgagagttccataaaacataaggaacgtaagtcacacatgattctcacgagcagccgacgttttccacgtacatttcaaaggtgcttgtgataaaaaataaactttgaattttaattgcacgtttatatcaaaacactcacacacacacacacacacacacacacacacacacaattctgtatgtctgttaacaacattgctaaattgctgtgtaacttctacctgggtataaaacagtagaacaatgtaccttgggactcatcatcaggcagctcattgccaggggttgctgcagggaccactctagggaccccaggaccctgcagtcgagcatctctgaggggtccaggtccaccctacagctcagggagaaaatgacatcactacttgtcttgaaatctacagaggaacaccaaccacagaattagggtctagattgggtgcctgtaggtaactcagtcaattaaaaacagctctgaaacccagacaacctgattatgaaatccttaccttattttgtcaaatgagcaacacagtatgaataataacttctcattttaaaacaggtaccatgatttnnnnnnnnnnnncttgcaagatttcatctttaccagcccacgctctggttggtgggggttaaactccaaggcgtctctgctgctacaggagtcactacccctcagcgttgtctttgtaccacttgccaccaccagatggcactgccg

SEQ ID NO: 154994 - DNA, 1955 bp, Homo sapiens
ttgctgttcccgaccctccaccggagggccgctgacttcagcgcaatgggactaatctcgcactccttaaagcaggtgtagctgatttcaacttggaaggtcttcattttttcccaaaaagcgtgaaaaacccgtttttagaaacagagatttgcaacgttcagaagaggtttcagagctaagaaagacagagagagggccgccttggacagtgggctctatcagtgaatgcgtccagtcttagcaacggcatgtctccatgcagtagttttttgccgcttcccattgtatcaccacatggtaactgctatcaacagttcagatccttaataacatggcagcttgaatgttctgttactttcagagaaagtatgccttgaattctctccccaactcaggtacaaacgcttgaatttcaaactcatactggtttacaccccagagtggaatgcttctcaagatttcgtgagcagctagacacaggaacccacagccccagatacagaacaccagactttcagaagcagcaaagccctgtcctgctgggcatggaccaagcactatccgcaaatggtctccagtgagactaaggcaagctaacaaggaagaggatacagcacaactcaagccagattgcccacctcctccttcctccacatcctctttctagcaaaagcgaacactgcagataagagatagcccactaatgtagcagatacagtgtgcccaggggcatgtttccaagacacactctactaagcacagctctgggcagctccagaaccacatcccagataataactcaaatattcaaaatagtagaaacctgtcccaacattggcctctgtcacagagagaagggattgttgttacgcttgacaggaacatgcaaatcccatttgaggagcccacaatgagaaacagaaggtgaggagacagtgctaacagccctggcatctttcttgccagtgaggaggtgggaaccaatggcaatgcaagcttttcccctgcagcataagggacagagccacacgtaaggcacctggaattttacagtgggacgccagttctgagagtggccggtcttggtgattaaggaacccactccacaggaggaatggtctctccccctctctcggggctgaatccaaggccagcacacaggggtaagctaggaccttctcagtgagaaagctgccagcatgtggcattgccaagactctggcctgggacaaagcactgggccaaggttcggggccactcgccctaaagcccacacagggagcagcactggtggtggatggaaagaagtttctgtggccacacactgtctcttccatccctggcccccatacggcctttctcccaagcacatcaggacactctcctgtcacaggtactgtgacacctcacagtcacttaccagatacctgggcctttcctagtgacatccttctactgatgctaactggaccctggccacatcaatcgtctcatcagagggtttgtggagtctgtccactaagggtctgaggacaatagcagcccacagatgtgcaagtgaacttttttgagaacgcatcactctgacaggccacatcagcatattatgccctttctgaacacctaaaacaattctagctagcagtctgaaggctcagactgcattacgtaactctgatccaccaggaaagttccagaaactacttcagtagaaaggtagataggaaaaccctcctaaacaagaaatgtacaaagagcttcggaggcaaatccccatcaaaagccaatcctccaggctgtgcagtgcagagaaaagtcaactctctcctttagaaagctgctgctgattagtaagcatatcctcgcaacataagccagatcggacgtgtgggcggacgcgtgggtcgtcgctggaattgcggattgcggccgagtgccatcgacagtcagat

SEQ ID NO: 154995 - DNA, 2211 bp, Homo sapiens
tttttttttttttttttttgactgtataattttaatatttgaaaaattgcatccagaaattaatacaatacagatttgtacaaaaaaggaaggacgtaaaaacttctaatcatacagacaaaaatatgactgactaagcaaagattttaaaaaaggacaggatgtttaaaaaatactgataaatactgtgtaatgctttaatttactgtggcagatacaaaaatcaataattcattaacagattatatatgtaaaaaaagtaactacatgaattttctagctttttaaattaataaaatgtaacagtagtggtttttattttttaaatgaggtattattacactgtaaaccaaaaacagagcacaaataaataaaggcaatgtgcaatttagtgataaatggattatacatttcaacttaacaacagataacaaaaattctctagttatttatggacttcgtcatctaaaaatttggcttgcttgtgtggacttcttatttaaaagtgacacagctaatcgatatacaagcacatcattaaacatgcagaccaagccaacacaatttttccatgagtcatctctaccagataaaaactgtttacattttatttaaaacacttaaatctggtttcttatacatgtttcttttgtgcttataagtggtaacctacattaaaaagccgatgtctctagtgcaagcagtgtaagagagaagcagttttatttgcatatggatttaaaaaagagcaaaataaaacaaaaccaggatgccttttaactctcttaggctttccaagatttttaagaagaaatacccttgaaataatatacccaaatggaagagcagaatcacttccatctccaagagaatagtaaacaaagtgaccccttttcctcaaagatttgtgggttggcttcagaactgttggagaacaagctgattagttcctccaccctggaagaattctgctggttgggtgcaggaagcatagcaagaaaatagcctagcccagaaagattttggggaaagtattatttgcatatgaaccatatgctggtactaaatgctggtttcattattattgcaaatataacttcagagttttctgaaggaaagctgttaaagtatggtaaagaagtcttggtttggcaatatttgtaacatgctaataaaactgcttcatttgctgtaaattaaaaaaaacatttactgtctgacttaaaatgcagtttctttttacatactactttattagaaactctaaaaaaagggtactttgaatttattatattcagaatccagtgaaaaacaaacattttggccaaaacgttgaattttatttttatactaagctatatcattttgacataaatgtttttaattgatttcacttttgtcaaatactttaacctatctttttcaaaaattagtgttttggtacaactggtgatcaaaaaatgtagatataagtcttgtacatgattcaaaagatttataaaagcagttatattcttttgtgcttgtaactgacatacttcatcaatgattatttagggctgagttcttttctaatatcttgagccttaagaagaaatgatcattatacaaatattacagagtacacaagtaactagtttactgccaatgtgcatgcagactaacaacacttaaaagaatataaccttgaatccaattagtctgaaaatactcttgtacaatcatctttgttgatttgtaaaagctgtacacacatctaaaaccctaaatttactttgtaaaaataaatctttagcaataaatggccctatcaaaattccaattatttccaggttattaggtagttatttacatgcttttcagcaactgctgagaagaatcttataggtcccaagccagtatatcaaaaatccctgtaaactgcatttgcaatgatactgtgttgtataccactatatgaaaatatggctacatgccttatgttaaagataatgtagctgtttgctttgctactgtgtgctagcagtgctagcagtgtacaatctgccactgggttcaactataccataaattcattcttcactgtactttgctttcccagtggaatgcctgtgacaaactacttgtggagaatgataaagtgctatataaaagaggaactggaccatacctgtctctgccatgtggacttttcctcactcaagcgatttc

SEQ ID NO: 154996 - DNA, 707 bp, Homo sapiens
  misc_feature (1)...(707): n = a,t,c or g
gatgtcctgagtatagggaaccagggccgttgaaaatcagtaaaggttgattacctggggcgagaccgggtgactgtggcagtgcaggtgaaggtaccctggaccttctcagttcgctggcacataaggctccgccaataaagcgtggttctctctgtcacacacacacacacacacacacacacacacacacacacacacacacaatgattggagggctatatgatccagcattagcttcctggtgtgccaagcatgcttgatcgggaattttttttttattattattattttttagctgtagctgaaggcatttctcggatgtggagaggagaatggaaatcgcagaaccaaatcagtttgccctgccatatttggctgtggtctgtcattgggcatttctgatggtgcttttctggattcaggaagagctgattgtcctccgagggttgnnnnnnnnnnnnnncagtttcaaaaccctgaatccggggccttatagtccccccaattatcaatttttttctcccttccctcgcccaggggagggggggaaacacttttcactgcaaagttggctttaaagttttcccatcttgcgggcattatcccttgatattaaaattattttctcagttaaatccacctcctgctgaaaagctgggggaaattaaggctggggggtttttttcttgacctttttgggaggg

SEQ ID NO: 154997 - DNA, 1249 bp, Homo sapiens
aggttaattacctggggcgagaccgggtgactgtggcagtgcaggtgaaggtaccctggaccttctcagttcgctggcacataaagctccgccaataaagcgtggttctctctgtcacacacacacacacacacacacacacacacacacacacacacacacaatgattggagggctatatgatccagcattagcttcctggtgtgccaagcatgcttgatccgggaatttttttttattattattattttttagctgtagctgaaggcatttctcggatgtggagaggagaatggaaatcgcagaaccaaatcagtttgccctgccatatttggctgtggtctgtcattgggcatttctgatggtgcttttctggattcaggaagagctgattgtcctccgagggtttgaaaaaaaaaaacagtttcagaaacctgaatccagggccttatagttctcctcattatctatcttcttctcccttccctcgcccaaggggagtggggggaaacacttttcactgcagagtttgctttaaagttttcccatcttgcgtgcattatcccttgatattaaaattattttctcagtttaatccaactcctgctgagaagctgtgtgagatttaggctgtggggtttttttcttgtactcttttggatggtgttgcatttttcactcttaacccgagggtgtgtttcagcttatgttcgttctgtttcatgcaggtttatagcacggtagagtagaaggcggcttctgatttttagggtatttttagaattcattcctgagtgaggggttcagacacccagtctcctcggaacaggggtgaggggtcaactgagctttgttgagaagcctccagttaggcttcgggcgggtctcccatgttatattgtgtgtttacctgagcttccccactggtaagaagatgacacatttgtccatcgtcctgtgtatctgctttccagaggacaccggagcattctcctggggtcactccccacatggctgcctcacatagctgttttgcaacagcctttattgccaacacccttggaagaacatctcctgtagaagtacaagttttgcaatatggactttggaagtggttttgtgatgttcgaattttctgttagcctattgctcaagcactacagaatgtacatagtccctttggccatcctctcaccccagaatatcctaataaacattgttttcttttttaaaaaaaaaaaaaaaaaaa

SEQ ID NO: 154998 - DNA, 357 bp, Homo sapiens; identical to SEQ ID NO: 126848

SEQ ID NO: 154999 - DNA, 412 bp, Homo sapiens
ggaatgtggggacgtctgcgacaccggggacagagcatctgtggatgaagagggctacatctggttcctggggaggagtcatcacactatcaatgcctctgggtggtgaaggcattgattgtcctgaccccacagtttctgtcccatgacaaggaccagctgattaaggagctgcagcagcatgtaaagtcagtgacagccccatgtattgggtgttaggaatccataatacagtgaacccataattgactgcaagcatcactttcaaagcatcatttcaggatgagaatttaagtgccaagtgaattcaaggaacagtgcaaaggatccatggcctcagtcaccatgaagaccctcccaagagccagccctactgggaacatataaatgagtggagacctggaatacgaaa

SEQ ID NO: 155000 - DNA, 849 bp, Homo sapiens; identical to SEQ ID NO: 126851

SEQ ID NO: 155001 - DNA, 1171 bp, Homo sapiens
ctcagttgaaaactgcattattgtgagcatgaacaccgctgaccctggcagccagggcatcacacacagtaggtaggaaagaatacctagaggctgcactgggagccctctctagcaagtggtgcttttcattttttttgatcactgttttccaacttgaagacacattggtgacatctactaactcatgaaacatagacccttggcttgagtttcacatttgcgtattttaaaggcttttgacagttttattccattttctgatgtttcctctgttatttcatccacactggtgtcccatgcataaaccagacagtgcttgggaggggcagaagggctgcggcctcctgcagtgtatgattcacaggcctcttgctacaggtcattgatgacaagggcagcatcctgccacctaacacagaaggaaacattggcatcagaatcaaacctgtcaggcctgtgaagctcttcatgtgctatgagggtgacccagagaagacagctaaagtggaatgtggggacttctacaacactggggacagaggaaagatggatgaagagggctacatttgtttcctggggaggagtgatgacatcattaatgcctctgggtatcgcatcgggcctgcagaggttgaaagcgctttggtggagcacccagcggtggcggagtcagccgtggtgggcagcccagacccgattcgaggggaggtggtgaaggcctttattgtcctgaccccacagttcctgtcccatgacaaggatcagctgaccaaggaactgcagcagcatgtcaagtcagtgacagccccatacaagtacccaaggaaggtggagtttgtctcagagctgccaaaaaccatcactggcaagattgaacggaaggaacttcggaaaaaggagactggtcagatgtaatcggcagtgaactcagaacgcactgcacacctgaggcaaatccctggccactttagtctccccactatggtgaggacgagggtggggcattgagagtgttgatttgggaaagtatcaggagtgccatgattccaatgttttccttcttttaaattaaattcagttgctctgcttcctccaagtcctctgtatctttagaatttccgcaggtgagcactcaataacgcaagtaataaaatactgatatcaacaa

SEQ ID NO: 155002 - DNA, 416 bp, Homo sapiens
gtcacagactgggaaggcagcctttccttggtgtttaatcattgcagggacacctctctgattattcactcacgtttcaaaggtgtcagaccactcagggacgcctgccttggtccttcacccttagcggcaagtcctgcttttctgggggaggggcaagtaccacaaccccttctctccgtgtctctaccccttctctgcatttctgggggaggggcaagtacccctcaaccccttctccttcacccttagcggtaagtcccgcttttctagggggcaagaacccccaatcccttatttccacaccccgacctcttatctgtgtgccccaatcccttatttccacaccctgacccctttcctgcttttctggagggtaagaaccctcgaacccctcggacgcgtgggtcgaccgc

SEQ ID NO: 155003 - DNA, 467 bp, Homo sapiens
tcttttgtgattcttcagttacttcagcccatctgggcgtatatgtgcaagtcacaggggatcgatggcttggcttgggctcagaggcctgacattcctgccttcttatattaataagaaaaataaaacaaaatagtgttgaagtgttggggcggcgaaaatttttggggggtggtatggagagagaatgggcgatgtttctcagggctgcttcaagcgggattaggggcggcgtgggaacctagagtggggacgttagaagaaacatttgttgtatagaatgattggtgatggcctggatacggttttgtatgaattgaaaaactaaatggaataagagaaggagaaaaacagatataaaaggactaagaattgggaggacctaggacatctaattagagagtgcctaaggaggttcagcatagtcctgccagcaaagattatttattatacttcaagagttaaga

SEQ ID NO: 155004 - DNA, 481 bp, Homo sapiens; identical to SEQ ID NO: 138105

SEQ ID NO: 155005 - DNA, 553 bp, Homo sapiens
  misc_feature (1)...(553): n = a,t,c or g
atgaaatttggtgccgtgactcggatcgggggacctcccttgggagatcaatcccctgtactcctgttctntgctccgtgagaaagatccacctatgacctcaggtcctcagaccgaccagcncaaggaacatctcaccaattttaaatcaggacaccactgaaaatcggactgttcaactcacctggcagccactcccagagcccctggaactctggcccaaggctctctgactgactccttcccagattttctcagcttagcagctgaagactgacgctgccggatcgcctcggaagccccctagaccatcacggacgccgagcttccggtaactctcacagtggaagactcagcccgcctgcacccaggtgaaataaacggccatgttgctcacacaaagcctgtttggtggtctcttcacacggacgcgtgtgaaatttggtgccaaaacccgggtacatcttcctgaatcaggcttctgagaactgttccactttgcagtcctgttggatctatatcttgagaaataaattaaagagcttttccctcc

SEQ ID NO: 155006 - DNA, 5130 bp, Homo sapiens; identical to SEQ ID NO: 116418

SEQ ID NO: 155007 - DNA, 1671 bp, Homo sapiens
tcagtttgccagtattttattgaggatttttgcattgatgttcatcggggatattggtctacaattctctttttttgctgtgtctctgccaggctttggtatcaggttgatgctggcctcataaaatgagttagagaggattccctctttttgtattgattggaatagtttcagaaggaatggtaccagctcctccttgtacctctggtagaattcggctgtgaatctgtctggtcctggactttttttggttggtaagctattaattattgcctcaatttcagagcctgttattggtctattcagagattcaacttcttcctggtttagtcttgggagggtgtatgtgtcgaggaatttatccatttctcctagattttctagtttatttgcatagaggtgtttatagtattctctgatggtagtttgtatttctttggtctttgatgatggtgacgtacagatggggttttggtgtggatgtcctttctgtttgttagttttccttctaacagtcatgaccctcagctgcaggtttgttggagtttgccggaggtccactccagaccctgtttgcctgggtatcagctgcagaggctgcagaacagcgagtattgctgaacagccaatgttgctgcctgatcgttcctctggaagttttgtctcagaggagtatctggccgtgtgaggtgtcagtctgcccctcatccagatgctggcgcccaaggcggaagccacttgaggcacacctggtccagccacagcctcccacattgctcgcgcctgtgctggtgctcctggctgtgtgctatggctggtccccacgtccacttgctcacacactctttgctgcttcacgcctggctcaccatggggtggataggcaaaacaatttggttgataaggcgcagatcctgaactaacttgtaaggcttgtctggttttaggacaggtaaaatgagggaattgtaaggagagtttataggctttaaaaagccatgctgtagcaggcaagtgataacaggctttaatctttttaaagcgtgcttccactgtgagagttacccgaagctcggcgtccgtgacggtcttgactatgcctttagcttcagccacccttttaagagtaaattgctgggcaggtgggggagggctagtcacggaatgaaactgtaagccggaccaggtgtgaggaggggaggtgataaaaggattatagggtggaggagcagaggctgaggaagaattgggacctagctcagcctggcgaggagcagctggatttgaaattggtgagatgtttcttgggctggtcggtctgaggacctgaggtcgtaggtggatctttctcatggagcaaagaacaggaggacaggggattgatctcccaaaggaggtcccccgatccgaatcacagcaccaaatttcatgcgtgtccgtgtgaagagaccaccaaacaggctttgtgtgagcaacatggctgtttatttcacctgggtgtaggcgggctgacgatgtcaccagtggaggcagcagaatatcaaagatggctgcctgctccttcttctggaagctctgtcccaaagggacaccaacctgatgctggcgggaatggtcctgtgtggcttccgggtaggctgtcactctaccctgtttttcctcgctctccat

SEQ ID NO: 155008 - DNA, 1710 bp, Homo sapiens; identical to SEQ ID NO: 125986

SEQ ID NO: 155009 - DNA, 663 bp, Homo sapiens
atggccatactgtccaaggtaatttatagattcaatgccatccccatcaagataccaatgactttcttcacagaattggaaaaaactgctttgaagttcatatggaaccaaagaagagcccgcatcgccaagtcaatcctaagccaaaagaacaaagctggaggcatcacactacctgacttcaaactatactacaaggctacagtaacttttccaaaaacatacaatgctatctccaagagagaatctgactcagcccgcctgcacccaggtgaaataaacagccatgttgctcacacaaagcctgtttggtggtctcttcacacagatgcgcatgaaatttggtgctgtgactcggatcgggggacctcccttgggagatcaatcccccgtcctcctgctctttgctccgtgagaaagatccacctacgacctcaggtcctcagaccgaccagcccaatgaacatctcaccaattttaaatcagcttagcagcttaagactgacactgcccgatcgcctcagaagccccctagaccatcacggacgccgagcttcagcccgcctgcacccaggtgaaataaacagccatgttgctcacacaaagcctgtttggtgttctcttcacacggacacgcatgaaaatgacaaaaacaagcaatga

SEQ ID NO: 155010 - DNA, 798 bp, Homo sapiens; identical to SEQ ID NO: 134002

SEQ ID NO: 155011 - DNA, 825 bp, Homo sapiens; identical to SEQ ID NO: 151507

SEQ ID NO: 155012 - DNA, 933 bp, Homo sapiens; identical to SEQ ID NO: 117142

SEQ ID NO: 155013 - DNA, 585 bp, Homo sapiens; identical to SEQ ID NO: 134004

SEQ ID NO: 155014 - DNA, 771 bp, Homo sapiens; identical to SEQ ID NO: 114661

SEQ ID NO: 155015 - DNA, 1151 bp, Homo sapiens; identical to SEQ ID NO: 114710

SEQ ID NO: 155016 - DNA, 581 bp, Homo sapiens; identical to SEQ ID NO: 138162

SEQ ID NO: 155017 - DNA, 531 bp, Homo sapiens; identical to SEQ ID NO: 120915

SEQ ID NO: 155018 - DNA, 513 bp, Homo sapiens; identical to SEQ ID NO: 117148

SEQ ID NO: 155019 - DNA, 419 bp, Homo sapiens; identical to SEQ ID NO: 132710
  misc_feature (1)...(419): n = a,t,c or g

SEQ ID NO: 155020 - DNA, 435 bp, Homo sapiens
cgagccacgcgtccgcccacgcgtccgtggtgatggcctggatgcagttttgtattaattgagaaactaaacagaagagacaagatctgaatgaaagaaggagaaaaataggtattaaaggactaagaattgggagtactcaggacatccaattaagagagtgcccaagggggttcagcataattatttgcttggttggcaagtttttggactctatccttgagtttttttatgttgtcatataccaggccagattgatttaggtaaaaacaacactcttcatttaaaaatatacagagtcgtcctttttcagcaatgagtaaattgaggccttggcgattttggaggaaagagaattgcaaagccagcaattatttgttaaagaaggattagaaacggctaggagagagtcagtgagattgatagtgtgatgga

SEQ ID NO: 155021 - DNA, 1020 bp, Homo sapiens
atggccccaactaactgcaagggctctaggaaatgtggcagaccacatgaacagatgccccacccttatctccctttgctgactctcttttcggactcagcccgcctgcacccaggtgaaataaacagccgtgttcctcacacaaagcctgtttggtggtctcttcacacggacgcgtatgaaatttggtaccatgactcggattggggggacctcccttgggagatcaatcccctgtcctcctgctctttgctccatgagaaagatccacctacgacctcaggtcctcagaccaaccagcccaagaaacatctcaccaatttcaaatccagaaaagtagaacggactaaaggtcttttaaaaacacacctcaccaagctcagccaccaacttaaaaaggcctggacaatacttttaccactttcccttctcagaattcaggcctgtcctcggaatgctacaagtgacttctgcttttcaaaaatttaccctcctttgacaaatgagccaaaggcgctggttgcctctgagtccttggaccctaaaaggactgcacagcaatcaaagggagagggcaccttgccagccaagagtgtgaatctcctcctagagggcaagagtaagagggagaaagcagggaaacaggaggaaatgcttccatattacccatcgcaacttcaatgcatgttgctagaggcagttttggaacccaggatgtcaactgggaaaatattgtggtattccaggatggaacagagacaaagtgacaaatttggaaactacttagaagcttgttatagcaatgattcaatcaatggcaagatgcactataaaggcttaaaaatgagtaaaaatatgaccaccagagacatcttcatccttacaatgaaaacagctcacaattatgactacctgccttgttttgcagctcagcataaaagtggtgttgcaccaaaccctactggagcagccttcatgattagaaagtactccacaccttggagagctgaggagacatga

SEQ ID NO: 155022 - DNA, 1080 bp, Homo sapiens; identical to SEQ ID NO: 119350

SEQ ID NO: 155023 - DNA, 501 bp, Homo sapiens
ctcggattggcggacctcccttgggagatcaatcccctgtcctcctgttctttgctccatgaaaaagatccacctatgacctcaggtcctcagacccaccagcccaaggaacatctcaccaattttaaatccgatcttctcagcttagcggctgaagactgacgctgcccgattgattgcctgggaagcctcctggaccatcacagacgccttgggtaactcttacagtggaggacaggaatgtcaggccggcctctgagcccaagcatgcatgtatacatccagatggcctgaggcaactgaagaaccacaaaagaagtgaaaatggctagttcctgccttaactgatgacattaccttgtgacattccttctccgggacagtgagtctccggagctccccactgagcaccttgtgacccccgcccctgcccgcaagagaacaaccccctttaactgtaattttccaccacctacccaaatcctaaaaaacggccccact

SEQ ID NO: 155024 - DNA, 1398 bp, Homo sapiens
atgaacatgaacatcaaaaaaattgtaaaacaagccacagttctgacttttacgactgcacttctggcaggaggagcgactcaagccttcgcgaaagaaaataaccaaaaagcatacaaagaaacgtacggcgtctctcatattacacgccatgatatgctgcagatccctaaacagcagcaaaacgaaaaataccaagtgcctcaattcgatcaatcaacgattaaaaatattgagtctgcaaaaggacttgatgtgtgggacagctggccgctgcaaaacgctgacggaacagtagctgaatacaacggctatcacgttgtgtttgctcttgcgggaagcccgaaagacgctgatgacacatcaatctacatgttttatcaaaagactgctcctcgccaggccaagctaggtcccaattcttcctcagcctccgctcctccaccctataatccttttatcacctcccctccttacacccagtccggcttacagtttcgttccatgactagccctccccaacctgaccagcaatttactcttaaaaaggtggctagagctaaaggcatagtcaaggatttaattaacctcgccttcaaggtgtacaataatagaaaaaagttgcaattccttgcctccactgtgagacgaaccccagccacatctccagcacacaagaacttccaaatgcctgaactgcagcggccaggccttcctccagaacctcctcctccaggagcttgctacaagtgccagaaatctggccaccaggccagggaattcctgcagcccaggattcctcctaagccacgtcccatctgtgccggaccccactggaaatcggactgttcagctcacctggcagccactcccagagcccctggaactctggcccaaggtgttatcacgagttatggattatatctagatggtatattaatccacaattcctcagaactcagctatcgtgcttacggatttgctccttggagtttacattccttcagagtccaagcatgcacggccaaaggttgtgctctgggcccactggtggaaaatcgaactctagaagctcctcctgaaggaacagtaaatgtgtttgtcaaaacacagggatcccggaaagcccacgtgaggtgggaagcaccttttcgccctaatggactcttaacacactcagtccttttcactgggatattctatgtagacccagccacagatgttggtttctttattttcctgaaaataacctatacggataagctactgcccgacggttctcagaatgtggttcccagagcagcagcaacagccacatctgatgaacgcttagaaatgtacgttgtagagcttctgccccagcctagtgaatcagaaactctagaggctaaggtctaa

SEQ ID NO: 155025 - DNA, 1293 bp, Homo sapiens
atgggaaaaggccgtcgatcgctctggcttcttcctgctgatgggggaagtagcgggaatgggaacgaactccaagggacatctccccatgactatttttccattgcaattaagtccacgcacattgggttggaataccccaccagtagacagagtaacagagtcagcccccagtccaagagaattaggcagccacttgggctgccttctggatccatcactgaaagggggccaccaaacaacaggcagaaagggtacactcgccagcagttttgccacgagagtacaccgaacaaaggagacagggtcatttataacctgacatgtttactctactgctgtgtccggtttccattggctggaacaggaccacacattctgtatttgtcccgattggctagcaacttagaacttttcaaaagagacaaaggcagaggagaacaaaggaaggaggaagtaacttgtttccacaagttacttgctgagaaagagaacaacccccctttttcctttatctacccaaatcctataaaacggccccacccctatctcccttcgctgactctcttttcggactcagcccacctgcacccaggtgaaataaacagctttatggctcacacaaagcctgtttggtggtctcttcacacggacgcacatgaaatttggtgccgtgactcggatcgggggacctcccttgggagatcaatcctccgtcctcctgctctttgctccatgagaaagatccacctacgacctcaggtcctcagactgatcagcccaagaaacatctcaccaatctcaaatccgcatgctttgaaaggattaaagcctgttatcactcgcctgctacagcatggccttttaaagcctataaactctccttacaattcccccattttacctgtcctaaaaccagacaagccttacaagttagttcaggatctatgccttatcaaccaaattgttttgcctatccaccctatgatgccaaacccatatactctcctatcctcaatacctccctccacaatccattattctgttctggatctcaaacgtgctttctttactactcctttgtacctgtcatcccagcctctcttcgctttcacttggactgaccctgacactcatcaggttcagcaaattacctgggctgtactgccgcaaggcttcacagacagcccccattacttcagtcaagcccaaatttcatcctcatctgttacctatctcggcataattctcgtaaaaacacacgagctctccctgctgatcgtgtctgattaa

SEQ ID NO: 155026 - DNA, 818 bp, Homo sapiens
atgagtgaactcccattcacaattgcttcaaagagaataaaatacctaggaatccaacttacaagggatgtgaaggacctcttcaaggagaactacaaaccactgctcaatgaaattaaagaggacacaaacaaatggaagaacattccatgctcatgggtaggaagaatcaatatcgtgaaaatggccatactgcccaagctctgctggtcaacagacacagctgtgttcctcgtcaacaaacagcaacaactgcctgccatatcgggggacctcccttgggagatcaataccctgtcctcctgctctttgctccatgagaaagatccacctacgacctcaggtcctcagaccgaccagcccaagaaacatctcaccatttcaaatccggtggctgaagctaaaggcatagtcaaggttaatgctcctttttctttatcagacctctcccaaaatcagttagcgtttaggctctttttcatcaaatcacccttacctgggtcaacgccagtatcccatcccacaacaggctttaaagggattaaagcctgttatcacttgcctgttacaacatgtccttttaaagcctgtaaactctccttacaattcccccattttacctgtccaaaaactggacatgccttacaggttagttcaggatctgtgccttatcaaccaaattgtcttgcctatccacgccatggtgccaaacccagaaaccttcataccccttaccgtcctcaatccttaggaaaggtagaactgattaatggtcttttaaaaacacacctcaccaagctcagcctccaacttaaaaa

SEQ ID NO: 155027 - DNA, 504 bp, Homo sapiens
taaaacggccccacccttatctccctttgctgactctcttttcggactcagcccacctgcacccaggtgaaataaacaaccatgttgctcacacaaggcctgtttggtggtctcttcacacggacgtgcatgaaatttggtgccgtgactcggatcaggggaccttcccttgggagatcaatcccccgtcctcctgctctttgctccgtgagaaagatccacctacgacctcaggtcctcagacggaccagaccaagaaacatctcaccaatttcaaatctggtaagcggcctctttttactctcttctccaacttccctcactatccctcaacctctttctcctttcaatcttggcgccacacttcaatctctcccttctcttaatttcaattcctttcattttctggtttttacaaaagagacatgttttatccatgaacccaaaactccggcgccggtcacggactgggaaggcagccttcccttggtgtttaatcattgc

SEQ ID NO: 155028 - DNA, 1035 bp, Homo sapiens
atgtggattccaccacagtttatgacttgtaccttccagtgtggcaggtcgagctgcaccttggcccatttgagccatgactggggtagtcaagaaatgctgcactggaatatggggagcagaaaattgaagcagccctgggacgtcttggcactcagagcctgtgatgggaagggtggcactgactcagcccccctgcacccaggtgaaataaaaagctttattgctcacacaaagcctgtttggtggtctcttcacacggatgcgcatgaaatttggtgccgtgactcggatcggggggacctcccttgggagatcaatcccctgtcctcctgctctttgctccatgagaaagatccacctacgacctctggtcctcagaccaaccagcccaaggaacttctcaccaattttaaatcagtcccaactccaagcgttgctgagtctttccaatcttccttttctacggacccatctgacccctcctctcctccccaggctgctcctcgccaggccaagccaggtcccaattcttcctcagcctctgctccccgaccctataatccttttatcacctcccctcctcacacctggtcgggcttacagtttcattctgcgactagccctcctccacctgcccaacaatttcctcttaaaaaggtggctcaagttaaaggcatagtcaagcacgctttaaaaagattaaagcctgttatcactcgcctgctacagcatggccttttaaagcctataaactctccttacaattcccccattttacctgtcctaaaaccaggcaagccttacaagttagttcaggatctgcgccttatcaaccaaattgttttgcctatccaccccgtggtgccaaacccatatactctcctatcctcgatacctgcctctacaacccattattctgttctagatctcaaacatgctttctttactattcctttgcacccttcatcccagcctttcttcgctttcacttggactgaccctgacacccatcaggctcagcaaattacctag

SEQ ID NO: 155029 - DNA, 875 bp, Homo sapiens
tctgacctaaaatctaagcatcttattttcttctgcaatgccgcttgaccccaatacaaactcgacagtagttccaaatagccggaaaatggcactttcaatttttccatcctacaagatctaaataattcttgtcctaaaattgacaaatggtctgaggtgcctgatgtccaggcattcttttacacatcagtcccttcctagtctctgtgcccagtgcaactcgtcccaaatcttccttctttccctcccacctgtcccctcagtaccaaccccaagtgtcgctgagtctttctaatcttccttttctacagacccatgtgacctctgccttcctccccaggctgctgctcgccaggccgagctaggtcccaagtcttcctcagcctctgctcctccaccctacaatctttgtatcacctcccctcctcacacctggtccggcttacagtttcgttccgtgactacccctcccccacctgcccagcaatttactcttaaaaaggtggctggagccaaaggcatagtcaaggttaatgctcctttttctttatcccaaatcagatagtgtttaggctctttttcatcaaatataaaaatctagcccagttcatggctcgtttggcagcaaccctaagacactttacagccctagcccctaaaaggtcaaaaggccatcttattctcaatatacattttattacccaatctgctcccgacattaaataaaactccaaaaactggaatctggccctcaaaccccacaacaggacttaattaacctcaccttcaaggtgtgaaataacagaaaaaagttgcaattccttgcctccactgtgagacaaaccccagccacatctccagcacacaagaac

SEQ ID NO: 155030 - DNA, 3424 bp, Homo sapiens
ggacacctctctgattatacacccacgtttcaagggtgtcagaccatgcagggacgcctgccttggtccttcacccttagcggcaagtctcgcttttctggggaaggggcaactcaacgccaatatcccatcccacagcaagctttgaaaggattaatgcctgctatcactcgcctgctacagcatggccttttaaagcctataaactctccttaccattcccccattttacctgtcctaaaaccagacaagccttacaagttagttcaggatctgcgccttatcaaccaaattgttttgcctatccaccccatgatgttactaggggagatatcagtcaccaaggccttggctggctccctgataaaagcccttgcagtattccacactgcagaatccccaggctatgctctcctggattcttactacctgctccagaaagggagtgtttgcatctccatcctccaagaagaggaagcattttcttggccggggaaaggagagtgtcgagataagtcctgggcctctctgggcctaatacccgcatttccccagggaggacagtggaaacaggccctggggcttctggaccacagctgcctctgctttggggaattaggcaccaggttggcagccccagcatccttcagcaccttcccaataacaaaccgagagcgggagagaaaaactgacaagctgattccaaaattcatgtggaaatgcaagggacccagaataaccaaaacaatcttggaaaagaatgaagttggagaatttacacttcttgatttcaaaacttaccacaaatttgcagtaatcaaaactatgtggtactggcataaggacagatacattgatcaacagaatgacattgaaagtccagaaataaattcatatgtttatggtcaactgatttttgacaaagactcagcccgcctgcacccaggtgaaataaacagtcttgttgctcacacaaagcctgtttggtggtctcttcatatggacgcgcatgaaatttggtgccgtgactcggattgggggacctcccttgggagatcaatcccctgtcctcctgctctttgctccatgagaaagatccacctacgacctcgggtcctcagaccgaccagcccaaggaacatctcaccaatttcaaatccggaccccactggaaatcggactgttcaactcacctggcagccactcccagagcccctggaactcttgcccaaggctctctgactgactccttcccagatcttctcggcttagtggctgaagactgacactgcccgatcgcctcggttgaagccccctagaccatcacggatgccgagcttcgggtaactctcacagtggaaggttcccacggcgcccctaatcccgcttgaagcagccctgagaaacatcgcccattctctctctccataccaccccccaaaaattttcgccgccccaacacttcaacactattttgttttatttttcttattaatagaagaaggcaggaaatgtcaggcctctgagcccaagccaagccatcgcatcccctgtgacttgcacgtatatatacgcccagatgggcctgaaagtaaactaaagaatcaccaaaaagaagtgaatatgccctgcccccaccttaactgatgacattccacccacaaaagaagtgaaaatgggccggcccttgccttaagtgatgacattaccttgtggaaagtccttttcctggctcatcctggctcaaaaagcacccccactgagcatcttgcgacccccactcctgcccactgagcaccttgcgacccccactcccacccgccagagaacaaaccccctttgactgtaattttcctttacctacccaaatcctataaaacagccccacccttatcttcccttcgctgactctctttttggactcagcccgcctgcacccaggtgaaataaacagccatgttgctcacacaaagcctgtttggtggtctcttcacacggacgcacatgaaatttagttgtatccataaggcatatggaggagactaattcctcttccaaagacatgtaccagagtcctggagaggctgagggctggaggtggaagaaaggctctgacaggggtcagaatctgttcaggaaacatagcaaatgcctgatacttttaattagagaaaggtttgaatctccacattcatatatttgcagtccagtgacctttcagtttttttatgcccaaagtgtcaagcatgttaatgttaccattgactgcctccctgaaggtgcagctaccaggggaactgccaggacttcaaagcccacaaccaaaagccagaaaacactaccaagtacaagccccggacactggacccagagcacaccctgggcatctgctctgagatcctctccctggacagagacagctgctccttcagaaacagaggagaccctgaacacaggcaggcctcctgagcttccagccagggccacagccacatggttcagtgcctcccacactctcccagccttggctaccaggagggtggccagaactcagtggttgacagctgacagacagacgtgggcttccatatcgtccgtgccctgggctcagaccatcagtgagaaaaaacctggagggtctctctgggaaactcgttcttccccaccgactactgcagggaccgaggaagccatgaacactacaagccttttggcgcctgctgctgagataatggccacacctggcagcccatcccaggccagccctacctcgggagcattcacccatggcacacagactccgagtccaaccaaggcaacagcccccagatatccacaaacaggtgatctctctgcagagtggccattcactgctggtgaagagccagtcctggtcccaagaccccatcaagtttcaaggtgtcctcagccactcttcaaggtgggagctatggcagctgctcctctcaccctggctattcagaggctcaacccatgcctgatggagctgtgccaattcttccagcaatgcctctgcatgagccagaggagtcccaggacagaggacatgagatactgtcttgaatactattcctggtttctgaagaatgcaacatatatctgtcagagggtgaaaagggtgtcccactcgcacaccttaaagcaaaagtgccttgagaatatctgcaagtctgtgtgaggccttgaaaataacactagggcataacaattacttcaggggatacgccatccaccctggctcttgtcccaagtgggctacatttgaagaattcacccaggctccagctagatcatcagttaatttaaagtggttattcttggaagtagcattttttttccctctcctgtgaatctgtgcaaaacattgaaggtagaagttttcttgttaaaaaaaaaggaattc

SEQ ID NO: 155031 - DNA, 6161 bp, Homo sapiens
atgtctgcaaaattgggaaagtcatcatcactcctaacacaaacttcagaggagtgtaatgggattctgacagagaagatggaagaggaagagcagacctgtgatccagactctagcctccactggagcagcagctacagcccagagaccttccgccagcaattcaggcagtttggctaccaggattcacctgggccccatgaggctctgagccggctctgggaactttgtcatctctggctgaggccggaagtgcacaccaaggagcagatcctggagctgctggtgctggagcagttcctggccatcctcccaaaagagcttcaggcctgggtgcagaagcatcatccagagaatggagaggaaactgtgactatgctggaggatgtggagagagagcttgatggaccaaagcagatcttttttggacgaaggaaggacatgattgcagagaagctagcaccttcagaaatcactgaggaattgccaagtagccagctcatgcccgtgaagaagcagctccagggagcatcatgggagcttcagtccttaagaccacatgatgaagacatcaaaactacaaatgtgaaatctgcttcaaggcaaaagacttctttaggcatagaactgcattgcaatgtttccaatatccttcatatgaatggctcccagagttccacatatagaggaacctatgaacaagatggtaggtttgaaaagagacaaggaaacccttcttggaaaaaacaacagaaatgtgatgaatgtggcaaaatctttagtcagagctcagcccttattttacatcagagaatccacagtggaaagaaaccttatgcatgtgacgagtgtgcaaaggcattcagccgaagcgcaattctgattcagcatcgacgaacccatactgactcagcccgcctgcacccaggtgaaataaacagtcttgttgctcacacaaagcctgtttggtggtctcttcacatggacgcgcatgaaatttggtgccgtgactcgaactggggggacctcccttgggagatcaatcccctgtcctcctgctctttgctccatgagaaagatccacctacgacctcaggtcctcagactgaccagcccaagaaacatcttaccaatttcaaatccgatgaagactgaccctacccaatcgccttggaagcctacaggaccatcacagacactctgggtaactatcacagtggaggttcaaaacctccttcacatcctccccttgtatctccccaccttaacccacaagtatgatacctctactccctccttggtgaccgatcatgcaccccttaccatcccattaaaacctaatcaaccttaccccgatgaatgccaatatcccatcccacagcacactttaaaaggattaaagcctgttatcactcacctgttacagcatggccttttaaagcctagaaactctccttacaattcccccattttacctgtcctagaaccaaacaagccttactggttagttcaggatctgcgccttatcaaccaaattgttttgcctatccaccccatgctccttcagctgtactcactctttgttgagtctcccacagttaccatttttcctggcccggacttcagtccggcctcccacattattcctgatgctacacctgacccccataactgtatctctctgatccaactgacattcaccccatttccccatatttccttctttcctgttcctcaccctgatcacacttggtttattgatggcagttccaccaggcctaatcgctacacaccaacaaaggcaggctatgctatagtacaagccactagcctgcctctcagaacctctcatttcctttccatcgtggaaatctatcctcaaggaaataatttctcagtgttccatctgctgttctactattcctcagggattattcaggccccctcccttccttacacatcaagctcgaggatttgcccccacccaggactggcaaattagctttattcaacatgtcccaagtcaggaaactaaaattttaatctctcccactctaggttcccacgccgcccctaatcccgctcgaagcagccctgagaaacatcgcccattctctctccataccaccccccaaaaattttcgccgctccaacacttcaacactattttgttttatttgtcttattaatatcagaaggcaggaatgtcaggcctctgagcccaggccaggccatcgcatcccctgtgacttgcacgtgtacatccagatggcctgaagtaactgaagatccacaaaaggaagtaaaaacagccttaactggatgacattccaccattgtgatttgtttcctggccccaccctaactggattcaatgtactttgtaatcttcccccacccttaaggaaggttctttatcatctcccccacccttaagaagtttctttgtaattctcctcacctttgacaatgtactttatgagatccacctcctgcccccaaaacactgctcttaactccaccgcctatccccaaatctataagaaccagtgataatcacaccaccctttgttgactcctttttcggactcagcccgcctgcacccaggtgaaataaacagccatgttgctcacacaaagcatgtttggtggtctcttcacacagacgcgcatgaaatttggtggatcaggggacctcccttgggagatcaatcccctgtcctcctgctctttgctccatgagaaagctccacctaccacctcaggtcctcagactgaccagcccaagaaacatctcaccaatttcaaatccgaagcgtttaggctgtttttcatcaaatataaaaatccagcccagttcacggctcgtttggcagcaaccctgagacgctttacagccctagaccctaaaagagaacaaccccctttgactgtaattttccattaccttcccaaatcctataaaacggccccacccccatctcccttcgctgactctcttttcggactcagcccacctgcacccaatgaaataaacagccatgttgctcacacaaagcctgtttggtggtctcttcacacggacgcgtatgaaatttggtgccgtgactcggatcgggggacctcccttgggagatcaatcccctgtcctcctgttctttgctccgtgagaaagatccacctacgacctcaggtcctcagacccaccagcccaaggaacatctcaccaatttcaaatccgggagagacaaaggagacacgttttatccgtggacccaaaactccggcgccggtcacggactgggaaggcagccttcccttggtgtttaatcattgcagggacgcctctctgattatacacccacgtttcaagggtgtcagaccacgcagggatgcctgccttggtccttcacccttagcggcaagtcccacttttctggggaaggggcaagctgctcctcgccaggccgagctaggtcccaattcttcctcagcctctgctcctccaccctataatctttttatcacctcccctcctcacacctggtccggcttacagtttcgttctgtgactagccctcccccacctgcccagcaatttactcttaaaaaggtggctggagccaaaggcatagtcaagcggctgaagactgacactgcccgatcgccttggaagacccctagaccatcacggacgccgagcttcagaaaagcagaacggactaaaggtcttttaaaaatacacctcaccaagctcagccaccaacttaaaaaggactggacaatacttttaccactttcccttctcagaattcaggcctgtcctcggaatgctacaagactggctactggccaattgggatatccttttatcagtcaaagctatgtcctggtcaatggatttcaaactgttgaggatctatgtgaagctgcagaccttcgagtgagtgttgcagaccttcgcagtgagtgttacagctcataaaggtggcacacccagagttgtttgttcctcccagtgggttcgtggtctcgctgacttcaggaatgaagctgcagaccctcacgaccagggaatggatgagaatcctactgattttctggaacggctaagaggggccttggtaaagcacatgtctctatctcctgatttagtcgagggacaattaatcctaaaggataaatttattactcaggcagcccctgatattgagaggaagctgcagaaacagaatgggccatctctcagggacatatttttcagtccccagaatggctacaattggaggatggcaagcttttatctaccagttgcgaacaaatggaaaattcttaaaagcctttaccagatcttacacctaggcccagattgggagggaccttacactgtatttctttctactcctatggcagtggaggtcactggaatagactcttggattcattacacccaagtgaaggcctggaaagctgatggagccacctctgtcaacccagaagagcacccaaagtaccaaggtgaaataaacagccatgttgctcacagaaagcctgtttggtggtctcttcacacggacgtgaatgaaatttggtgccgtgactcggatcgggggacctcccttgggaaatcaatccccggtcctcctgtgttctttgctccgtgagaaagatccacctacgacctcaggtcctcagaccgaccagcccaaggaacatctcaccaattttaaatcaggagcttgctacacgtgccggaaatctggccactaggccaaggaatgcctgcagcctgggattcctattaagccgcatctcatctgtgtgggaccccactgaaaatcggactgttcaactcacctggcagccactcccagagcccctggaactctggcccaaggctctctgactgactccttcccagatcttctcggcttagcggctgaagactgatactgcccgatcgcctcagaagccccctagaccatcacggatgccgagcttcaggtaactctcacagtggaagaaggcaggaatgtcaggcctctgagcccaagccaagccatcggcattccctgtgacttgcacgtatacgcccagatggcctgaagtaactgaagaatcacaaaagaagtgaaaaggtcctgccccaccttaactgatgatattccaccattgtgatttgttcctgccccaccttaactgagtgattaaccctgtgaatttccttctcctggctcagaagctccccaactgagcacctttgtgtcccccacccctgcccaccagagaacaaccccctttgactgtaattttccattaccttcccaaatcctataaaatggccccacccctatctcccttcgctgactctctttttgcactcagcctgcctgcatccaggtgaaataaacagccatgttgctcacacaaagcctgtttggtggtctcttcacacggacgcgcatgaaatttggtgctgtgactcggatcgggggacctcccttaggagaccaatcccctgtcctcctgctctttgctccgtgacaaagatccacctacgacctcaagtcctcagacccaccagcccaagaaacatctcaccaatttcaaatccggctgctcctcaccaggccgagctaggtcccaatccttcctcagcctctgctcctccaccctataatctttttatcacctcccctcctcacacctggtctggcttaccgtttcgttccgtgactagccctccccctcctgcccagcaatttactcttaaaaaggtggctggagctaaaggcacagtcaaggatttaattaacctcaccttcaaggtgtacaataatagaaaaaagttgcagttccttgcctccactgtgagacaaaccccagccacatctccagcacacaagaacttccaaacgcctgaactgcagcagccaggtgttcctccagaacctcctccccgaggagcttgctacaagttccagaaatctggccaccgggccaaggaatgcctgcagcccaggattcctcctaagccacatcccatctgtgtgggaccccactggaaatcggactgtccaactcacctggcagccactcccagagcccctggaactctggcccaaggctctctgactccttcccagatcttcttggcttag

SEQ ID NO: 155032 - DNA, 2713 bp, Homo sapiens
  misc_feature (1)...(2713): n = a,t,c or g
tttttattatttatttatttatttatttatttagagacagagtctggctctgtcacccactgcactccaacctgggtgacaagagcgagactccgtctcaaaaaaaaaaaaagaaaaaaactgcaggcaaagttggatttgcggcctatgaataaaaccattactttaaaaagtaatacccccaaaaaagttacacctggaagtttcatcttcatgcctttgtgtaatattactataatgggtgaaatggatggattttaaaaaaaacacatcaggaactggncacatcctcttgggatgatggggtccttcagtcaccttgtgaggcccatgtactttattcccgttgatacagcctgtgcttattaaacatgtgggggggccctccttgtgtgagctgcttgaatggccaggtacccccattcttttgaatattcccaatggcagtcaatcttggcctttaagaataaatttaaatatttggaaatagtccttaggatccaagtttgatcaatgaaaaggatgcttaagctgagtttggggtcacataagaagtgcagttataaagaaataagacatgttgggcatggcagtacacacctgtagtcccagctgcttgggaagccaaggcaggaggatcacttcaacccaggagtttgagtccagccatgggctaacactagggaaaccccatctcaaaaaaacaaaacaaaggacttagtttttatgtggctcataagtgtctctaagttataccaaaagtttgagcacaacagtagtagcagaatgcttagaataaaggcttgacttttaagctgacttttggaaggaccatacccacatagaggcatcttttctgctgtggtaattttttaaattaatacattgctttaggattacatctcaaagtaaataaaaaaatcaatatttaatttgtttttttcctgcaaataaattaaatgctgggaccataatgattatttttgcatagtaatagctggtgaagaagttgttttaaaattaaattgccaaaagtattacctcttggaaaaatttattttcccaaagtttttcccatatgtccatgaaaaccccctaatcctggaccctttatgaacacagtggccattaacactgatgttgggaaagccatgtgtgaagatctgtggcccctggtcgggagtccatatgcccttaaaaatgactgcgagtcagtgtgaagtagtataaagtggagtccctacgtgggaaaaagcaggctactgaggacaaaaacctcccaaccctccccaccttgttttccactggggaatggagaatttggatatgaggaaacttcaaccttggcaggaagtgtgggatttccctctggaaatttaaatgttttcacacatttttgtaccttttgtaaccttgtggtatttactttcacatggctttttaaaaaattattttaatgaacttctatcacactatatgaatgatatgggggaaatactgaactgctcatatttccttttttggcaataaagcactgttatatgtaaatgtaagtgaaaaagaggttcaagactatacaacagcttatgtgtagtatatgttgacatccctaaggtattttgaaacatgaggtgacagacaaggacctcaaatttccagggaaatatttatttcacaacattaggagtgtagctcttcataatgaaatatcttctttctgctaaagattacaatttttcatttagggaactgtgaatattttctgtgagggtttacagaaactagtgtatccttttcactatgttgaaaagacaatctgaactttagctatttatatttcagtattaacacaccttcactgattgagagtcttgagcccttctctacttttataaagtgaatcctatttccaagtcatccatgtcttttgaagtctgtttcttatataagtatttattactttactgtttagcataaataggagacagaaaaggataataaactactaggtcctttattcctattaaaataaatttataaatcccttgaatcaactgaattctaagctttttgaagaggttgctgatgtagtgtgatcaaaagaatctaaggagaacctcctctccaaaatctgattggagctgttcaccctctcaaggacaagataaagattgacttcagagatatatcacatcaagctagaggaaaaaaaaaaaacctcaaataaaatttttcctcattcgaagggatccagggtatccttgggttatgtaggagggaatcatatttgttctaatttacctgaatgtacttgtgtgtgaatccaatcttgattctaaacaccaaatcttgtcaacagtagagaagtatagtaaggagttcctgttgtcaatcaaataagggtgtgaaacatttagaatgctctgtgttacacttgaaccatgtataaatgtaacctgtgtatcttttttttaattagcttttctgaatttaaattatattgtttttctttgtattgttagcaaaatgcatcagaactggattttttttctcatctgaacataatataaaatttgaaagagtattgtgatattaagcactttaacatacatatcagacaaactgacgtgggtttttcaggtttgggagtacatttaaatatgacttttcatgctttgttctttccaaataaaactgtgggattgataaaaaa

SEQ ID NO: 155033 - DNA, 1799 bp, Homo sapiens
  misc_feature (1)...(1799): n = a,t,c or g
agcgacatagagactctggatattcctgagccaccacccaattctggatatgaatgtcagcttcgtttgcgcctttccacaggcaaagacctcaagcttgtggttcgcagcacagacacagtattccacatgaagagacggttgcatgcagcagagggagtggaaccaggtagtcagcggtggtttttttctggcagacctctcactgacaaaatgaagttcgaagagctgaagatcccaaaggactatgttgtacaggttatagtgagccaacctgtgcagaacccaacaccagtggagaactgaactgagccctgttggccagctcccacatccctctgctcctttttatggttcttgttgtcatttcctactctgcggcgtgaaatctatttcactgctctaaattccctatgaatggatttagttctgaggaattaccagtgaaaaattccatctgtgatggagaccaacaaaaataataaaacacaaagagccaggctttgagactcatgtaattacaatttctaatttgaaaggcagttaagaaatagataaccatttattttagaacactcaacaactatgtaatggctatatttcagtgacttggactgtaaatgaaacattgcatccatgaaggacagcaccaagcacctttttgaatacagaatttttttagaaaaatatatcaaattatataatttccagaaaccataaataatggatataaaacttaacctttttgttttgttttgttttgttttgttttgttttgttttgttttggttaatggaaactgaaaagagcagtatttgaggttgcttctattctggttttttattcttaggctcaattaatatttagccataaatgagtaggagactgggcaaattgtgctttagtgttgcttttcctcatccccacatcttgagctccttatttacattcacactaattttgggggccttccagcacatggtgggccgggaacccttttgggttcgatgtggcacacaaatgaacaaaaactttgatgacaggagcaatatactgatttaccctaatatctccacctctaaacataaaaaaaatctcctttgggattaatgctgtggtcttcacttgaatttagattcaatcatcagcaaatttaaattagatatagccacaatctttaaaatgattgcataaaaataaggaagtagttaaagctctcagaaacatgatgttacaattacagatatatttaatcaggcaataggaaattcaataccatttaaacattacatttaaactaattagcanacaagcttgaggtctttgcctgtggaaaggcgcaaacgaagctgacattcatatccagaattgggtggtggctcaggaatatccagagtctctatgtcgctctttccccctaacatgttgattggcggtgccaaagcaatacactggaagctgatatctgttcccccagttcaccgtaagcactctgtaagtgcaccatgtggtaatgttaatgtttgcaccatcaatgattgcttgtgccagttcatgatcattgctctcaaaagcatgtgcagcagccttcaaggcatcccaaatctctttccggccttcaaaagctggtgctgtatcccaaaattcatccctcttgctgcgtagttgtccatctgtcataggataatcgcttttccattttggtttctcctttttcaaaggctggttatgacctagagcaactncggtgccctccgagttctcgttgaggctgcccgaggagtcgtgctgggcgccca

SEQ ID NO: 155034 - DNA, 4201 bp, Homo sapiens
tgaaacaagctaggccaacttggacattggaggatggattagaacatactagctgctccatcatagactatccttactaagcagaagaccttaatagtgcctaaaagtttagttttgaaattggttttttcctaacttttctttgttaaatttatttttattatcttttttaatcttagaagtaatcagagtttgacagctctttagtaactgttaataaaagaatctttcatcacacggataagcaatagattgtgtgggaaataataacacaagagtaaagatgctgaaggactcttctcggaactcaaagtgacagttttgaaggttctggcacagtaggaaaggatcacaacccatataaatggctaatgttgaatttctctggaacactgtcacatatggggcatcaatttggaaaactctcaattgaggccccttccctaagattacaacattgataacctgtctttttctctctcttctttactatccggccaagtctactattccaagtttaaatattgttcagaaagttgtcagccttgttagtcagaaaaactcccatttagagccatccaaactagcataagaaattccttaagcactcaaagcattatctctgttttaagtaagaaactaaatccagagcttttaacaggtacttagaaataagtattgggtaatcactaagaggacattgactgcaccaaaccaaagctatagaaagaaatgattgactttttaaaatatattcacattaactgtcctaggatacttctcttgaggctttggaaaacttcttccttgaaatttgcatatccactccagttctgtcaccaaagattttaatcttcagatcgcaatttcctctctcccagaaaaaagtactacaacaggctcaagggatatgctttggtggtcaagggattacactatggttttccttctgttcacaatggtatttacaggagaccttgtcatcagaggacgtactgaactatctttatgactttggatttgatcagaggtttaaaaaatagaaaaaaataaacaacactacttgacactgtaaatgatctttaatagagtcatgacctggagactgatgcagagaaagaaacttccatggaagagagtgagctaaatcatttagaaccaaacaaaggtctctggtgaaacatagggcagcatgtacacagtgcagatcagggttctgtatggccagagccaacagcagtgaccggtgggagagtcagacaactggccaatgaattcaagtgttgaaaaagccacagtctggattttgttgtgatttctggagtggttgaaacgcccatgcccatggcaaggaaaatgcttggaggctgatctgttgtgatagtgcctttcttgtcgtagtgagtactagattaataatttattcagttacgcttttctgtaccattgcctccagtcttctgaaggaggtttgaagggacagtatccacttaggatgaagggacaggatattgctctggaatgctgtgatttgatgatatttgcactagattctaaactctcctttaaactggagcaactgactgagagaaaaaccaaggacagctcaaagttaaaagaaaccaaaagcagtattttctgacagataccatttctttttctccttctttttttcctggaagaaaacttcacactagttggctaccgagctcaactcttaccagttctttctctttattttttgtttccatatggaaccatctgtgtgaattagtcatcagttaggtatagttaacgtaaagagcccctgccattgaaactttgcacaccttctctgctttattgaaggcaagggccagtgggcagtgatagcaggggagggaccctccagaaccacccagccctccaggaggccaataagcatggatatcatgtcaggagctgagctgacatatatttactcagaggacattggggtctgtagctaatcctaaagaatgctccgcaacagaaggaaaccaatgcattgtagaaaacaaagggagatggtgcccgaagtctgcctgtttctcttctcttttctttcccatctcaccaccatgtcctctctaacagaattatatttcatctcatatattatatgttactagaaaagtcatttggttccttggtttctctctttatcagtgggctggaaattcctccaaattaaatataaataccagtagcagctcccctgtgtccagccagtttctcaaatgctgtccacctggtcttactgtccacctaacataacttggaggctttggctggctcaaccacctgttcactttattttgttttcatttccatttgaacttgaagtgaggctatggaaaggtggaaatcatgggcaaggtttggaggctgcaattctagggcatagcttgtcaggagtttatattatctaaaatatatctttctataccccttttcattttaatctgttgccctgattataatttctttatatttgtggttatttttataagaatagagtccatttgctatgtctatttgagtactttttttctattgtccccacatggatgcagtaccaacctgttaatgaaatatctttttattatattattaatatgtaattctactggtagaccaaaaatataaaaacaaatttgttcattttaaagatataaagaactagggagtaaaagattaaaagttgaaggaaaagacagaagagcagtggttaactatgttgagttagaaaatctaagaagtagccttacctgtttttttaaccagtgcttgccaatcataccatagttggaattatgtaatcttggctccttcatacttatgttctataattcttgtttgtctatttgttttctttgatgtaattgaggttgcacatcatgctattcttggcaatgcctgattctattgtattgtacttttgttagtcatttcctttagaaagatggggggaaacgtttatttcttcttttaatttaaaatttgtttaatgcactggaaataaaattggacatatttcactgtttaaaaaatcagaaacaaaacaaagcaaaaccatgagggaaaaaaacagcaaataagcaacaggggaaaacagctatgaaaaaaatatatttgtactgaatacacatacaaactacatcccacatgaaagattaatatcatcaagtaagaaaaatacatagtttaaactacaatgctgaaaatataaaaggaacctggtagttcaatggggatggagaaaacagagcattcctctgagagcagagatcttgtcattattgcaattaatgcccaaacaggttaaatgtggaagaaagtatggaggaaataaccccagccttcctcataccactggatttccacatcaccttttaacttatgcttgagctcccttttgagaaaaaatatttaaaaacaaattggctatgtaacaaatttgtgtgtgtgtgtgtatatatatatgtatatgcttatatatatatatatgtatatgcttgagaaagtggtttttcaagatgtatgtgtacagtacacacatggacacgcttcagtcctctgacttcccatgtgctacctcatgtgtttctcttctcatgaggatttgcaatggatagttgtacaacctggggactgtcagtgactcattggtatcagcatatgctaaagaagctcttgaatccaatcttgaaacctgatctcccttcgtcaacattccccaataccaaactggcccgtttacccatacaaatgcacagtaaagggaagaacagcggtatttttcctagccaactgactctatcatttgtttaatgtttgctggtttttttctggttttgttttgttttagagcaagggtgggagtgggctgtaacttcacaatcctaatacagtaaatgttttgcatcttccatgttttatgcaaaaacagacatttaaatcaataaataattgtgccctagactgaaggttaatgtttagggggaggaaaaaaattgttggaattttttctacatttttttgtgaagaatcttttttggaaaggaaggatacatatttttgttgtgtaatattttctatttttgaatgcattttattggtacaagactgtttttttggtgaagacattatttaaaaaaacagtcttgtaccaatagtcgac

SEQ ID NO: 155035 - DNA, 1516 bp, Homo sapiens
  misc_feature (1)...(1516): n = a,t,c or g
gatcagtgtccgtatgtaaggccttgagaggaccctgcaggcagtcagcaccagcctcagcaactgtgcagagacctacaggcccacagccagtggctgtccgcattgccctgtgcccacaagcaacagtccacagcccttggtggcttctgttccttgtcccctcggcttctcttccgcagccatcaggactaggtttgtgcaggaaggtgatgcccantggaactctcctcacacctggcagcttcatggatgttgtatctgaactaaggaccagaggctgccagatgtttctggctcctcacgtgtccttcaggacagaacagaagcacaaagactcagccaagagttctctttattcccttttgatcctcccccaaggtgagggcttaggcagctgtagaaccccaggaaagaacggaatccaggcaatctgtttagagaccccccactccaaatttatccttttcctttccttcccctaagatgtttccagggccctctggtgcccacactgtcctcttccttccacttgggggtggggaaatccttccttgcgaggtcaaggccattttctcttaaaaaaagtggccttgaattgaggccaaggcccttgaagaaggagccaccagttggaggaaaagggctccaaagccttgctttttaacacccctgcaaaacccccaccctcccaagatggttcacaaaaggtgagaaattcaggtacgaaaccatcaatggacaacttgaaaatgcatgttcctcaggcctatgcagttccccagagactcttgacaccggtctctgctgaggctcccagcctcagtttcccccacagcagcacgggccccactgtgctgctcttcaggtccccacagccctgcctttggttcctggacatttggtattctgccctccactctggtactatcagagtagggcaggctctggattaaagcttttagccggtctaaagctactttcttcaaagacagtgggaggagaggttgctggggcatcagccctgcttcccacagctccttaggcaagagcttacccagcagctgtgagcaccaagctggccagcagaggctgggggaggactttcaggccaacacctgcccccagctgagtttgggactgtccttaagcgaggtctggagagaggcagcggcagcagccggacggggagcaggccaagccggaaccacagcctgcaggtgtgggtgtgtgtcatgtgctgagatgccagggcaccagcaagggggatatgttggcagtgatgtctggcttcggagggtacagtcctggctcccagacaaggggcggggagaacactgtgtccttccagaggctgtaccacactcccactgctgtcacccttcactgaagcctcgagcctcggtagggcctccctcttctccctgtcctatcaagacttacagcaaggtcccaggttgacagggagacagatatcaagggcatagaaaaccctgcaaggaggcctggcatggta

SEQ ID NO: 155036 - DNA, 3198 bp, Homo sapiens; identical to SEQ ID NO: 143887

SEQ ID NO: 155037 - DNA, 1845 bp, Homo sapiens
tttcgtccgggtgtgagtgtgtggaagtgtgagtgttttggagtggggtgagggagaagctgacgggacgcgaggctgtgagaaactgggcgagtgtgcgaggacgcccggccagcctgcgggagccgcagtcggcggaggagaaaggaggcggctcccggtatcccgaccccctccccctcctctccttcccccacttccagccgcccggcggcccgcgctttctcgaacgccccagcccggctcagtcggtcgagagcgagggaggagccccccgacccaggtgagcggtagacgttacatccaagaggaaataatccaggcaaggaagcacaagctgatcaagatgtgtagttctgtggctgccaagttgtggtttttgacagatcgtcgcatcagggaagactatcctcaaaaagagattttacgagcattgaaggccaaatgttgtgaggaggaactggactttagggctgtggtgatggatgaggtggtgctgacaatcgagcaaggaaacctgggtctgcggatcaatggagagctaatcactgcctacccacaagtggtggtagtcagagtaccaaccccttgggtgcaaagtgatagtgacatcactgttttgcgccatctagagaagatgggatgtcggttaatgaaccgacctcaagccatcctgaactgcgttaataagttctggacatttcaagagttggctggccatggtgttcctctgccggatactttctcttatggtggccacgaaaattttgctaaaatgattgatgaggctgaagttctggagttcccaatggtagtaaagaatacgcggggtcacagaggtaaagctgttttcttggctcgagataagcaccatttggctgatctaagccatcttattcgccatgaagcgccatacctgttccagaagtatgttaaagagtctcatggacgggatgtacgtgtcattgtcgtgggaggccgtgtggttggcaccatgttacgttgttcaacagatgggagaatgcaaagcaactgctcattaggtggtgtggggatgatgtgctcattgagtgaacaagggaagcagctagctatccaggtgtctaatatcctggggatggatgtgtgtggcattgacctgctgatgaaagatgacggctccttctgcgtctgtgaggccaatgcaaatgtaggtttcatcgcctttgataaggcttgtaatctagatgtagctggtatcatagcagactatgccgcctcccttctaccctctggccggctcacccggcgtatgtccctgctctccgtggtgtccactgccagtgagactagtgagccggagctgggtcccccagccagcactgctgttgacaacatgagtgcaagttccagctctgttgacagcgaccctgaaagcacggagcgagagctgctcaccaagctcccagggggcctgttcaacatgaaccagctgctagccaatgaaatcaaactactggtggactgactccactggtaattaaccaacaaaacccttgtaaaactttctttcttcttttctatttttaaaaccaacttgcaatgctgttcatggaggatgctcaggaagatgagagaaaattagtaggattagttggagagagtgggagatagatgagacctctgctagtaagatgttactttcatttacaaatcctacaaatagagaggcagaataggtggggtatagaaaaatgtcaggctctcatagttacccttttaaattgctaaaaaatgtgtatgctcataggccatgaggaacaaatactttttttttttcatggtcccttgcttttgtttttgtac

SEQ ID NO: 155038 - DNA, 5448 bp, Homo sapiens
tcacatgagcaggacttcgctaaagcgtttgcagtatccagaaaggcttcctcctcgaggctcactttgctcctttctctggtttttggccttcaggaccataaggcccctttccaactggctggcattaaagatgggcccactctggcccgatcctggcaccagcaatgggatgttgacctgtctgctgagtcttggagcccaccactgggctgctggcttctcgagaaatattcggcatggctgtccgtgtgaaggattgccaggacccgtgtcctccgttgctcgcactggggtctctggtgtgaacacccccgacagcagccctccgcccactctgccccctgggagccctcgctggatcgtctcgtctcctgcagcagcactggcaggcgagggctctcgttcatattctcaggccgcaagtgcaatgcctgaggggatcaggcttttctactccaggcaaacctgccccatcttgtcgcttttaggacctcccacaacctggttccccacacatccatagttctgcctccccagcttctcctccccacttgtaaatagtatttattagcttgccgaggcttcctgctagcaaccacactgaagagatcgatgcctcctttcaagctagccaagttttctgcgagccttcagagctaggagggcaccctaggctctgggatcccgtgtctttccagacaatgttttgtttcctttcctttgttttttcttttaactggaataattaccattgaaaaagaagttcctttgagcatgtatgtgtctgcctctaggatgagctcagagcgagagatgacacaatgcctcactcaggccccgggctccctggccacaagctttttctatcctgttttcatgacagagaaggggaagccctgttctgacaacagacatttcagacaaccttgctggctttccacacctgcctggccccctcctccctccacacttccactttgtcctcctcgtccccctacctcaacaaagcagggtggggtaggtgacatttgtggtatccccacttttaacctttggtagtcaaggtttggctactttgcagctcgcccaaagagatacaacctaatccccaacctacttttagttttttttgtttttttttttatggttaaaagtaacttttgtagtttaaaaaaatctttcctctttcatataaataagaagtggaaattgcctttttattgtgtaatgtagaaaaccctcaagtgttttttccgagcttgggaaagattttgtgtaggaaatgtgcatagagtttgtattttatttttattagcagctgaaatgcctttggttttggcttctctctctccctctctctctctgtctctccttctctctctccccccaccacccacccccacacacgtcatctgcattgttattggagcctgtacttagagggattaagcccacaccctggcttccattccatatcaggtacaggatttgatgttattaacatttgtcgtcatacctcataagtcggtccctgccttgtctgtctaggcccatttggggctccctgtgagtgattcccctctctctgctatgctggagacggttccagcctggaaagcggccaagttcatcttctcactgtgagtggaagctggatcgggcccccgtagtcctggcagccctgttgtctggagggttcttgttgtccctcccattagccagggcggagactgtctgagctgtgcaggaggagggttgctagtaggttctgcttctgcttctctctgctccactgtctgcagcccagatcctgttgggcctggctggtgtctggtaaccatgggcctccactgacccatccctctcttttaaactgtcaggtcattatcaggcataggcagcctatagggcccaaagaaggcaaaaagataagatttactcaagtagcatttgggcaatgaggaaggaaaggtttcaaatttaggggcagaagtgagagaatgagccaacccatgtacctgctgcaactgaaccagactgggttttcaaggctcccagacgtagagtaggaaacgtgctcttctaaatgaggagggagaagataaaggaaacttctagcccctgtccttagtgctttgaggattttattttctcccttactacgcttgcttgacgtcactctctctcgacctccaaacagcaggactctttctctgggaaaccgtccttccaaaacggaatctatgtagacaatgggacattaggcagagagctcagatggcccttttaagggggctccaagaaccaacatcactgctcttttagataaacctctgccctccactccttgcttgagtgggttaaaggaactaacagttgtccctttaggaggacaaaatggggtcaagaggacacagaagagttgtatagcaccagattggttccaaataattaatggatgtgtgcacattttctgttcagggattaagaccagaatatcagtggatttgttttccccaccaagtggcctcttagactagtcattaacttatggttagctctaaagatttcaaatagtggcagacagtgtcttctgaatgtaagttttgagaaatacgagtctgtcagagcggccataagccataaagagtcaatctcttcattatatttttcatcatgtaaacaagtttcccatttccctttcttagattgcaccagtgaaggagatgttttgcaaagattcagagaactaatttttcactggataagacctgagtaacccagaccccccaccgtggttcttttcacagccctcgactttgcacttaaaaagggatattgtaaatgaaaggctgcagtgccagttttaagaaagaatttctgtgaagtgtgaggactctggagtctagctcacataaagagagtgttatataaaaatccgacagctgaactaggttgctcttttttggcagggagtggggatgagatttgacaccaatatgggcaaaattagataaccttttggttaatataaatgattttgatttggaggcctaatttgtagattgtgaaagcagcttttagtttaacttattcacagaccccttataattaccatgtttttttttttcttcctaaatctcttggttcagcttgtgaatcttacgtgcccgtaaagttggggatgttgaattggctcttctttgttctggcagtgagtcaagtgtccagcattttttcataagtgttttttaaaattgttctccagcattttatggctcctccctcccatgtcctcagacccagcaaaagcgtagaggcagaattagaggcctctccaggccagctcctctgcccacatgtcatacaaggtgtgaatttgagcacagtccagaaatggagacatcccacccccagttgaataatggcccattcatgccaaccttgccaacacggagagggcagagatgcactagaagaccttcatcctccccttcctctgccccaagtcactacagttggttctattgaagccagtctttaagaaacctgggttaaagacaccagcacttctgcttgctgggctggctggacctgtgaagccatgggcaggtagtgccctcttgagagtcattttatttggccaccttcaggtgacgactatccatagacacatgctaggataggccccgctgggagggcagttacaggagagagtaggtggtggtgacgtgagggctgtgaaggatccagagacaagacttagatgtttcgttcattcactcattcattcagttactcctaagactttttcagtttcataaggaaaaagtgttgcctgaggccctagggaatattggggaatagaagggattgagggaaacattaataatagtttattcaaaaaggacccaaatgcttatacttctctctcccttcttctctctctgacacacacacacacacacacacacacacacgtgcacattcctcccttacatgctcatttgtgccttaaatgtgccttataggtaaatccaggatgactgaggaatccctcgtcactgggagattttgtatatattcttttattattagattgagttgggtgtggggaaaaatttttttcctgaaggctcaaaagtggtttcctaaaagtgagccactatcagatttgcacatcaggagaaaagaaatagggttaccgtccattaggaaaatcccaagtttgcaggagtgcaatcacatcaaaaaaacaaccagccagggattaaaggtattataaatcctcataggcgggaacatttctcaggggcaaagggaacctgggcttcatttggaaggatttaatggttcccatggccttttgtgggtcaaacgggtcaggcactttaacacagggaaaaaactagggtgttgttttgttttgttattttgggacaacataaaattcagggaatgttttatttagccttggtttctaggaagggaaggggaaataatatttcttgagcatttactaggggtgttgcgtgctgtgctaacgtaaattttaagccctttcagtctttatagaatacggaaaacaagggtgactctttaccacaggatgaataaagaactaagtaatatggggaaatgcagcaatttctggacttagctgagcccgattccttcctgtggagcacactgtaagcttttcaaggttctctggggcaaagaattacagcacctgtcccctggcaatggccctgctgtgtgatgctcatcgcttcccttccgtgctgggagcagttcccccagggtgttccatcttcctatcctttttgttccaatcttctgtgagttccagctaagcaggctttacatctgggggaaagggaaaaccagggggttttaggctcctgttcctctggctcccccatcccttcggctcacccagctggagtgaggaaccatgaacctttttggcacccatgtaccccatgggcttacactactttggaaaaatcacccttttccagataaaaccagtttatggaggttccataggggaaccacccagcacctctttgacaaaaactgtgagtggacccttttttaaaacaatgctgaagcagggccctggagcttataatccaacgggtgagctttaatgtctatggttgacagttaggttttgcctctcttttgtaacaggttaccgtagacccagcagtgtttaaatcctaaatacgttgtgagtctgttatctgtccctatcgcgttttttaaaccgcctttttattctttatcataaaataagtaaataccaaaaaaaaaaaaaaagctttgtaggacacttgtacttagtttgggaaaaaaaaataaattgaaattgttatgcttttgtatttccatttcttgcaaataaatattttttcttaaatagtaaaaaaaaaaaaa

SEQ ID NO: 155039 - DNA, 2081 bp, Homo sapiens
cagacacaagtagtacataaatattattttacaaccaacaatatttaatatttccacattgaaagaatagatggggataattaaaaccttttaataggggttttaaaaagacaggaaacataaacccctaaattaatacataaaagaaaagaattttaaacaagagcttattgtgatgacattactcataacttttacctttaaaaccttttcttgggtagctattcaaaaagtaaagaccacaagtttggttgccccagatttcttatgtttttgtatatttaagctctttatttattgaaacagatgtgtccattaattcatttgggggcattactattatcgagtaaaatttggattttttttcccctcaggtcataggggaaatcagctccacctggaatttctaaggacccagttttagtcaatattttcaagtaatcatgacctcagaaatagtcttaattaagataacaaatattagccatcaaaatggaaccaagacgaagattctaatgtttgtaaacagtcaatccatatttatgaatattagcatatattggtgaatagtttaaggcaaaaggttctagcagatgtaatctatttccatcaacatgttaaatgttataaaagtctagaattattggataacatgaaatgattcccaaaatggaattcctgtgttacagaatttactagaaaagtgctgtgaaagtataattgaaaaataaaggtgcatccgccgaaataattgtggatagaacaagcttttgaatatttacatggattaatgaattatttgcccaaattctcctgaagttatacctagttcccattaaattaatggacaccgtgtatatgagcatatacctttctttagaactatgttttgtgataagtccatttttactcacaggaatttacttaaacttgtacatatattaattatatatactaaatgacaatgcccttatctgaaacaaatccatcgaataatatcaaaacgttataagtccttctttaaaaagtaaaaagtaaaaaacaacgtcagttacatcatttacatttggtatcccacctaaatagagacacagcttttgaaatctacaatattttacattttggtcatcatttaatgctatttgcatttctctttaacattttaatagtatttgtgatatatcatgtttaactgaaagctttgggttatatattttaaaggaatatcttactttttgactaaatagttctgtaagggcgtaatatttgaaaaattagcttgttacctgaagcaactatcctccttaatcattttaaaataatgggtaaagatgcatctttgtaaatatattctgaaaacttggttagtgtattagaaacagacaccagaaattaaaaaaattatttctaggactggcatacactacagtgaattacttcaaatgttactctagagcatttttaaaaatacgcagaatcctgctgttctctgtgagatgatccctttttccgatgatgaaattaaacacgtttaaaaagtcttttaaatattatatatagcattccagaattgatgaattataaaacattccagatccttctgtttgggtaaaaatctatcttttagtttgtgatagtaaaataagcaatctaccagccagggttgaaatatatagtattttaactactgttctatatatttcaaaattcatgttttctatctgtcctagagaaacttagccttctatgaagtgaatcagttaatgatattattgctttggagataaaattggcctcagagtatgatagcctgtaagtaaatgcttcattacccacatatccctacccaccccccccaaaaaaacctaccagtagtctagtacagtagtgagcaatcttaaattaaaagctattgttcacacagagcagaggaagataattttcatgttaaagcagttttcaacatcaaacatctaaggagttataaactataaatgaattacctttaaaccctggtcttcacagttacattgctttctgaatgctttttggggtgacattatgctaccacatttttaaac

SEQ ID NO: 155040 - DNA, 1548 bp, Homo sapiens
  misc_feature (1)...(1548): n = a,t,c or g
gaataccaagtcactacagaataaaagattttaaaaatgcaataaggtggcaaatgcattgtatggagggaatttctccggtgttttagtctggggaatttttgccatgtgggttaattgtggcccattcctttaatttaaagttggaactataatcttaggtagaaaaccttttttataagaagtattatttgacccacttcagggtatacattcaatactggggtaaaaatttcagacctatctcaggaacacagaaatatttggtgtcctgataagcactttctaagactattgatgtggccaggaatttggaaagacgacacacgcacgcacacacacacacacacacacacacacacacacacacacacacacacagttttttccttccctgtgatgaaaaaggcctgtgaaaacccttaaagtatttgccttgccttcttgttttgtttagttgataatgaaatgtgtaccaaccctcaaatttgcctgcccagaatactaaaaatagaaaaatacccacaaaactgtcatgtctttagttctttccccccgaaaactcagtaaaaaggtgttcccagggatgaaaagatcattttttgctgcatgctaaatcttgcaggaaaaatgattttttagtacggattctgtaggaaatgaatctttgatataatgtaaatgctggctgtttngttttcaagtgggtgaatgtgttgtttaataattgggctgttttgcttttcattttggccaataagtaatcaagtttgtagaaaatgttagcattctgactacttaggcatctgtagtaatttctctatgtataggggataattttttagtggggcagagatcctgttctagttgcctgttaagcaaaatctgccctcccaattggaaaaagccaaagaggattgttagaggggaaaagcctgttggccttgcagtctgcattgcagccagcgttgtccagagagtacacgctcagcacttagcttctactgtgtgttgtgggtctgggtgagtgttgtttcccctgaggcgctctatttatttatttattatccaatccaatccagtggaccctggaccacatagtgtgataggtgcagcattccttccctgtgggaaagaattaaagatggttccatttcctaggctacggaacaggaatggggctcctaaatggttttccatagactggctgttaaaggcccaaaaattttggtaaatcaatgcctatattatgctcttgaactattaaaacagcccataattattgtccccaagatagatagaatatagtcctttttcaaaagatgattatacgtgggctgggtgacagaccattaatgactgactctggagagtaagtcatacctgcactctgtggacttgatggttctttttctagagcaaacagagcgtggcattttgttttgacttgttcttccttggggtcaaatttatatatatatatatataaatttttgtttgggcgaccaagatctaataatttaaacccagaaaaaaacatgaaaaaaa

SEQ ID NO: 155041 - DNA, 5452 bp, Homo sapiens
tgtgttgctcgctaaccagtcccccataacagtagactggagcccagagcctgcttacttgtcaggtgtttattttgtcttgcttttttttttttttaaatgaagtcaaaatgccaataagaccagatctccagcagttggaaaaatgcattgatgatgctttaagaaaaaatgatttcaaacctttgaaaacacttttgcaaattgatatttgtgaagatgtgaagattaaatgcagcaaacagtttttccacaaggtggacaaccttatatgcagggaacttaataaagaggatatccacaatgtttcagccattttggtttctgttggaagatgtggcaaaaatatcagtgtattggggcaagctggacttctaacgatgataaaacaaggactaatacaaaagatggttgcctggtttgaaaaatccaaggacattattcagagtcaaggaaattcaaaagatgaagctgttctaaatatgatagaagacttagttgatcttctgctggtcatacatgatgtcagtgatgaaggtaaaaaacaagtagtggaaagtttcgtacctcgcatttgttccctggttattgactcaagagtgaatatttgtattcagcaagagattataaaaaaaatgaatgctatgcttgacaaaatgcctcaagatgcccggaaaatactctctaaccaagaaatgttaattctcatgagtagtatgggagaaaggattttagatgctggagattatgacttacaggtagccattgtagaagctttgtgtagaatgaccacagaaaaacaaagacaagaactggcacatcagtggttttcaatggattttattgctaaggcatttaaaagaattaaggactctgaatttgaaacagattgcaggatatttctcaaccttgtaaatggcatgcttggagacaaaagaagggtctttacatttccttgtttatcagcatttcttgataaatatgagctgcaaataccatcagatgaaaaacttgaggaattttggattgattttaatcttgggagtcagactctctcattctacattgctggagataatgatgatcatcaatgggaagcagttactgtgccagaggaaaaagtacaaatatacagcattgaagtgagagaatcaaagaagctactgacaataattctgaaaaatacagtaaaaattagcaaaagagaagggaaagaattgcttttgtattttgacgcatcactagaaatcactaatgtaactcaaaaaatttttggtgcaactaaacatagggaatctatcagaaaacaaggtatttcagttgccaaaacgtcgctgcatatactttttgacgcaagtggatcacagattctagtgccagaaagtcaaatctcaccagtcggagaagagctcgttagtttaaaggaaaaatcaaagtccccaaaggaatttgctaaaccttcaaaatatatcaaaaacagtgacaaagggaatagaaataatagtcagcttgagaaaactactcctagcaaaagaaaaatgtctgaagcatcaatgattgtttctggtgcagatagatacactatgagaagtccagtgcttttcagcaacacatcaataccaccacgaagaagaagaattaaaccaccactgcaaatgacgagctctgcagagaaacctagtgtttctcaaacatcagaaaatagagtggataatgctgcatcactgaaatctagatcatcagaaggaagacatagaagagataatatagacaaacatatcaaaactgctaagtgtgtagaaaacacagaaaataagaatgttgaattcccaaaccaaaattttagtgaactccaggatgttataccagattcacaggcagcggaaaaaagagatcatactatattacctggtgttttagacaacatctgtggaaataaaatacacagcaaatgggcatgttggacacctgtaacaaacattgaactatgtaataaccaaagagcaagtacttcgtcaggagacacattgaatcaagatattgttataaataaaaaacttactaaacaaaaatcatcctcttcaatatctgatcataattctgaaggaacaggaaaagtgaaatataagaaagaacaaaccgaccatatcaaaatagataaagcagaagtagaagtttgcaggaaacacaatcagcaacaaaatcatcctaaatattcagggcagaaaaatactgaaaatgccaagcagagtgattggcctgttgaatctgaaactacttttaaatcggttctcctaaataagacaattgaagaatcgctgatatataggaagaaatacatattgtcaaaagatgtgaatactgctacttgcgataaaaatccatctgctagcaaaaatgtgcaaagtcatagaaaagcagagaaagaattgacttctgagcttaattcctgggattcgaaacaaaaaaaaatgagagaaaagtcaaaagggaaagaatttaccaatgtagcagaatccttgataagccaaatcaataaaagatacaaaacaaaagatgacatcaagtctacaagaaaattaaaggagtctttgattaacagtggtttttcaaacaaacctgttgtacaactcagtaaggaaaaagttcagaaaaaaagctacagaaaactgaagactacctttgttaatgttacttctgaatgcccagtgaatgatgtttacaattttaatttgaatggagctgatgaccctatcataaaacttggaatccaagagtttcaagctacagctaaagaagcttgtgcggataggtcaattagattggtaggtccaaggaatcatgatgaacttaaatcttctgtcaaaacaaaagataaaaaaattataacaaatcatcaaaagaaaaatctgtttagtgatactgaaacagagtacagatgtgatgacagcaagactgatattagctggctaagagaaccgaaatcaaaaccacagctaatagactatagcagaaataaaaatgtgaagaatcataaaagtggaaaatcaagatcatccttggaaaagggacagccaagctctaaaatgacacccagtaaaaatatcacaaaaaagatggacaagacaattccggaaggaagaatcagacttccacgaaaagcaaccaaaacaaaaaaaaactataaagatctctcaaattcagaatcagagtgtgaacaagaattttcacattcatttaaagagaacataccagtaaaggaggagaatatccattccagaatgaaaacggtaaagctaccaaagaaacaacagaaagtcttctgtgctgaaacagaaaaggaactatcaaaacaatggaaaaactcatctctactaaaagatgctatacgagataattgccttgacttatctcccagatctttatctggcagtccatcatctatagaagtaacgagatgtatagagaaaataacagaaaaggattttactcaggattatgactgcataacaaaatctatatcaccttatccaaaaacttcatcacttgaatccttaaatagtaacagtggagttggaggtacaataaagtcacccaaaaacaatgagaaaaacttcctgtgtgcaagtgaaagttgttcaccaactccacgaccactgtttttggccagacatactccaactaagagtaatactattgtaaatagaaaaaaaataagttctctggtacttacacaagaaacacaaaacagtaacagctattcagatgtaagcagatatagttcagaagaacggtttatggaaattgaatctccacatatcaatgaaaattatatacaaagcaaaagagaggaaagtcatttagcatcttcattatccaagtctagtgaaggaagagagaaaacgtggtttgacatgccctgtgatgctactcatgtatcaggccccacccaacatcttagtcgcaaaagaatatatatagaagataatctaagtaattccaatgaagtagaaatggaagagaaaggagaaaggagagcaaacttgcttcccaaaaaactgtgtaaaattgaagatgcagatcatcatatccacaaaatgtctgaaagtgtatcttcattatcaacaaatgacttttctattccttgggagacctggcaaaatgaatttgcagggatagagatgacttatgagacttacgagaggctcaattcagaatttaagagaaggaataatatccgacataaaatgttgagttattttactacgcagtcttggaaaacagctcagcaacatctgagaacaatgaatcatcaaagtcaggactctaggattaaaaaacttgataaattccaattcattatcatagaggagctggagaattttgaaaaagattcacagtctttaaaagatttggaaaaggaatttgtggacttttgggaaaagatatttcagaagttcagtgcatatcaaaaaagcgaacaacagaggcttcatcttttgaaaacttcattggctaaaagtgtcttctgtaatactgatagtgaagaaactgtttttacatccgagatgtgtttgatgaaagaagatatgaaagtgctgcaagacaggcttcttaaggacatgctagaagaggagcttcttaatgtacgcagagaactgatgtcagtattcatgtctcatgaaagaaatgctaatgtgtgaaatctagtttttatcaccatactttatctaattattattctctgtatataactgaggaaataaggaatagtccctaccaaaggggaaaaatatacatgtcaccgaaggcaaggggtacccttttatagggaaccctcaaatttaaaaaaaaatgtcttttaatggatgagagggaaccactataacatgagtccaagcccagaagacttctgtctatacaatatttttttttaattttggagataaaagctttaagaaactttttgagttaattatactcataaaatgagtttctttaataaattaaattttattgtgtaaaatgtattattacataaaatgtgtttttgaatcaatgcagtttggggatgaatataattaaaatatgtttaataacttagaattcaactaataaaaatttagccacacttacaagggggaggaagtccctagtttaaaatgtataactgagtggtagatcagtactttcagcacactgttggaaacatttattcagatatggctctaatgtattaggaagcactaaatggcctaaaaaagctactacattgcctaaatatgttaattcaatatagaagtcctatttcataaccaggctgtttgacaaatacttttaatctagtagtcattgtaatatcttgctagattaatttataaaaatgagtatacatttgatttgcttttaatgaagttgaaataaatgcttatgtcacttgaataaatataaa

SEQ ID NO: 155042 - DNA, 1899 bp, Homo sapiens
cgacccacgcgtccgggcttatggagcatggcatcatccagcatgtgtccaacaagcacccatttgtggacagcaatcttctctaccagttcagaatgaacttccggcggaggcgaaaactgatggagctgctcaaataaaaagtaccccctccccccagggaacctcatgcagtcccttctgcctgaggaagcagagccatgccatcgggaaatctccagcttttatgtcagtgagccccagcaaggagatcaagatcgtgtctccagtgaggagaagcagcatgagcagctgtggcagcagcggcatacttcagcagcagccccaccctcagcagcagccccccatgtgctctgcaaccccaagtccgtgctgaagagacctgtcacctctgaggaactccttactcccggggctccgtatgcaaggaagacattcacgattgttggtgacgcggttggctggggttttgtggtgcgaggaagtaagccatgccacatccaggctgtagaccccagtggccctgcagccgcagcaggaatgaaggtctgtcagtttgtcgtctctgtcaacgggctcaatgtcctgcatgtagactaccggaccgtgaacaatctgattctgacgggcccacggacgattgtcatggaagtcatggaggagttagagtgctgagctcctgggcctcccagccctccagtggcctgtgggtgagggaagccagaatgacacaaagcaatgcaaagacaagattgccatgcaaatggatggttttggacatacgagtcttctccgcacatacatgtctaaagttgagttttatacactgaatgtggaagaaccgggtatcatatcttttttaaaaaatgtcagtgtagaaaacatttgggaaaccattttcctacatgatagaactgcgcttactatatttctatttgtagctctcattcattgatcctgtatcttaattagcagaaaggcgctgaaatgcttctatagcccaaacagcgacatgctaaagtccccttcttcagagtcaatagagtagttgttaaaggttttaaattgtactttctccaaaattagcatgcagctatttaatagggaatctagatttcaccaagattcaaatcaaagcaacatttaaaggaataagacctgttcactagcattttcaagggggttctaaagcattcaagtgcttaaaagccataaaaaatgacttcttaattcctgcctttagtgtcaacttttaagttaatacaggtttcaaattgtggcattaggaaaaaaaaaaaaaccttgtgatgctatggttgggggtagttagggagagactacatgaaattgtgtgcccctattttctttctgatcctaaatcattttgttttataaatcagctatagcatctttctagaattaatcctgaatatgttgaatgttaaaatagagaagtttgtatataccccataattaaaaatccaaccccttctgggcaagatttcactttgaaggtgtctgtttttaagggaaggctaaaactttgctgatatgtgataaaacttgaactctaaattgcctccttagcctgaatttttactagctttctagtgtaacatattctaaggacatgacatgctgcttatttggggggattatttttcaccaaaatgatcatcttgtgttgtaacttttcagctcacttgtatatacgcatgttttcatttttggtctagaaaatagtgcattttggggctcagcgtgcagaggaaattcctcaaagtgccaaattaggcagtcaggaaatactaaattcttcattccaaataatggatctgaatgatgacgttaattttttatcatgcattaacaaaataaaatatgagaattgtaccacaa

SEQ ID NO: 155043 - DNA, 1138 bp, Homo sapiens
gccgcgtcgactttttttttttttttttttgcttcttttttataaaacttttcattcattctagcaataataatcgtgtgttaattttaggaatatagaaaatacaaacaagcaaaaaggagaaaaatcattcattaatcccaccaccgaagaggctgtaccttccttccacccttcacaagttatcgtccatatatggtaatatacaaatgtacctttttaccctttccaaaaaatatgatattcacatattacttagccctttttcccattttatatccttacccaagaacctcttttttacaaatgtgtaaaagttcttttattaaaacgacagaggacttgtaggattgggttcaaaatacaataaacaatggagattgcagataacaagagatacatctaaaaccattaattagcaacaggttataagtagaaatatgggccaaagggaatatccagggaaaggctaaataaaagggcaagcctatatgggtattggttaatatcaggataaaaatcaagggtaaactacattaaagtaggggtaaggatgggtttcggattaaccttccaacgcatcactaataagtttgtttctgactctccttatctcatctatttcatccacttgtctaaacgatatcttcaattgcttaaatgcctgttgtgtaaatcttcctttaaaactccctgggagagattggaatcaagccttttcttctaaaagttcctttttgctttggcctccctcctcctaagcttctcctcctcttcgtggctttttcctcaaggctttgggctcttccctcatgctttgggttaactcctcattttcctggttttccttcccattttttgacgaggatttcatcttgtatctgtctacctctcttccttccttcttttctttcttgcttattcttctttgaatacaattgacttctggcaactgatcggggtcagtttcttcctcctccttttctagctttgggtcttgctggaaacaacagccctgcagataaactgcaaaattcccgcaagtttgactccttccacgggcctcagggaccaaccgcctgcgctgctgaaggaagctggtatccagacgggaacaaggaccagattaccaggactt

SEQ ID NO: 155044 - DNA, 829 bp, Homo sapiens
catacataatggagtaatgtccaatagtttatagtttaatcttaatttgccactattagctagcagtgaaattgagctgctagtgccccccactcacccaatacagggaataacattcatcgaagctgtgaccccagtctttttttttcctcttttttgcttttccccttgcctgtttcccatctgctttttctccaaggtaaagctggactgatttcagtggatgagaatgcagtgataagcaaatctttaaatgttacccctaaatgggctccttaaaatagaatgtagcttgtaaagatataagttaactgccctgcaagttagtggccttctaactcctcccagtggtggtgtataaacccctgaaaattccaaatataatcctaaaagcagaaagactgacatttaggggaggggaaaggatggataaaaagaacaatactcaacctaccagcctccaaagagaagtcatgcaattgtgaatacatgtcaaccaactgttattaatattccagccaaatcacactgaaaataaaaaatctgggtaagagctgtagtgggaaagccacattagcccaccttttaatggtatatatatacacacacacacacacacacacacacacttcttattaaaggtctatttacaaatatgctaggtaaaagacaaacatttttccataatacacagtgctgcttaaagaactgcttcagacatctccagaatatttcagtataacatgcatgacattttaaacacaatattttatatcaatgagtcttcatatttagccattaaacttaaattccaacaaaaatatttttc

SEQ ID NO: 155045 - DNA, 378 bp, Homo sapiens
  misc_feature (1)...(378): n = a,t,c or g
nnnnnnnnnnnnnnnnnnnnnnnnnnnnnnnnnnnnnnnnnnnnnnnnnnnnnnnnnnnnnnnnnnnnnnnnnnnnnnnnnnnnnnnnnnnnnnnnnnnnnnnnnnnnnnnnnnnnnnnnnnnnnnnnnnnnnnnnnnnnnnnnnnnnnnnnnnnnnnnnnnnnnnnnnnnnnnnnnnnnnnnnnnnnnnnnnnnnnnnnnnnnnnnnnnnnnnngagagagacagacaaaactttagctagtctaaaaaaaagagtaaaaactcaaataaataaaattataaatgaaataagaggtgttacaactgataccacagaggtacaaagaataataagagatactctaaataatccagtcgggcggtcgacgggccgcgaa

SEQ ID NO: 155046 - DNA, 971 bp, Homo sapiens
tttttttttttttttttgaagttccaacatgctttatttgaggacgagcgctcaacccgggatggagtaagaagtgggatgggagaagcgtagggttcaaattttctttgtgtctctgtgatccttaaagcatctcagcaagctgtagagatggtattaaggggagagaaaactttgagatgacaagaggaaacgttaataccattctcactccaatgaaacccatgaccacgtttttaaatgtcctacagagtcactgggtgagataagtaagatcactgtttcaatacacgatggggaaagataataaataaagaagtcttggttttcttcatttgcaggggaggattaccagggtaagaaatggggtaaaaatcggtaaataactatttactactgtctctggtgttttctcataatcaagccacataaatacctccctacttttccctcaactcccagaacaaagccaagactttggtaccaatttcttcgtgcttttcctcaagcaggtaactaggagtatccctactccagccttgtgcccctagaactgggctggagctcagagacttaccatgactcatggcagctgccttccccagctcagtgataaggtcgcccctgccaaacactggagaccaaagcccaggtccatcactcccatagtgactcctcccataagctctgcctcagctgtgaaaggcaagagggagaaggggagtgaggctcttgttcctcctcacctagtgggaagatatgcctcttcaaggtcccaccccagccagggaggagagggcaggcctcaggcagggtgtggacacagctggttgacactcagctcagctacagatcggctcagccacagttgggccggcctgaaccccaggtgcccaccagcagcaacttggcccccttgctctaccttctcaccattcgccagcagtgggtgcaggcagccatcatctttc

SEQ ID NO: 155047 - DNA, 522 bp, Homo sapiens
  misc_feature (1)...(522): n = a,t,c or g
tgtcctctacctcccctgctatctgtcccacaggctgtgacgccaggccacggggtggaagctgaacattagggacaatgaagggacaagacggagcgtgggcacctgactccgtgccagcctccggggagctggtaccttagccttgggctgctcatacccatcctgggtgggaaatcagctgatactgtgtctaagccgctgatgttttgataggtcagagtcaacacatccagcatccatgctggcctccttttagtaaaccttcctgtgctccaaaggtcggacagccagcgctgcctcttccagaccccctggcggtgagggctctgcatgtgctcacgtgaaggtcacgggtgcgggtgaggcagaggctgaggctgtgtttggctgagtggccactgttgctggacaccgctgcgtggccacagaggggcatcactgtagggtcacaggtttctttctgcagaccgcacgcgtgggtcgagccgggaatgccggtccagtcatcggngctcgatg

SEQ ID NO: 155048 - DNA, 424 bp, Homo sapiens
cccacgcgttcggggacaggacagacatcaaggcttagactggtgacctcatctgtcaggggcgggcagctgcccgtaacggagctgtggtttgacacgagctgccagcccctaagcccgtgctcctccccagcttgtctgcccaaggtgtaggagaactggtgaggtggtggtggtgggcctgggtcacccattcttagttctctccttggtcatgggtctgctgctatggccactggaccagctcggcacaggtgggctccaggcctctgcttccctcagcgtctgtgtctccagtctccacatggcctctctgttgcctactccagggaggccttctggcctacaccatcttccatacccagaggctttgtgggccatttcccatcctccttcctattccctcacttcattcatccacctg

SEQ ID NO: 155049 - DNA, 429 bp, Homo sapiens
cccacgcgtccgtgctacccccgcggagttgtcgtgtgttctggattcattccggcaccaccatgtcgaaggtgtcctttaagatcacgctgacggcggacccacggctgccgtacaaagtactcagtgttgctgaaagtacacctttcacagcagtcttaaatgcctgtatgcagaacactgtacagtctctgctggggcggtgcaaccattaccagccaggcaacactgatttagccctgcggatactggagagcttgccgttgtcattctggcctactgaaaatgaagtgatttaaaattgcaaatttttgttacttcaggagatgttaatatataattttattaaaaaggtttattgaaaatcgtgaggcactttattgtatggatgcctttaaacttagtagacaaaggtttctttttttctta

SEQ ID NO: 155050 - DNA, 460 bp, Homo sapiens
gaaaatgtacaatatatttctgagtgaaatagggaccgaacacaataccttggtggacagttcagtgatgttggtgaatgggattatggagggaaaatgtacaatatatttctgagtgaaatagggaccgaacacaataccttggtggacagttcagtgatgttggtgaatgggatagaatataattccaaagagaggcagtggctatgagcaaaactgctaaaacagcggcaattgcttgcattattctgtacatttctttttgagggtgcagaagtgggaaggaaggcagggttaggagtgattgaaaataaatgagagaggccgggcgcagtggctcaggcctatattgccagcaccttgggaggctgagtcgggaggatcttttgggcccaggagttcaagaacagcttggggaatatctggagaggcctcctcttaaaaaaaaaaaaaagaaaag

SEQ ID NO: 155051 - DNA, 1450 bp, Homo sapiens
ttttggcagggtgcactccttttattaaaaggccagaacacatcctggttcactgttgcaagaccactgggatgcattaggtgaatctaacttagcttgtgacacaagttaataaagttgaatctggtttttttgttttttttaaggttgatggctgaagtgagattaatttctaaatagtctcaactcttgagacttgctatattgcttataatgaagaggaaaaggacactttcattactttacgtatttatgtaattggagggaatggaaagtttttgggaatatgaatcaaatattagactgttttcttattttagtttgtatatgttttaattgttttctctctctacccattaaagattccagtgctgaatattcaaatgaaaatttttcctgcactttgtactgtagcagggaccatattttcctgtacaaattacttccgtgtaatcttcacaggtggtgttggcaaaaatggatcaacaatagcagtaagtataccttaagattttcaacacttgtttacactaggacttggttttgttgtcattttgttttttatttcaaatgtataaaatcatttgttaatttataatttatacttagcctttaaagaaactaatgttcaaaacttcaattttatatatacttacccacatttatatgctctatatattcatacttttatgcatacacacacacaaacacacttattcacatgttttctaaagtatgagctgctttgtaaaaataagcctggtctcttaagtgaaatcctcagtttgtgcctaatgaatttatgctgctacttttcattagctcttctagtttgtgatttatagaaattgctgcctatcaggcaccatgaggttcctgaaagtttgagttgaactgtgaactgttctgcagcagatccatgtagtatctgatgagtactgaatactattaactcttctcttcactctgtacagggaacaagtgtcctttctccttttctccatattggatcagtgattacattagctgcaatgatctacaagaaatctgcagttcagctttttgaaaagcatccctgtctttatatactgacatttggttttgtgtctgctaaaatcactaataagcttgtggttgcacacatgacgaaaagtgaaatgcatttgcatgacacagcattcataggtccggcacttttgtttctggaccagtattttaacagctttattgatgaatatattgtactttggattgccctggatttctctttctttgatttgatccgctactgtgtcagtgtttgcaatcagattgcatctcacctgcacatacatgtcttcagaatcaaggtctctacagctcattctaatcatcattaatgatgtaaattggtatataggaacatccatggttttcctgccaggaaagaaaggtaacatattaagggagt

SEQ ID NO: 155052 - DNA, 1828 bp, Homo sapiens
  misc_feature (1)...(1828): n = a,t,c or g
ggcactaggactgggaaggggacccacccgagggtccagccaccagccccctcactaatagcggccaccccggcagcggcggcagcagcagcagcgacgcagcggcgacagctcagagcagggaggccgcgccacctgcgggccggccggagcgggcagccccaggccccctccccgggcaccccgcgttcatgcaacgcctggtggcctgggacccagcatgtctccccctgccgccgccgccgcctgcctttaaatccatggaagtggccaacttctactacgaggcggactgcttggctgctgcgtacggcggcaaggcggcccccgcggcgccccccgcggccagacccgggccgcgcccccccgccggcgagctgggcagcatcggcgaccacgagcgcgccatcgacttcagcccgtacctggagccgctgggcgcgccgcaggccccggcgcccgccacggccacggacaccttcgaggcggctccgcccgcgcccgcccccgcgcccgcctcctccgggcagcaccacgacttcctctccgacctcttctccgacgactacgggggcaagaactgcaagaagccggccgagtacggctacgtgagcctggggcgcctgggggctgccaagggcgcgctgcaccccggctgcttcgcgcccctgcacccaccgcccccgccgccgccgccgcccgccgagctcaaggcggagccgggcttcgagcccgcggactgcaagcggaaggaggaggccggggcgccgggcggcggcgcaggcatggcggcgggcttcccgtacgcgctgcgcgcttacctcggctaccaggcggtgccgagcggcagcagcgggagcctctccacgtcctcctcgtccagcccgcccggcacgccgagccccgctgacgccaaggcgcccccgaccgcctgctacgcgggggccgcgccggcgccctcgcaggtcaagagcaaggccaagaagaccgtggacaagcacagcgacgagtacaagatccggcgcgagcgcaacaacatcgccgtgcgcaagagccgcgacaaggccaagatgcgcaacctggagacgcagcacaaggtcctggagctcacggccgagaacgagcggctgcagaagaaggtggagcagctgtcgcgcgagctcagcaccctgcggaacttgttcaagcagctgcccgagcccctgttcgcctcctccggccactgctagcgcggcgccggcaaaactttggcactggggcacttggcagcgcggggagcccgtcggtaattttaatattttattatatatatatatctatattttgctccaaaccaacccgcacatgcagatggggctcccgcccgtggtgttatttaaagaagaaacgtcctatgtgtacagatgaatgaataaactctctgccttctcccctctgcccctctcccaggcgccggcgggcggggccggtattcgaagtttgatggcaattcggttttaaacatggtgtttgggaaaaaaaaaancggcgcggtgtgggtacacgggacttgacgcaacccaccgtgtaactgtcagccggggccctgagtaatccgcttaaagatgttcctacggggctttgtttgctgttgatgttttgttttgttttgttttgttttttggtctttttttttgtaattataaaaaataattctattttctattgaggaaaagaggccgtctgtatatttttggggaattcttttcccgtttcaagcattaagaacaccttttaataaacttttttttgagaatggttacaaagccttttgggggcagtaaaaaaa

SEQ ID NO: 155053 - DNA, 1490 bp, Homo sapiens
cggacgcgtgggcgagaaaccaaaccacacaccaaagagaggggtatgatggctaagaagcccccaaaaccaggccctcgcaggatcttccaggaaaggttaaagattactgctctacctttgtactttgaaggttttttattaatcaagcggtcaggataccgggagtatgagcattactggacagagttgagaggaactactcttttcttttataccgacaaaaagagtataatatatgttgacaaattagacatagtagacctcacatgccttactgagcagaattcaactgaaaagaactgtgcgaaattcacccttgttttgccgaaagaggaagtacaactgaagacagagaacacagaaagtggggaagaatggagaggcttcattcttacagtaacagagctgtcagttccccaaaacgtgtcactcctacctgggcaagtaattaaactgcatgaagtcctagagagagaaaagaaaaggaggattgagacagagcagagtacgtccgtggaaaaagagaaggaaccaactgaagattatgtggatgtactgaaccctatgccagcatgtttttatacagtgtcccggaaagaggcaactgagatgctccagaagaacccttctttgggaaatatgatcctgaggcctggtagtgacagtagaaactactccatcactattcggcaggagatagacattccaagaatcaagcactacaaagtgatgagcgtaggacaaaactacactattgaactggaaaaacctgtaacactcccaaaccttttcagtgtcattgattattttgtgaaggagactcgaggaaatttaagaccatttatatgttcaactgatgaaaacactggtcaagaacccagtatggaagggagaagtgaaaagttgaagaaaaatccacacattgcatgaaatacaatgtgaaagctcctttgtatatcttggtaatttatattttcaaaacgaagttcttacttttaaagagaattacctatattctcctgatactgattaccaagtcattcacctgaacaccagaattagaattaaacattgtaccatacaatttcattatcttatcagaatgaaaccaattcacagggaaactagagactacggctgtggtggtaacctgcagatatacacattcccatgcactgacataagttgaaaacacatagtactttctagatggaatttttttttttagggcctcaatgaaatacattttcccctatataattccaacagcagtttctctagttctaaattttaccaattcccaaaaaacctaagttttgctgaaatctgatttgaccaatttatcaaatatgtcattttaattacctagctggaagttagagacatgaaatgtactagaggagcccttttccaatggaaatattatataccacattttttgttaatggaaataaatgtctccattcccaaaaaaaaaaaaaaaaaaa

SEQ ID NO: 155054 - DNA, 1831 bp, Homo sapiens
  misc_feature (1)...(1831): n = a,t,c or g
gtttgtttcttttagtacaggaagatataaatgcaaatgtgcaaaaaaaggaagaaggaaagatggcncaagttcacctgtttggtacgtacagggtccacagctctgcagaaaggggagaaacctggtagacagagggcctgacgcaccatagcattgagcacattttccactgcttaattatgtgtgagattttcccttttaaaataaatctatggtctgtgaaatagtctgtataaaaatatgaagccttgaataggccagtcatagcagttccgtcttgaatagaactcaattttacaagcacggagtgagagtatcattccactgcaaactcttttatttccacaacatattagatctcattctgctttagtagagttacctcttaagtacgactattagtcatttcattaatatgaaaatctgggaaggcccacattaaaataccaacataattgctggctaccaagataaaattatttaggcagattccagccccaatggttcaatgataacaaaactacaaaacatgggacatcaaattcattaataaaattattaagtcacctcttccatcgaatgatgagatttttcttattcactgtttcccatcagggaaaaaagaatcctcccacctcatgcctttttttttttctgatgccaggaattagtattcattgcctctttaagaggccaatgcaaaaaaaggtagaaaaagccctagcccagagagttgggattgccagttgtagtccctgggttgccttgctggggggtgcctaagtcagtgccataacctcagtttttctaatctgtgtaacatggggatagagtatatgatttccaaggtcactttcacctctgtgattgagcctctaagaaagccaaatcttttcactttgtaatcatgacatttttaaaagatggagttaatatgaatgggaaacttttttttttttgagccagggacttgctatgttgcccaggctggtcttgaactcctgaactcaagtgatcctctcacctcagcctctcaaatagctgagactacaggcacacaccactgcacctggctaaagactatattcttaaagaataaaagtactgcacttcacctctatctcctggtatctcttcaattcaaacacaccattaatgactacaatattttatttaaggccgggcgcagtggtagttggctacaactggaacagtttatcacctcagggtatttgagggcaaggaagatacagaaaaaaaaaaaattaggggtatgcaacacagtttaagtgctcagaaataaattttaccacagtgagaacgaaaccacaatgacatgttactaacactgtgcagacgtcatggttgaatgcctgcgttctgttccttcctggtggcagccgccttggttcattagttctcatgtttgcagctccttcacatgccccggagcttcccaagtgtgccactcaaaggaaacagcaccagtgagtggaggccagcagacccacccggcccaaaacagagccttctcagttatgagacttttctacgagaagggacttcaaagtctaaacagaccagagagagttaaaaagatcctgctgcttcttagggaagttcaaaggtacattctgacacctaagtgggaaacaattctgttttaggaaaagtgccaactgcaatccgggtacaaaatttcaacaaaaagaaaagtaaaactgaatgatctccccctcattccctaattcatagaaaaatagtaggtgtgacttttgtttcaaagcaagctgaaaaatggttaaatggacaatttacaaacggtatt

SEQ ID NO: 155055 - DNA, 382 bp, Homo sapiens
  misc_feature (1)...(382): n = a,t,c or g
ggggtgtcccggcaggtctgcgtcatcacgacccagtaacgctgctggctgtgtcctcatgccctcttcctctggctggccagtcatctttgtcacttctacacctttgagtgtgtacaggctgaatgttgagtgatgcccccccaccctctcnnnnnnnnnnnnnnnnnnnnnnnnnnnnnnnnnnnnnnnnnnntgttattaggcacagcagctccatcctgctccctgagaatggcagtgcaggcacagagaagagcagttgggaagacaggcaggtggtctaccctgtccccgcacacttcacaggcactccactgcttggcaggaattctgcatggcatctgccacgcatgctcacagggtgaaaaatcaagctgtc

SEQ ID NO: 155056 - DNA, 646 bp, Homo sapiens
tgagagggtgggggggcatcactcaacattcagcctgtacatactcaaaggtgtagaagtgacaaagatgactcaaccaacaggacttcccatgactggccagccagaggaagagggcatgaggacacagccagcagcagttactgggtcgtgatgacgcagacctgccgggacacccccgtgggctcgaggcattggatgggcctgagagctgaagcaggggcacttgcaggaatggcacttgaagccacctgcctggctttacagggcagcctcctggaagcctccatgaaacgcagctttccctgggccacacactgcctggctccacaaaggcgaacaacacagcctgctttgccccggatattcctggttttggcattaaatgtccacagcctgagaaatccttcagtctcgggcaaatgggacgtttggtgaccctaccaccatgtatctttgattttagactcccctgaccaatgggagggctgcaagcactggctgggcctggcggaggtggtctttggtcatctctgtggtggctgaagtcccattagcctggcagggccccctctccttaccaccagaaatggatcctttcccaaggctgcttccctcccttccttcccttggaaaacatacgaaa

SEQ ID NO: 155057 - DNA, 1982 bp, Homo sapiens
caggattataaaaaaactaaacctattttacgagcaaccaaattaaaagcagaagcaaagaaaacagcaataggcataaagactcaccacggatgttgaccctgatctggaccaagatgaagattagctaagcaacaatcaatgcatgaaagagaaataactttacgaaagcaccttttgggaccaaaactttcaatactgaaactggaacatctttaattctttctgctaatattttcagattgcagacatatgatttttgatagttgcataggatgtcaggaaaagaaccttacctagcaatgcagtatagtatgtgctactggatacttttatatatctttctgctttgacagccaccctatacatggtacatttagatgaaatgggaaccaggatcctaaatttttcaaatgtcattgccgaatttatgtgtataattcccatcacttcctgatgagtaagtcctatttttggttcctatatacatccataagttagtatatattccttatttacagaaacatgcctcaaatcacattcagaaagaacaaaaagtcatgggaaattttttattttacaacaaagccctgctttctttctggacgtattttacatcattagagagactatctgcacatacatctaccataatctttttccttctttgccaactgttcagtgcacatgtgctgcatcagaaatggcacctggatgacagaagctcaaagagtcacatatgtctctaaaatagagttcttttcctcttgggctgtctgaactggtgtaaatagaagctcagttgatcttggttttaattaacttattactctattaatataaccttggaattctattctaattatgttgttctggctgcttgtagtatcagttcgcccctcttgttagggagatatgtaacaatctgtcatttaattgagcagtctttttcacataacagtaatagcaaaaatcctacctactcagaatcatcttcttaggttgtctcctaaatctgaaccaatccagtggttttataaaattacattttgtctcttgagatttaatcgaattagaactctttagggagaaaataaataatagaagaaaatatatgcctcatatttcatatgtaattatctgttgatataatttttcaatgtattttgtatttgtggggagccataatgacctggtacatttcaatatttttactgggtaattccaattttttaaatatggtttttacatggctggaacacataaaccttagaaaactggaaaatacgtgtccacagaaagagttattagctactaccttatgtaaagatgcatagaaaatgaaattgttgggaaacatgtgcacaaagtgttttatattatatacattgtatttatggaaggaataaataaaatattaaggattgttttcctgctagccaagagaagaaatccttgggaaatatctaaggagtatatggggctttataagcactgtttctaaaagatattctctggtacttttgcaaaaagtcgactgtgactgtgtagcattatgttctgtagaatttttttcaagtagcataatttatttcattggtgtgaaaacagccaaaggttccaatatcctcacaaatcatttatgccaaacatctgaaggcaaaatttagccggtgttatttactagattctcccctttgaactcacagactcaagagacagaccaagagttcttatatactcaccacagcggaccaatccaagtggcatttttaggaaagggtgcagcatttaatgccatgtggtatgtctgttcgtcaagtgggtggcaagggaatatccaagctggcattttggatatgatgggccttttactttcctgagtgacatgccacatgtcaagaaatactgctccccacccccccactcccatcacatttacgtgaacaattttcatttagttatttcccgttccatatggg

SEQ ID NO: 155058 - DNA, 393 bp, Homo sapiens
ggtggctgctgtggctgctgcatctgtctacactcttcttccactctcagcagaagtctctggatctcacggttgttgggacacagcttgatggcctcgttcaggtcctctaaggctgctgcgaactgtctgctgctgcgttttgcccttgctctcgcatagtaagcttcataagatttcggtttcagctccagggccttagtagcaaattcctccgccattccaaaatcgttcattttcctgcgacaccgagagaggttgaggaggagagacacctttagttcccggaaagttttcaagtcctcaccaaacccttctctagggaacttcttcagggcgtactggtagcgctgggcagcttcctttactttacctttcttataaaacacgaaa

SEQ ID NO: 155059 - DNA, 1617 bp, Homo sapiens
atgtccctgcacggcaaacggaaggagatctacaagtatgaagcgccctggacagtctacgcgatgaactggagtaaaggtaaagtaaaggaagctgcccagcgctaccagtacgccctgaagaagttccctagagaagggtttggtgaggacttgaaaactttccgggaactaaaggtgtctctcctcctcaacctctctcggtgtcgcaggaaaatgaacaataactccagttcctgtgttcacattttgtcaagcagacagttcgcagcagccttagaggacctgaacgaggccatcaagctgtgtcccaacaaccgtgagatccagagacttctgctgagagtggaagaagagtgtagacagatgcagcagccacagcagccaccgccgccaccgcagcctcagcagcagttgccggaagaagcagaacctgagccacagcatgaagacatatactctgtacaggatatattcgaggaggacccccctcctgtgggaggacagggcaaagaatacccaagccctcccccttcccctctccggagaggccctcagtatcgggccagccctccagctgaaagtatgagtgtctatagatcccagtctggttcacccgtgcgctatcagcaggaaacaagccggccctaccagatgcctcagctccctgtggcagttccccagcaagggctcaggctacagcctgccaaggcccagattgtgagaagtaaccagcccagcccagccgtccattcaagcaccgtcatccccacaggagcctatggccaagtagcccattcaatggccagtaaataccagtcttcacaaggagacataggagtcagccagagccggttggtttatcaagggtcaattgggggaatcgtaggggatggaaggccggtgcagcatgtccaagccagcctgagtgcaggcgccatctgtcagcatggaggattgaccaaagaggatcttccacagcgaccttcctcagcataccgaggtggcgtgagatacagccagacaccacagatcggacgcagccagtcagcatcctattacccagtctgtcactcaaaactagatctggagcgctcctccagccaactaggttcccctgatgtgtcgcatttaatcagaagacctatcagtgtcaaccctaacgaaatcaaaccgcacccgccaactcccaggccgttgctgcattcccaaagtgtaggccttcgcttctctccatctagcaatagtatctcctccacctccaacctaactccgaccttccggccatcttcttccatccagcaaatggagatcccactgaaacctgcatatgagagcaacattgccttttataacaaaaccaacaatgcacagaatggccatttgctggaggacgattattacagcccccatgggatgctggctaacgggtctcgtggagacctcttggagcgagtcagccaggcctcctcctatcccgacgtgaaggtagctcggactctacctgtggctcaggcataccaggacaacctgtacaggcagctgtcccgagactctcggcaagggcagacatcccctatcaaaccaaagagaccgttcgtggagtctaatgtttaa

SEQ ID NO: 155060 - DNA, 410 bp, Homo sapiens
aaaggtaaagtaaaggaagctgcccagcgctaccagtacgccctgaagaagttccctagagaagggtttggtgaggacttgaaaactttccgggaactaaaggtgtctctcctcctcaacctctctcggtgtcgcaggaaaatgaacaataactccagttcctgtgttcacattttgtcaagcagacagttcgcagcagccttagaggacctgaacgaggccatcaagctgtgtcccaacaaccgtgagatccagagacttctgctgagagtggaagaagagtgtagacagatgcagcagccacagcagccaccgccgccaccgcagcctcagcagcagttgccggaagaagcagaacctgagccacagcatgaagacatatactctgtacaggatatattcgaggagga

SEQ ID NO: 155061 - DNA, 975 bp, Homo sapiens
cggccctaccagatgcctcagctccctgtggcagttccccagcaagggctcaggctacagcctgccaaggcccagattgtgagaagtaaccagcccagcccagccgtccattcaagcaccgtcatccccacaggagcctatggccaagtagcccattcaatggccagtaaataccagtcttcacaaggagacataggagtcagccagagccggttggtttatcaagggtcaattgggggaatcgtaggggatggaaggccggtgcagcatgtccaagccagcctgagtgcaggcgccatctgtcagcatggaggattgaccaaagaggatcttccacagcgaccttcctcagcataccgaggtggcgtgagatacagccagacaccacagatcggacgcagccagtcagcatcctattacccagtctgtcactcaaaactagatctggagcgctcctccagccaactaggttcccctgatgtgtcgcatttaatcagaagacctatcagtgtcaaccctaacgaaatcaaaccgcacccgccaactcccaggccgttgctgcattcccaaagtgtaggccttcgcttctctccatctagcaatagtatctcctccacctccaacctaactccgaccttccggccatcttcttccatccagcaaatggagatcccactgaaacctgcatatgagagcaacattgccttttataacaaaaccaacaatgcacagaatggccatttgctggaggacgattattacagcccccatgggatgctggctaacgggtctcgtggagacctcttggagcgagtcagccaggcctcctcctatcccgacgtgaaggtagctcggactctacctgtggctcaggcataccaggacaacctgtacaggcagctgtcccgagactctcggcaagggcagacatcccctatcaaaccaaagagaccgttcgtggagtctaatgtttaa

SEQ ID NO: 155062 - DNA, 444 bp, Homo sapiens
ttttttttttttaaaggtagaattttacaatagatttattattattgtctccaaatattgtgaggcaatttaaatgtgtctttattcattatttttctttagaacttttctttatggaaaaggtggcaaaaatcattattcttagaagtaaagtagcaattacattaatgaaacacaaggatatgtcacgtttaacatggagcgctggagaggaccagaaccacctatcctcaatctttgttctctgcccttagccctaacagctgcagccggaagtggcaaactggaggtgtgccgtttgctcttggaacaaggggcggcagtggcccagccaaaccgccgaggagcagtgccactattcagcacagtgcgccagggccactgtgcaggtaagcagggcgaccacttccagtccctcaggcaggactgagttctaggtgagga

SEQ ID NO: 155063 - DNA, 7947 bp, Homo sapiens
agatgaagattttatcattttaattgatggattaaatgaagcagaatttctcaaaccggattatggggatacaattgtattgtttctgagtaaaatgatgggaaagtttccttcttggctcaaaataattgtaacagttaggaccagtttacaggaaattaccaagctgctgcctttccataggatttttttggatcgactagaagagaatgaagccatagaccaggacctgcaggcttacatcctgcaccggatacacagcagctcagagatccagaataacatttcacttaatggcaaaatggacaatactacatttggcaaactcagttctcatctcaagaccctcagtcaagggtcctatctatatctgaaacttacatttgacctcatagagaaaggctatctagtgttaaagagctctagctacaaagtagttcctgtttcgctctcagaggtttatttactccagtgcaatatgaagttcccaacccagtcttcctttgaccgggtgatgcctctcctgaatgtggcagtggcctctctccacccactgactgatgagcatatcttccaggccatcaatgctgggagcattgaaggcacactagaatgggaggattttcagcagagaatggagaacctctccatgttcctaatcaagcgcagagacatgactcgtatgtttgtacatccttcttttcgagaatggcttatctggagagaagaaggagagaaaaccaaatttctctgtgatccgaggagtggtcacacgttacttgccttctggttttcccgccaagagggaaaactaaaccgacagcagactattgaactgggacatcacatcctcaaagcacacatttttaagggtttgagtaaaaaagttggtgtatcatcctccatcctccaaggtctctggatctcttatagcacagaaggtctttccatggcactggcgtctttacgaaatctctacactccaaatataaaggtcagccgactgctgattttgggaggtgccaatattaattaccggacagaggttttaaataatgctccaattctatgtgttcagtcccatcttggttacacagaaatggtagccctgctgctggagttcggggccaacgtggatgcctcttctgaaagtggcctgactcccctgggatatgctgcagcagcagggtacctgagcattgtggtgctgctgtgcaagaaacgggccaaggtggatcatttggataagaacgggcagtgtgctttggttcatgctgcactccgaggtcatctggaggttgtcaagtttttgattcagtgtgactggacgatggccggccagcagcaaggagtatttaagaagagccatgccatccaacaggccctcattgctgcagccagcatgggttatactgagattgtctcctacctacttgatcttccagaaaaagatgaagaggaagtagagcgagcacagatcaacagctttgacagtctctggggagagacagccctaacagctgcagccggaaggggcaaactggaggtgtgccgtttgctcttggaacaaggggcggcagtggcccagccaaaccgccgaggagcagtgccactattcagcacagtgcgccagggccactggcagattgttgatcttttactcacccatggagctgatgtcaacatggcagacaagcagggccgcactcccctgatgatggctgcttccgaaggccatctaggaaccgtggactttctgcttgcacaaggtgcctccattgctcttatggacaaagaaggattgacagccctcagctgggcttgtttgaagggccatctctcagtagtacgttctctggtggataacggagctgccacagaccatgctgacaagaatggccgtaccccactggatctggcagctttctatggcgatgctgaggtggtccagttcctggtagatcatggggccatgatcgagcacgttgactacagtggaatgcgccctttggatagggcagtggggtgccggaacacttctgttgttgtcactcttctgaagaaaggagccaagataggtccagccacatgggcgatggccacctccaagccagacatcatgatcatcctgttgagcaagctgatggaagagggggacatgttttataagaaaggtaaagtaaaggaagctgcccagcgctaccagtacgccctgaagaagttccctagagaagggtttggtgaggacttgaaaactttccgggaactaaaggtgtctctcctcctcaacctctctcggtgtcgcaggaaaatgaacggggaatctcagaactccccctggacctttatcgtctccctggattttggaatggcggaggaatttgctactaaggccctggagctgaaaccgaaatcttatgaagcttactatgcgagagcaagggcaaaacgcagcagcagacagttcgcagcagccttagaggacctgaacgaggccatcaagctgtgtcccaacaaccgtgagatccagagacttctgctgagagtggaagaagagtgtagacagatgcagcagccacagcagccaccgccgccaccgcagcctcagcagcagttgccggaagaagcagaacctgagccacagcatgaagacatatactctgtacaggatatattcgaggaggagtacctggaacaggatgttgaaaatgtttccattggcctccagacagaggcccggcccagccaggggctcccggtcatccagagcccaccctcctctcccccgcatcgggactcagcctacatctccagctcacctcttggctctcatcaggtttttgacttccggtccagtagttctgtaggctctcccactagacagacctatcagtccacctcacctgccctttctccaactcatcagaactcacattacaggcctagcccaccacacacttccccggctcatcagggaggatcttaccgtttcagcccccctcctgtgggaggacagggcaaagaatacccaagccctcccccttcccctctccggagaggccctcagtatcgggccagccctccagctgaaagtatgagtgtctatagatcccagtctggttcacccgtgcgctatcagcaggaaacaagcgtcagtcagcttcctggcagacccaaatctccattatccaaaatggcccagcggccctaccagatgcctcagctccctgtggcagttccccagcaagggctcaggctacagcctgccaaggcccagattgtgagaagtaaccagcccagcccagccgtccattcaagcaccgtcatccccacaggagcctatggccaagtagcccattcaatggccagtaaataccagtcttcacaaggagacataggagtcagccagagccggttggtttatcaagggtcaattgggggaatcgtaggggatggaaggccggtgcagcatgtccaagccagcctgagtgcaggcgccatctgtcagcatggaggattgaccaaagaggatcttccacagcgaccttcctcagcataccgaggtggcgtgagatacagccagacaccacagatcggacgcagccagtcagcatcctattacccagtctgtcactcaaaactagatctggagcgctcctccagccaactaggttcccctgatgtgtcgcatttaatcagaagacctatcagtgtcaaccctaacgaaatcaaaccgcacccgccaactcccaggccgttgctgcattcccaaagtgtaggccttcgcttctctccatctagcaatagtatctcctccacctccaacctaactccgaccttccggccatcttcttccatccagcaaatggagatcccactgaaacctgcatatgagaggtcatgtgacgagctgtcgccagtgtctccaactcaaggaggttaccccagtgagcccacccgatccaggaccacaccattcatggggatcatagataaaacagcacggactcagcagtacccccacctccaccagcagaatcggacctgggcagtgtcatctgtggacaccgtcctcagtcccacgtctccaggcaacctgcctcagcctgagtccttcagtccaccatcatccatcagcaacattgccttttataacaaaaccaacaatgcacagaatggccatttgctggaggacgattattacagcccccatgggatgctggctaacgggtctcgtggagacctcttggagcgagtcagccaggcctcctcctatcccgacgtgaaggtagctcggactctacctgtggctcaggcataccaggacaacctgtacaggcagctgtcccgagactctcggcaagggcagacatcccctatcaaaccaaagagaccgttcgtggagtctaatgtttaaaagacgttttgttggagtgagacccatatgttttcactgcacattttcaggcttggtttccacattcgaggtagttctctggcttaatttctcatgtagtttctgtgtggtgttcagaggtggcagcccacatgctgaaatcctttgcatgcagccgactgggaagcggcctcccgggagccaggacttcagtttctcttgtctgtgcccagccacatgctctctccctctcttcagatgccaacgaggagattttcgtgctgtgtgctttaacccagggagatcagacacactggtcagctttttccaggagacaatcgctttcactgatgttcttgttgtgtaattgtctttttccttttttaaaaaataaggtgttcttgttcgttttcttctagaaactttagaaagagtgcgatgcccctttgcctttgcatccttagccagtgtcacccacacagccagccgcagcgcattctcatgctgtggcccctccccagaccgccagcgccctgcagccaccaggtctgcagtgtgcattaggattattgctggtcttcctagggggtaaaaggatcagagagagaagaattaagtgctaaattggaagaaaaccccaatatagttatgtaaaatgtcactacattgattttccaagaggcattgtaggaacatgtcaaaaacagccagccctttaaatattgcagtcagccaaggaaattagatgagaattgtggctattaagagaattcactgagagttattctctagatttttagccgacaattaaccactaaaagctactgcttttccagggtgggggagggaatgaatacatagaaaaacaaaaaagattgttctggattctcagtgaaaggctataggaagtctgttctggagacatctactttttagatcctgatacatcactgagtgtcatactccactaaaaggaaactctaaccgaaggctggctggtgtgacaatcccgttagttggatcttcacctacagccagattttgctctagtggccctcttcctgtaaacccagatggcgtcatacagaaattgtttctttcagaagcagattggaatctcttgggaccatgagactgagtcccaatatttccacccagggtcatgcccgttgttgtctacttccattttgagatctatagtttgattatctattattacaggaactgtttcttttctttttctaggagtgtttatgagagtgtgatattttaaagtcagacgcagcaaaaactgtttcagggtgaagaaagacccctttcagccctgttttgcagccctgggtgggggcatgagatagacagcaagcttctgatcttgaagcttgtctagaagacacatcttctaggtctcgtggtcatttggtaggctgacctttgagtgagcgaggccactattgagtggatagcaagaacattggaaccagagcctcggcacaggcctggcactggctgtacatcagctcttacaactaaacaactcaactaagcaactgaaacgaaacaaaggagcattcgttctctgttgttaggaatcattctgctctgttagggaagggctgcaggaagggcagtttcctgaataaaaatctggctgcgaccagtcccatgtgtctggtaagtaagtaagtaagtaagtgccctttgaagggatcattaagacacagggagcatgaacctgagatcagaagcatttctttactaatttagattctgcgaaatagacggacctctccacccccaaacctaaaacaggccaggacttgtctctgtgctgaaagcaaatagcaagactaactcaagccccagcctctttccacactccctgatacctaaggactgctttctcagctagaccagggtgggcatcagcgacgccttctcagctagaccagggtaggcatcagcgtcctctctccatctctatacccctctctctcacatcaggaagatgaaatgtgtagctctagcggcaacctctagccaggagcccagtggcctctcagattgctttttggccaggtctcagcactgctggcatctttacatcttactccttaaaaccgcctctcgctgaggagccactgcattttgaagaatttctcagtgtctgtcaggaaagtactcctgctcatttggaacgccacacaccacccgcactcacctgtccaggcgaatgagcaggtcctgtagctttacaaatatgccgctgatgccgcttctccccagggtctctcagttttccaggacaaaaagatttagggcctataccctatgggcaaaacacctaaaatgtcaacagtcaaaatgccattctttttggccatcataagagggagtaggtatcactgctgcatgccagttgtttttgactagaatatgccaaccagagcttgttggggcaggagacgtttttccttacaagcagactgcctgtgccctgtgccctgtttgctacttcactgccatggaatgatccgagtactgtatctcagagctgccccttccccagcagcaaacactcgctgagtccacgtctggcttcaggtgggaggaaatgtttcagatgaaacttactcaattcataccaccctgaaatggaggacagaggtgacaaacttcagtttaataggtttctcaccaagttgtatgttccattggcccaggattcttgcactaatgggtttctatcacattatgtctataaatgggtgcactttactgtttgaatttgtaactgaagtactggatatttaagtgtgagtaatgtcttcattagaaaatagcagaaccgctcttgtcttttagtgtatttttcaagaaaaaaggaaaggaaagacatcaagcagtggatcacaacatttatagcacaagaaataacttgtatataagcatcaaaaagattaagaattttttaatatgaaaaatatttgcagggattttaaagtgcttttccagcaatgttcttagggactcctgagacacggttactttatctactggatcagtaaggcacacaattaacaattaacaattaatgtttatttacaaagtaaagggaaaacctgtgtaacatgagaatttggcatgacaaaatggagaccattttgtatctgctgttgtatcttgtccgggttgcagacgtgcactattaaagtcccaagttaatagagcacaaacccttctcgctcctcccccatgtgcccctctttttagatgtgtataacttaaactcgatggctcaggaaaattccactaattagaatcatgtacagtaccccaggtcgttgtccagatatacaagtttgctaatgtagttaagcctggattattaaacacttttcctaaattattgtaaacagaacagcttagagaaaggtattctcagtccttaatattgtatagtagtttatgagcccctctctaaatattggtatttttatattccagagatgtacccaatagaaaaaattaaaaattaatcagtatctaat

SEQ ID NO: 155064 - DNA, 639 bp, Homo sapiens
catcttgtttttaaaagaagtagcctcaaattaaactccttaaactctgatgccctggggatgagaacaactagcttggatctcgtgccgtgtaattcaatgtttcattccgctgcctccatcatgtaatagaatcgctttccagaaaggcagttaactggaagcagcagaggctcccagccgtgagaggactgctcaacaatgccccccatcgccgcccccccacccctcgcacccccttgtgttttcccctcctgaggggcccccaagggttaatggctttccatgtcctaggtgtgggggacagaggaagggagaggcagatcctggggccgggagaggatggcctgggtcttgaatctgggagtaattaatgcccaccccaaagaaaaaggccctgcccaggtcccaatgttgtccttagatctgatgatgctgctatttacaaaacactgatcgtccgaaagcttgaatctgttcctcctcgaatgaccctgtagatgcctgacctccaccgtacctccacatcactattcatgtccttctaggaaaatgtgcacatgcctcacgcactatgtgggaagggtgtgtttttaaattaataaagtgtgtcaccattagccatacgaaaaaaaaaaa

SEQ ID NO: 155065 - DNA, 431 bp, Homo sapiens
  misc_feature (1)...(431): n = a,t,c or g
ngtttccagggaggcgaaggtgagcaggccgaccccaagagacatgaaccagtctgcgtaatagtgataacacaccagcaaggccccgatggcaaagcacaggaggacgaaatggaaaaactcatcatctttctttatattcagtcttcttaactgagaggcctccacttctccacttgctgggtcagagcctctccttcggagtcctgattccccagagggtaccacctctccaggagcatctccatagagttgaagctcatccttcaaaacgtcaggctccccatgcccaggacagtctacatcttctgtttctctgtggacttgactgttgtcctgaggctgggaggaggatgctgaagtctccatggcttttcctgtggtccttcagcttgtctgggcagcaaggggagctctgtgtagactatgtg

SEQ ID NO: 155066 - DNA, 458 bp, Homo sapiens
gaaggaaaagtgttctgtttattggtctggcttggtctcctgtgcgtctctcagaatgctgctctgcccttgtgggctcaggggtcgcagtggtggtcacactggggcctgcctctgctgcccacctggaagtggcctcagtcagtcttcctgaaccctgtcagcctaaacttctggaagagggggatgaagccttggaggacgctgtggatacggtacactagtccgaagtagatgccaacggtttccagggaggcgaaggtgagcaggccgaccccaagagacatgaaccagtctgcgtaatagtggtaacacaccagcaaggccccgatggcaaagcacaggaggacgaaatggaaaaactcatctccatagagttgaagctcatccttcaaaacgtcaggctccccatgcccaggacctgaggaggaggaggatgaagaagatgaggaggatga

SEQ ID NO: 155067 - DNA, 542 bp, Homo sapiens
tccccagagggtaccacctctccaggagcatctccatagagttgaagctcatccttcaaaacgtcaggctccccatgcccaggaccgggtgagccgttcccgtgggggtatccagcccccaggctccgtcgatgttttccggttgctctgggttgctggtcctcatcattgctctctgaggaggaggaggatgaagaagatgaggaggatgaggaggaagaggaggaggaggaagaagacttgtttctctcatattgttcttgggaaaagagtccagccttcccatcttgcttgtggaaatctgtctctccatagtctacatcttctgtttctctgtggacttgactgttgtcctgaggctgggaggaggatgctgaagtctccatggcttttctcttagtttagctgcattaccacattggaaagagcaatggaaaggagtccgacacatgaaacaactgtttcctgtgtatctgagttcctgtggtccttcagcttgtctgggcagcaaggggagctctgtgtagactatgtggatgctg

SEQ ID NO: 155068 - DNA, 448 bp, Homo sapiens
  misc_feature (1)...(448): n = a,t,c or g
ctccacttgctgggtcagagcctctccttcggagtcctgaattnccccagaagggtaccacctcctcccaggagcatctcccatagagttgaagctcatccttcaaaacgtcaggctccccatgccccaggacctgaggaggaggaggatgaagaagatgaggaggatgaggaggaagaggaggaggaggaagaagacttgtttctctcatattgttcttgggaaaagagtccagccttcccatcttgcttgtggaaatctgtctctccatagtctacatcttctgtttctctgtggacttgactgttgtcctgaggctgggaggaggatgctgaagtctccatggcttttctcttagtttagctgcattaccacattggaaagagcaatggaaaggagtccgacacgtgaaacaactgtttcctgtgtatttgagttcctgacgaaa

SEQ ID NO: 155069 - DNA, 1818 bp, Homo sapiens
atgacgctggtcgcctatgaacgctattttaacgccgaagacgactacacccgcgaaagcgcgctacaggaacatatcgcgtcggtgcgtaaccatatccgtttgctgggacgcaaagattatcaacaagagtcagcagcctacctcgatcgagtatcggctcatatcagagatccccgttacccgtgggaactccgacttatgatctcggcacctggcagcggcaatgacaccgtcatattgaagctcacatgggcgttcacagtctctgtcgggacagcccttacctggaattggaacgctcagtgtgccaacttccaattgagcggatatattccgcgacatgggccctgtaataaccatttcccgggagaaccggaggactgggccatcttcacttccccacaaaaaggacacaccgggcgggaaaaaagggggataaaaattatgcggggaatatcaaaggtcgcccaaagatgtcctgtgtttaaaagtgatgctgcccggactcgacaaagattatcggcgcgtaagggcagaactttaccgcctggccggggtaaatttcctcactccacaacggaatctttcaggaatacgttctggctcaaaaaaataatggaacactgttttaatatggttgaccagcaaaccaccacagcgcaaactaacgctaattttttacagatcaggttcacgactatgtccaaaaagattgccgtgattggcgaatgcatgattgagctttccgagaaaggcgcggacgttaagcgcggtttcggcggcgataccctgaacacttccgtctatatcgcccgtcaggtcgatcctgcggcattaaccgttcattacgtaacggcgctgggaacggacagttttagccagcagatgctggacgcctggcacggcgagaacgttgatacttccctgacccaacggatggaaaaccgtctgccgggcctttactacattgaaaccgacagcaccggcgagcgtacgttctactactggcggaacgaagccgccgccaaattctggctggagatgtcgatcacattgcgacgcgacacaaggagcgggggctcatccagcgaagggatcatccagttctttttcgaagaaacgcaagacgagaatggctttaatatctacattctcgacgaaagcaaccgggttgaggtatatcaccactgcgaaggcagcaaagaggagctggtacgtgacgtcagtcgcttctactcgtcatcgcatgaccgctttacctacggctcaagcttcatcaacttcaacctgccgcagttctatcagattgtgaaggttgatggtcgtgaacagcaaatcccagaaggtttcgccgctgcgatcacaaatccactcatcgcctttcaggtcaaaatggtagccgccctgtttggttgccagccatacctggtgcagcggctcctggcggttgataatgattttgctgccattctcaaaggtaatggtcagtacgccgccgttgatttcgcagtcgatatcgctgtcgccatcccagtcgtccaggcgttcttcaatggtcagccagagttgatcagccaggcgatgaaattccctgtcgttcattgttgtatcctgtttttaagtgattgcggcagtttagcggcttggggtccgggctccaagttgtgcctctggggtgggttcgcgggaatatccggacgcatcgccaggttccaggagcgcataaagtgggtgtatgagctgtttccacgtctgcatgagcgccgtattcagcgggcgggcaccatgtccggcggtgaacagcagaggaactga

SEQ ID NO: 155070 - DNA, 1287 bp, Homo sapiens
atggataagaagcaagtaacggatttaaggtcggaactactcgattcacgttttggtgcgaagtctatttccactatcgcagaatcaaaacgttttccgctgcacgaaatgcgcgacgatgtcgcattccagattatcaatgacgaattatatcttgatggcaacgctcgtcagaacctggccactttctgccagacctgggacgacgaaaatgtccacaaattgatggatttatccattaacaaaaactggatcgacaaagaagaatatccgcaatccgcagccatcgacctgcgttgcgtaaatatggttgccgatctgtggcatgcgcctgcgccgaaaaatggtcaggccgttggcaccaacaccattggttcttccgaggcctgtatgctcggcgggatggcgatgaaatggcgttggcgcaagcgtatggaagctgcaggcaaaccaacggataaaccaaacctggtgtgcggtccggtacaaatctgctggcataaattcgcccgctactgggatgtggagctgcgtgagatccctatgcgccccgttcggctgcagcaatctgttcctcatgtgttggtggtggaatttcagaccatgcaggaaaaccattttctccagcgatacggatttttcctttcggcggtaatccggaaaactcaatatacacttggtcatcaacttcaacagcatcatctgggcatgagccagctttcgtgtaatcctctttcatctccacggggtataaccagatggtgtcttggcgaaaggttgtctcgttcttccaccagagttgaaggaatcctccgcggcagaatcagcccggacggtttccaggagcgcataaagtgggtgtatgagctgtttccacgtctgcatgagcgccgtattcagcgggcgggcaccatgtccggcggtgaacagcagatgctggcgattggtcgtgcgctgatgagcaacccgcgtttgctactgcttgatgagccatcgctcggtcttgcgccgattatcatccagcaaattttcgacaccatcgagcagctgcgcgagcaggggatgactatctttctcgtcgagcagaacgccaaccaggcgctaaagctggcggatcgcggctacgtgctggaaaacggccatgtagtgctttccgatactggtgatgcgctgctggcgaatgaagcggcctactgggtgagtggcaatatgttgaatttgcacgatcttgtaggcctgataaggcgtttacgccgcatccggcatgaaacgatgagcaatctgtag

SEQ ID NO: 155071 - DNA, 1650 bp, Homo sapiens
atgttcattctctggtatagtgccagcagtacttttggcaaggattcagacatcgtgatgggcgtaagagcgcaacaaaaagaaaaaacccgccgttcgctggtggaagccgcatttagccaattaagtgctgaacgcagcttcgccagcctgagtttgcgtgaagtggcgcgtgaagcgggcattgctcccacctctttttatcggcatttccgcgacgtagacgaactggacccgaattttggtgaaaaagggaatatggccccgttggattgtttcgggcgtacccgtgctgtggcctctcgggtgaaacttctgggaatcgaagaagttattgagctgaacccgccgctgttcgatctgttcctgaaacacgacgccatgcacgatccgatggtcaacgaatcttactgcgaaacctttggctgggtgagcaaagagaacctggcgcgtatgaaagagctgacctacaaagcgaacgacgtgctgaaaaaactgttcgatgatgctggtctgattctggtcgacttcaagctggaatttggtctgtacaaaggcgaagtggtactgggtgatgagttctccccggacggtagccgcctgtgggacaaagaaacgctggagaaaatggacaaagaccgtttccgccagagcctcggtggcctgatcgaagcctatgaagccgtcgcccgccgcctgggtgtgaggcataagatggaaaaagtcatgttgtcctttgacaaagtcagcgcccactacggcaaaatccaggcgctgcatgaggtgagcctgcatatcaatcagggcgagattgtcacgctgattggcgcgaacggggcggggaaaaccaccttgctcggcacgttatgcggcgatccgcgtgccaccagcgggcgaattgtgtttgatgataaagacattaccgactggcagacagcgaaaatcatgcgcgaagcggtggcgattgtcccggaagggcgtcgcgtcttctcgcggatgacggtggaagagaacctggcgatgggcggtttttttgctgaacgcgaccagttccaggagcgcataaagtgggtgtatgagctgtttccacgtctgcatgagcgccgtattcagcgggcgggcaccatgtccggcggtgaacagcagatgctggcgattggtcgtgcgctgatgagcaacccgcgtttgctactgcttgatgagccatcgctcggtcttgcgccgattatcatccagcaaattttcgacaccatcgagcagctgcgcgagcaggggatgactatctttctcgtcgagcagaacgccaaccaggcgctaaagctggcggatcgcggctacgtgctggaaaacggccatgtagtgctttccgatactggtgatgcgctgctggcgaatgaagcgtcggagagaaaattatggctggagatgttatctcccccaaaagacgactctaaggatccccaggcaaaactgtttatcaccgcagcaaccgaaggtcggggaatggatgccctgcgcgagcatctgcttcagttgccggaacgcgagcacgccagccaacatagtttccgcctcgcgattgaccgcgcatttaccgtaaaaggtgccgggctggtcgtcaccggtacggcgttaagcggggaagtgaag

SEQ ID NO: 155072 - DNA, 1608 bp, Homo sapiens
cccatgtatcttttcctgtgtcctccactggcccttgtccagtgcgccctgaaggacccacgcagcaagtactcactaggaggacgaacaaccctgattataactttacagggctcaggaaagaaaaacaacatccctcatccatcttctctttcagaaagggtcatgacagccaaggatggctttgtaagcagatgccatctgctgatgcagccgaagcagcagaaatggtccctgatgtatcccatggaaggagaggtgctggagaatggttgctggcccactctacaggacagcttgctatgcacagcgctggtggacaagctcttggtgtttctgggcaggtgtttctgcacagcagttgaggtggtgatgctggtgacatgcaggacagcagctgctgtttctgcttttctcatcgtgggcagggttagcagccccgtgtgcagagccgtgagcgtgcagccctggactctgaccgctgaccacactcccggcagatactgcctcaagctcgtctgccggcagctctgcttgtgtccatcgagcacaccactgacagaagtcttctgtagtaaagaagccttctttatcatcctagattgtagcaatctgccccatgccctgttacctgtggactcacccaagggcttgagtaaatgcagcaatccaagagagaaagcaaggaggaagctgcagggccattaccacgtggcctctgaagtcagctttgtgccagttagaaggttccccaagggtgaaattggtgccaaccaacccggcacgcacaggaagttttaccaccttactcactatcgccaaaacttgaagcagccagatgtccctcacgggcgaattgtgtttgatgataaagacattaccgactggcagacagcgaaaatcatgcgcgaagcggtggcgattgtcccggaagggcgtcgcgtcttctcgcggatgacggtggaagagaacctggcgatgggcggtttttttgctgaacgcgaccagttccaggagcgcataaagtgggtgtatgagctgtttccacgtctgcatgagcgccgtattcagcgggcgggcaccatgtccggcggtgaacagcagatgctggcgattggtcgtgcgctgatgagcaacccgcgtttgctactgcttgatgagccatcgctcggtcttgcgccgattatcatccagcaaattttcgacaccatcgagcagctgcgcgagcaggggatgactatctttctcgtcgagcagaacgccaaccaggcgctaaagctggcggatcgcggctacgtgctggaaaacggccatgtagtgctttccgatactggtgatgcgctgctggcgaatgaagcggtgagaaggggcgatgaactgaccgaggaccggtcccgttcgctggacggggaactgatccgatctttaccctgtggtgcctcctatggcgggctgtccctccggccgtggagccggggccatattccccagtcccatcaatcatcagagtcagtcagagtcatgttcataaacaccagtaagggtgcatccatcatcagcagttcagcaacaatgccaggcccattgccaaagcatttgggcccatag

SEQ ID NO: 155073 - DNA, 831 bp, Homo sapiens
  misc_feature (1)...(831): n = a,t,c or g
tggtcgaggtcggacggtatcgataagtttttttttttttttttaattatctgctgcttgtgatcggttgctagtggaggaagaagcgaatgcgcaggtacgttgagactttgccagcccaggaggagggaagttccttggacaaaacttaggagaaacatttggtttggaaatcttaaaagatctttaggagaaaaacgtttgagtgttttctccctggagccaggatttaacagaacagagaacgatagaaccgtagtgcttgttcattttaccacctcattctttatgtggacgtttgatttaatgtgggagggaaaggcaactctggtttgaggtgtattccactcctgtgtctgcttttcaggctgaagcgcaaaagaagaaagatgaggcagaggtccaagtaaaccgctagcttgttgcaccgtggaggcccacaggagcagaaaacatggaaatgccagacgctgggggatgctgggtacaagttgtgggactgcatgctactgtctagaagcttgtctcaatggatctagaacttcatcgccctntgatcgccgatcacctctgagacccaccttgctcataaacaaaatgcccatgttggtcctctgccctggacctgtgacattctggactatttctgtgtttatttgtggcccgagtgtacaaccatattataaatcacctcttccgctgttttagctgaagaattaaatcaaaaaaaaaaaaaaaaaaaaaaaactttatcngattaccggccnaccctccatgaatgantgaatggtccnacccccggggaaatttcccgggaccccggtncccctg

SEQ ID NO: 155074 - DNA, 664 bp, Homo sapiens
gcacgaggcgccattttttggggtgagtgttttttggttcctgcgttgggattccgtgtacaatccatagacatctgacctcggcacttagcatcatcacagcaaactaactgtaaccctttctcctcctttcccctgtaaaaaacctctgccgcccatgaaagccaagctagtggaggaaagaaagcgaaatgcgcgaggctgaagcgccaaaagaagaaagatgaggcagaggtcccaagtaaacccgcctagctttgttgcacccgtggaggccacacaggagcacgaaacatggaatgcccagacgctggggatgcttggtacaagttgtgggactgcatgctactgtctagagcttgtctcaatgggatctagaacttcatccgccctctgatcgccgatcacctctgagacccacctttgctcataaccaaaactgcccatgttgggtcctcttgccctgaacctgtggacattctggactatttccgtgtttaatttgtgggccaattttaacaaccctataattaaatcacctctttccgcttgttttagctgaagaattaaagcagagagagagaaaaagagaaaagtgtggcccgatataggccgttttcaagcggccgcagtttaagagtacaaacaacacggaataccgacg

SEQ ID NO: 155075 - DNA, 497 bp, Homo sapiens
ccctgtctctaaaaaatagtgaagtccaagatgtattaagcaaaaaaaaagtaaatcacagaactaaaaatatagtgtgatatatttttagtttatacctaattgtttcactttatatattttccacagtgtttgaattttttgccaatgagcaattattacttttgtaattaaaaagtcataacaatgagaagagagcctgatatcttttaaaaattagggcctcctgatgaagctgcacctgaaatggctcttcagagtctccgctttgtacatcctggaatccattttcttcacctagaggtgaccagatttataaaaactgactgattgaccaaactgaccaaagactgatttataagatgtcaatgttttgatttacactgtgatattgaaagaggctctgtggcttatgtctgtaatctcagcgctttgtgatgctgaggcaggagaattgcttgaggccaagagtttgagaccagcctgggtaacaaagt

SEQ ID NO: 155076 - DNA, 909 bp, Homo sapiens
  misc_feature (1)...(909): n = a,t,c or g
tttttttttttcatttttaaaaacttttttgactttttttttttttccttaatctcaaaaggcggggggcgtcggcgggcagaggcaggtagcagcaacagctagtagcaaagatgcttctctctctctcctgggcccggcaggctggggggcactgcaaacgggggctccggcccggccacctccccggcccccgggcgcccccgcctgaagccccccaaccccagcctggacctcactcccgttctcttgcacacacgcacacacgcgtccacgcaacttcaccatgagaatggaaataacaatttcgcattgtttttcttttttttttttttctctttttttttttgtaccaggccagttaaaaaaaaaacccccccaaaaaaggaaacacaaaaaacccccaaacaaccaaaccaaaaaagctttgagctgtgtcctttcatattggagtcaacacgaccctcctcaaatatcattttttttttgtttgtttgtttcctgaaacgcgaagaattccaccagttatctttggcaacacttttatcacgaccttaattttaaagaataaaaaataaaatcgattcacgtctatatacagtatgtgattgcgcggagtctggggagggcggggctgggctgggggggtcccggctctgggcccatgcagaggctgtggcccccagggacggcgcgggtagttaaggcaaagtggggcgggcaggacaggcgaagctgaggtgcgggantaagggaacgagggtttagtgcaatccccgaggtctgtgtaagtgtcgcggtgggccgcagcccttgttcctacggaagtcccagagggctccaccccccaagtccggtcgcctccactggctaggacgacagctgtgattttagagttggttttattgc

SEQ ID NO: 155077 - DNA, 401 bp, Homo sapiens
acatatgtataaccctcagttttcaaagtgaattaacatcccacgtgaagttcatcttgacaccgcaaggaccagactgacattctaaatgcaataaaccaataatccagttccttctacacctacacccgccctaatgcctaccctgaaccttgctctttctataaaaggaaaaaaacaaagcgacgttcttattgctccaaacatcatccttgcacaccaaactagacggcctccattctcgaaacgttgaagacattcttcctcacctgtatattttcacaaatattcaaataatcaatagcacaagaattgtcaaatttaccaagtttctagtttttgcaatctcataaccgaaacaggcaaacctttacctcagagtaaaggctcggacgcgtggg

SEQ ID NO: 155078 - DNA, 1401 bp, Homo sapiens; identical to SEQ ID NO: 123530

SEQ ID NO: 155079 - DNA, 1152 bp, Homo sapiens; identical to SEQ ID NO: 123531

SEQ ID NO: 155080 - DNA, 402 bp, Homo sapiens
tccgtgcctccaagatgacaaagattagaaggaacaatggtcgtgccaaaaagggccgcggccacgtgcagcctattcgctgcactaactgtgcccgatgcgtgcccaaggacaaggccattaagaaattcgtcattcgaaacatagtggaggccgcagcagtcagggacatttctgaagcgagcgtcttcgatggtaagtgggtcaccggcgcgaactgtgtgaggatcccagtatcttaaagccttcgcccaacttcgcccttttggaggctctgtttcgttggagcctctcaggcaatttccacgtatttaaggttgttactggtagaagagaattctcttgtttgccgttttgattcttttctgggcagagggtgactttgtgatagagtgcacagcg

SEQ ID NO: 155081 - DNA, 918 bp, Homo sapiens
  misc_feature (1)...(918): n = a,t,c or g
acataacctcgattttcttccgccatccggctaaatagtcccatgtgcactttgttccatggataaataaacactaggaacgcatttccaccctagatttcagcagaaatgctgaattgtaaaggaatatttgagtaaagtgagttgccgttcttgaagcccgtctcctaaggattctcccggtgtccgcgtagggatctcatgctatataggagggccctgccaggcaccgtctcctctctccggtccgtgcctccaagatgacaaagaaaagaaggaacaatggtcgtgcccaaaaagggccgcgcgccacgtcagggggnngccncccttaaaatttttnccccngggnccntgccacctaactgtgcccgatgcgtgccccaagggacaaggccattaagaaattccgtcattccgaaacatagtgggaggccgcagcagttcagggacctttctgaagcgagcgtcttcgatgcctatbtbbcttcccaagctggtatgtgaagctacatttactgtgtgagttgtgcaattcacaagcaaaagtagtcaggaaatcgatcttcgtgaagcccggcaaagacccgaacacccccaccccgatttaagacctgcggggtgctggccccacggtccccccaccaaaagcccatgatctgggtccagaatactgcagacatcagacatgtgttaactgggtttgctgccggcaagccaccatccttgggaaggagttgtgtgggcaaatcaggaagttgccctctcagcagatgtctccaggatggctgccctcaggttattcctgttggttgtataaatataagacagaagccaccactgctttgcaatcacgtggggaagtgtatcatccgctccaagctctgtggagcagacctcctggccgggatccactga

SEQ ID NO: 155082 - DNA, 1170 bp, Homo sapiens
tgaagctgcagtagcttggttaaacaaaaacaaaaaaaaaactgagagaaaacctatcagaaggactaaaagtacgccttgcttcagggttggctcaggtggtgaacttcatgctgggcatctatgcagagccaccttttggattgcatggttggactgagatctattgggagaaattatatatgtatatatatttatacaacttatgtatacatatatatatgtatacacacagacacacacacacaccaccaacaaccaccactacaccacacatgcttataacaggcactagaataaagagggacaacaaaatacacagccagagcagcaagccttagcaattaagaatatacaatatgccggaattggggttctgtgcctcctagcctaggaaacttaaaagaaatatccttttgacacaaaacacaaaatgttttccaaaacaattgacataatgatacattacgcctttgcagtgagctaataataagctaacctttgtgcacaaataacattatatatattatatatctattctgcataggtattttgactttgtgcaggacagaaagttgtgtagggtatgactgttctacttttcagttttctttttttttaatatattttattttctctagaaattacctcaaacaaaagccagcccttcctatccttgcccttgtccttaatgcctttaaaataacccaaacgggagatcctaacctccccaaacgggtccattatattattaaatacccaaccttgggttaccagtaaagtgccctttacctttagcctgatggttctggtaacccttgtgcctttttaaagcacatttttaatgtttggtgcaaaagttgtcccagtgtctcttgttcccttcactagagaacatgccttagaggtatgtttgtaggtatttttgtttagaagaactatttcatgcgctccattttatttattataataggtaaaaagaaaaaaaaaggttgtaattcatcacccatgtaaacatgctcatgaagttgaaagtaattaaaatttgatacactgatatcaatttatttatgtaactaaatcactgttttataaaccttgtaaatgatccaacaatttttgttttgattaaacactagttttttgaaagttgaaaaaaaaaaaaaaaaa

SEQ ID NO: 155083 - DNA, 393 bp, Homo sapiens
tcaacttatgggagcagatctctgcagaataaaaatgaaaaagcatctgacgaccttcttggtgattttgtggctttatttttatagggggaatggcagataccaaccggagctcagtcctcagcccctgatcatcctggagggaaagaactgctctcttcggtgcatttataccgcgagccccttcaccagcttatggcggtataaccacgatactggaagaggccctgtttccctgacaatcatgactttcagtgagaacacaaagcctaacggaagatatactgcaactctggatgcggacaccaagcaaagctctctgcacataacagcctaccagctcatcgattcagcctcctacatctgtgtggtgagcgcactgtgctccacagg

SEQ ID NO: 155084 - DNA, 1178 bp, Homo sapiens
  misc_feature (1)...(1178): n = a,t,c or g
tagtaagaaaacaaacattctggctcactagagttcagaaaagtaataatttgagccaaaggaatttgaattaagaaaatagaaactaggtttcatgtatttaaaaaataggagagtgaatagggacgtcagaatgccatgaagttatcttcctcttccttatatcccctaagtttgggttgcaaataacttgccaattcctaataacctgaattatgttgaaatagtgttttcagggaaatgatgaatgtttgaatgtttgtgtggtaatcaacataacaatgctaacaaaattcccacttagattttttaacttttaaaagtcagcgtggttttgataatttgatattgtaaatgcccacacatacacacacacacacacacacacacacacacaagcacatgttaattaaactgatagggtggggtgaggcaaattgttttcagggaagatggcacattttagaaaagacttgnccccagatgatccttcccatattgctccccccaatgtcatttatcgctcatgcccaatcctcctcttgttacctgtggcctatggtaaaattcctttaacaagcttcattgtgtcccaagtatttcagagacttttaaaagctgggcatgacatagcgttttgtgctgttaagaccttagcagagtcaggtagtttacggggtaatattcaaccttgtgcatctgaatctgtcatggattcccttcactcagcactttgccactaatttgtattacactctgtgggccatataatacttgcacattatgcaaaaaaaaatgttgatagtatctccttgccacacaatatgcagagttgacaaccttttgaaaaccagggtaactaatatgtatgtcccagttgtgtgggcgttgggtaacaaagtctgtacatattatgtataaaatgtgtattggttagcatttagtactaagaaattctgagtttaaaataagtgatttttttcaaagtagcgatatctatatctgtgtttatctaaaaatactggcttgaatagaaaacattctcagatgattcaagattgagtaaaaatgagaatcccatacattccattattaaattctgccctattcccaattgttagcatctggctgatattaaggtctttgattgtcacaatattctcaataaatgagacatt

SEQ ID NO: 155085 - DNA, 1170 bp, Homo sapiens
tttcgtcccaagttggaggtaggggcctgtggaaacatgaagagggtaaacagctgtgtgaagagtgatgagcatgtcctggaggagctggaaacagaaggggagaggcagctgaaaagcctccttcagcatcaacttgatacttctgtctccattgaggaatgtatgtctaagaaagagagctttgctcctggtactatgtacaagccctttgggaaggaagcagctgggactatgactttgtcccaattccagacactgcatgagaaggaccaggaaactgcttctctcagggaattagggcttaatgaaacagaaatcttgatctggaagagccatgtttctggtgaaaagaagacaaaactgagggcaactcctgaagcaatacagaaccgtcttcaagatattgaagaaaggatctcggagcgtcagcgcattctttgcctgccacagagatttgcaaagagcaaacagctgacccggcgagaaatggaaatagaaaagtctttatttcagggagctgatcgtcactccttccttaaggctctttattaccaagatgaaccccaaaagaagaacaaaggtgatcccatgaacaacctggaaagtttttaccaagagatgataatgaaaaaacgtcttgaagagtttcaacttatgagaggtattatacctgaagaaccttagccctcgggtgactgaaagagatcttgtgtcattgttcgctcggttccaggagaaaaaaggacctccaattcaattccgaatgatgactggacgaatgaggggccaggcttttatcacctttcccaataaggagatagcatggcaagcattgcatctagtaaatggatacaaactacatgggaaaatattggtgatagagtttggaaagaacaaaaagcaacggtcaaatctccaagcgacttctctcatatcatgtgctacaggtagcactacagaaattagtggtagctagaatatatataaattgtgggtcctggatggtctttcttgaattggaatcttggatctaggatttatgtatagacaccagtttgtttggagttgaagaggaaaaactaactgagggaggggaaaaaagtaatttcagcttttggagagaactggtagaaaacattttctattatataattgaagactatatag

SEQ ID NO: 155086 - DNA, 1925 bp, Homo sapiens
  misc_feature (1)...(1925): n = a,t,c or g
attttggctcagttctttattttatagttagcaaatgaaattagaaadctgctttggcacaggtcaaaggtggctcccatatactcactagttttcctcaggattatcaatactcattatcaaaatgtacttttgcttggttacccattaaagttsccckccaatgtaaatgacaggggttaagggtgggtatgggtgntgggggaacctgcggcatacacacaattttttaaatcttttagatgtaatgcaattaacccatatcctaatattccttttaggaaaacacaagaaacacaaaacatgcctccaaagatcaagaaatcgagttatacttttccataagggcaccacccatttaccctggataaattgtaaataaatatgtaagggaataatcaatagggagtcttgaggttttacaagacattcctgtttagaccacttggagtactgcaaaagaaaaaacaaacaagatacagctttcataacccatcatatccttgcccagtgcacatcatttgttgcatagtggtgactggatatgatccaggccaagacaagaccaaaattcaaaaaatacattaacagccattcttcctcatactacagtaggagataccacttgggacattcatatccaaagaagtaatggtatgacttaaaaaaaaaaggaggaatttcaaaaggagtacttaaggacctgctataaaagcaaccttctacacacatatggagctaattcacatgtgaagctttattaaatctggttatatgtgggacttcaacagctcaatttttccacaatttccacttttcaaatcccatgccaaactgtcactttttcccttaaaaagtggataaacccatcttttgaaagacaggtcttctcagtttttctgttcatcctcctactgtaagtactggctgatattcacacacatgtactacagaattaaaatactgacaagcaagtagtttcttggcgtgcacgaattgcatccagaacccaaaaattaagaaattcaaaaagacattttgtgggccacctgctagcacagaagccgcagaagcaaagcccaggcagaacccatgctaaccttaacagcttcagcctgcaacagaaagcgcaagaagcaaagccccaggcagaaccatgcttaaccttaacagctcagcctgcacagaaagcgcagaagcaaagccccaggcagaaccatgctaaccttacagctcagcctgcagagaagcacagaagcaaagcccaggcagaacccatgcctaaccttaacagcttaagcctctgtccctttaaaaaaagagagagacagacagacacatggggtcttcgcttgttgacccaggcgggactcaaactcacaggttgaagcaatcttcccacttcagcctcctgaccacaggtgcactctacttcacctggctgccatgttttttattattaaagtacattatgggtaatcacaggtttaatgtttgccgtttccattattcaaggtatgacatgcaataatttataattttactgaggcacaaatttgaatcatgcaggcaaagctggtgtgcagcagcttaatgaggaagtcatgcatctacacatcaacatggctttgctgcagtacctatcaggaagcaaaataaacatctgtggaagaaaaatctcctgtcttctcccccagctagaaagctaactactggtgctgtatttgtacttttaaacttggggatctgcatagttctaatgacttagcttttaagaataccacaggcctaccatatttccatttttctttctataacctttgccagagttaaaatactaatgatgaagaattgcaacttcagttgcagtttagaggagataagggtagaaagacattttaaatcatgtcttaatacaaaatatt

SEQ ID NO: 155087 - DNA, 996 bp, Homo sapiens
attttctgctttgctttattcaagcccaatgctttatcagcacagccagccaaaaatttacaacccatacacagactatgtaaacctttagttgcacatacagtaagaccagcaggtacacactatacacatttttaattaaaaaaatgactaaccactgattttgtcaccacacttaacaacgacctgatatggcacagagtgatgtgtaccaaacatggaaataccaacttgggcgacggtttgaatcttgttaacttcagtgcaacccacaccccccaaatgcatgtaaagtttgcacacatggttttttcaaggccagcctgtctttgtttccctctcctctgcatttacccaagatcttggctctgagacagaaaactcccactctcaattggttcattccgtcctatgcaattaagcaacaccacaatccagtaaatgcaatggctcaattatttatcttctggccgactttaccaggtatttggaaaaggacaatgtcaagaggtttatttctctctctagagctggcttgacgggttgatggggattttattttgtctttttttctcttttttacaaggcggggacgtggggggagcataatttaacctagaaaaagatgcgagggaatttagaaagagtaccggtctgtcaatttccctacaggaaacttgattcttatgcaataaagcctacccacgaccagccagcccgtaaggctgcaggcgacagacacacctattcctgcctccaaaagggcacagctgtctcctgaaggagcgggaacagggcaagcggaggaagtggctcagcgggagccgccgaccgggcggggaggaggcgctttccgaccccccactcgcgccggtgatccccgtcggcgtgacagtcgctccggtggccggaacgtccccagggccccagggagcaggaaatcgggggactgtccctcactcctgccgccgcaaccgagtgcgccctcgccccacg

SEQ ID NO: 155088 - DNA, 461 bp, Homo sapiens; identical to SEQ ID NO: 146210

SEQ ID NO: 155089 - DNA, 4338 bp, Homo sapiens
catggctacctgggccctcctgctccttgcagccatgctcctgggcaacccaggtaaggccttcccctcgggatcgatcctgatggcccacccagcctcgcactctcaggctggctgaacctggagcttggactctgtgggcacccaggtgcccctgcctccccccggccttctcccccgtcatggaggcctggccctcccctcagagccaggcttagtccggtgtgctgcccagcctgtcactggcctggccaaggaggagagacaggccagggattctggtcctaactctactggccacactgtgtggcctgagacccccctttccctcccaagcccctgcctccgcatctgcgtggtgaaggccattggccctcatcggtggatctgcggttcctcgggcctacactgtctaggattgtgcggggctggtgagagaacaagatctcttccgtgttcaaggcagacttcctgccccctgcaccctgctctctcccaggccttgaggtcagtgtgagccccaagggcaagaacacttctggaagggagagtggatttggctgggccatctggatggaaggtaaaaaaagaaaatcccttgaaaggagattgagggaagtttctagacaaaccgacccccaaatctgtgttgctgggggaacagaggagaagagagagtctcgccctcctggctttctagaaggaacgtgagaacacgtgtttgtgctgagagtgggtcagagcggctccagggcaaagcatgtggacaggtatcctggccccctgcaaggcccagctcctgtcctaggccctggtcacctcctggactcccaccagccaggagaacgggctttccctctccttccgcctgcggaggggaagctgaagtctggtcttcctcaggtctggtcttctctcgtctgagccctgagtactacgacctggcaagagcccacctgcgtgatgaggagaaatcctgcccgtgcctggcccaggagggcccccaggtacgtgttggctctctgctcacctgccacagtccctctcctttccctcctccctggtggctcctggggtgaggtctggagctctctaatggtcaggaggtgggagtggaggctgggctgtttctgacgatgctggttttgttgaattcatgtctggccaggagggctacaggtatctggcagactcctccaggaggatcctctggggtctcaccctccaaggagcctggggctgcagaacccaaataggcagactcccctgggagttcctcaataggagaggggcaagtgcagggctgggaaagtactggggttgtgggaggctgtttctggggtgtctcagagcctctaagacaagcaaaagggtgggtaggggccaggcagccagttcaggccttcagtgtatccacgctctgggaagagatcacggacattcctgccggcctcagaaacacaaagggcccctttcctgggcactttcacgcgctcccagagtgtctgagagaccatcataagggctttctttcctgacagggtgacctgttgaccaaaacacaggagctgggccgtgactacaggacctgtctgacgatagtccaaaaactgaagaagatggtggataagcccacccaggtgaggccaaggggctacagagcctcctgtctgctgctcaatggaggggccagcctgtgaccaggtcggggatcggggagcccgggggcaccttgcacagtgatcctgggggagggcttcctagaagggaatctgtgagtccccgtgtgtctgtggatgaatttcagagaacttgtgaaattgtgactctctggaactgtgtaagtcagacggcagagtatacatggttttcatcatgtatcctcaaagagggcttgtcccagagaagttaggaatcttcccctaaagccctaacatttgtgtccaaggcagagtttgagaagctagttccccaagaggcctgggtcaggactgataaatcccagatctgctacttccaagctgcatggccttgggcaagtcacttccactttctgagcccctgttatcttatctttgaaatgtgatggataatagtccctatcttgcaagttgtcaaacccttttttttttttttccttgagataggatcttactctgagacccaggctggagtgcactggtgtgatcttggctcactgcaacctctgcctccctggcccaagcaattctcctgtctaagcctcctgagtacctggggctccaggtgtgcgccaccatgcccagctaatttttgtacttttgtagaaacagggtctcactgtgttgcccaggctggtctccaacttctgagctgaagcaatccacctgccttggcctcccaaagtgtgggattataggcatgagccactgcacctggctgctgaagctttttaaaagagctgagggctgggatgtgcttagctccacgtccagcactgagtaaatgcttaacgaatgactgtgttactaccaagaattattgtttcactctccctccttccctctcctctgctgccccaaactactcagcatcctggcactgcaggctcgcacttagccctggatacccagattcatcctcctcccctgggatggcatagaagagactttaaaaccaaatgagccaagactccaagctctgaccacacctcccacccccaccagtcttctctatgcaccccctctatatctggagcccccagccaggttctggaccaaggtagctacatggcagagcatttaatgtgtgcctggcagccatgggcaccattctccacacagaaggcagggacaggtgcacaaggggctgagaccccagcagggctaactgtccttgtctcaggagccctacctggccagtcttgggccaggccttggggactgggagtaggggctgacccgtctgtacagtctctggccccatggcaccaggtgccagctcctcgcacccagtactcccattgctagggctgctggaacctgcagggttggcagagctgggcaggactcaccctataaccatgtccactgtggtgctgctgctgcagagaagtgtttccaatgctgcgacccgggtgtgtaggacggggaggtcacgatggcgcgacgtctgcagaaatttcatgaggaggtatcagtctagagttatccagggcctcgtggccggagaaactgcccagcagatctgtgaggacctcaggttgtgtataccttctacaggtgagtgcagaggtgacagcagggatacctcctgagggttggagacagcttcccccaggatatatcaaagctgcctccttactcccccatctcccagcatgggaaagtgtggagaattgagcagatggactttagctagaaatgtttgagaaatactgattagagcttgggcttcagacacaggtggttgtggagtaaaatctggtctccatctctccctggctgtgtgaccttaagcaaataacttgacctctctgagcttcagtttcttcatctgtgaaggagagatagcaatcctgatttttgagattggaatgagaattgaaggaggtcaccgtgtgtgtggacctgaccctggggaaatgtcctcagactgaggctattcaaggtcatcagaccctcagtcaaactccaacccagcccagcacatggcccctggggtcgggagctggggccatatcctcccccacaatcctgggccctgagatctgggctagggaacccttcaggcaggggagcatgaggcctttccctccatggctgcccaggctgtgctgagagaacagatctcggctgtaggaaacggggccagaaaggggcctcggtgattggctctggcagctcagctggcacttgccaatagctctgggattttatgctggcagatcgggggtccccaccatttcctgtcattggagcttgtggcttttctattcaaggccccacagcctgctcaggctgccgactggcttccaggatgtgcctctgggtgtgttcagtagggtcaggtggctctgggaccttaagcaagtaacattctgagtgcctgcttctccttgaggacccaccacatctgcccacagctagctgttctctccgctccaggtcccctctgagccctctcaccttgtcctgtggaagaagcacaggctcctgtcctcagatcccgggaacctcagcaacctctgccggctcctcgcttcctcgatccagaatccactctccagtctccctcccctgactccctctgctgtcctcccgctctcacgagaataaagtgtcaagcaagattttaaaa

SEQ ID NO: 155090 - DNA, 438 bp, Homo sapiens
ctgaggagctgctgcgagggtccgcttcgtctttcgagagtgactcccgcggtcccaaggctttccagagcgaacctgtgcggctgcaggcaccggcgtgttgagtttccggcgttccgaaggactgagctcttgtcgcggatcccgtccgccgttttcagcccccagtctcatagcggagcccactgagcagggcaccggcatggccaaagccggggagatcggcatcgacctgggcaccacctactcctgcgtgggggagagccatcccggtaatgaaaaaatcatccgtttttaccaaataaacctttctttttaaatctacgtgttcttataaacaccatacggtttatttgtcatgtctctataatctaaatacagctttgtttttataacatcatcttgtttcttgaatattcttagcgtttttattccaac

SEQ ID NO: 155091 - DNA, 1870 bp, Homo sapiens
tttcgtcttggcgggaaggcgccggccgctaagaagccgaaagatgtccaggtcgggcgcggcggctgagaaggcggactccagacagcgaccccagatgaaggtaaatgaatataaagaaaatcaaaacatcgcttatgtgtctctgagaccagcacagactacagttttaataaaaacagctaaggtctatcttgcccccttttcactcagtaattaccagctagaccagcttatgtgccccaaatccctatcagaaaagaattctaacaatgaagtggcgtgtaagaagactaaaataaagaaaacttgcagaaggattatacctccaaagatgaaaaacacatcttccaaggcagaatccacgctgcaaaattcatcctcagctgttcatactggaaagaacaagctacaacccaagagaacggcagatgcgatgaatctcagtgttgatgtggaaagtagtcaggatggagacagtgatgaagataccacaccatccctgaatcccagctccacacccccctccccccccaacccaggtgagatttcaatggaaaaagtgaaggtaaagcgttatgtgtccggaaaaaggccagactatgcccctatggagtcctcagatgaggaggatgaagaatttcagttcattaagaaagccaaagaacaagaagcagagcctgaggaacaggaggaggattcatccagtgacccccggctacggcgtttacagaaccgtattagtgaagatgtggaagagagtaggaatggggttcaccatgttggcggtaaccagcgtgagctcgcccgccagaagaatatgaaaaagcagagcgactcggttaagggaaagcgccgagatgacgggctttctgctgccgcccgcaagcagaggtagccccagggaggggagggaaagggacggtggagacctgggttagaccaagggttatagaaggaaagagagctacctcagggcttgaatgcggactagtcgtgaggagcacagtgcattgcttcctctagggatttattttctgcccaccctccaaattggtagctcacagccttacaggaaaggacgggggcgggcgcctgccctcagtctgatttctgagcgtccctgggcctgaccttatgggcaagggcagggagcttcacatttcatatacaggtgtggttaccgtttcccactacttttggccctccttgctgatcgggtctcctcccttctcccaacctcctcactggtgttgctgggtgtgggcctcaatacagaatatagacccttgggcctgtgtcaccagacttctgaccccttgggcaacagccagatggagactggacgcctttagagcctcagctctcttcctcttgttctcctagggtgggagtacagcacccaaacgctgaacttagtcccatccacttccatcttatcctttgtgcccttcatccccctgcatcgtgtgctttttgccctctgccacctcccagtgccccatcatatctacccccaagggactcggagatcatgcagcagaagcagaaaaaggcaaacgagaagaaggaggaacccaagtagctttgtggcttcgtgtccaaccctcttgcccttcgcctgtgtgcctggagccagtcccaccacgctcgcgtttcctcctgtagtgctcacaggtcccagcaccgatggcattccctttgccctgagtctgcagcgggtcccttttgtgcttctttccctttcaggtagcctctctccccctgggccactccccggaggtgagggggataccaccttaccagtgtagatgattcctgaggggctcaccccgaagtcttaaaagtagcttcggaattaaagtctaac

SEQ ID NO: 155092 - DNA, 438 bp, Homo sapiens
caggggtcggctgcctcccgcctgtgcctttctggggcccaaggccccgttccctgggaatgggtgaggggccaggccttcccgaccatcctgctttccccagcttccagaccctctcccctcttctgtgtttctcctctgggtctttgtcacatccagccgctgcctacttgctgggcacagctcgcctgacccccagctctgtgctgtcccacaaagaacccaaggctctcctgctcaacctgaccttggccggaggcttatttctccttctctgcttctgccccacagccctctccctcaaggccctctccctcaaggccctctccctcaaagcccttgctgcttcaagccttgggaattcatggccaagcacagaccacatcttcccagagcagatgtggcacagactcggggtggggaaaaagaagaagcaag

SEQ ID NO: 155093 - DNA, 498 bp, Homo sapiens
gccagtggagataacttcctcaccaccaagaaagatttgaagaatggggaagacgtggcaacgtgtcctagctgctctctcattataaaagtgatttatgacaaagatcagtttgtgtgtggagaaacagtcccagccccttcagccaacaaagaattagttaaatgctgaagaagccttcaggaatccaaatcctgaacatttggaatgagcccagatagaaatatcgaatgcaaagctactggcttcacagagacaaccatttatgatttgctgttctgtaagagtgtggattctttctatcaactgctgatatcatcttcaggaagcaagtccataacatgacatatctggacttgcttcctgaagatgatttcaaaacagtgctttctttcccttggtttcatcattttcatatcttaaaccaaattacttcggtatctgacaacagcatcatctacctcagtcattaggatttcttaataaaaaagagattgt

SEQ ID NO: 155094 - DNA, 1019 bp, Homo sapiens
aggccggttccggcgaagttaaaccctcggagctggcctcggactgctggggcgttaccccttcggccacccccgctgaccatggcagtgtttcatgacgaggtggaaatcgaggacttccaatatgacgaggactcggagacgtatttctatccctgcccatgtggagataacttctccatcaccaaggaagatttggagaatggggaagacgtggcaacgtgtcctagctgctctctcattataaaagtgatttatgacaaagatcagtttgtgtgtgggagaaacagtcccagcccctttcagccaacaaagaattagtttaaatgcttgaagaagcccttcggggaatcccaaaccctgaacatttggaattgagcccccagataagaaatatccgaatgcaaagcctactggccttccaccagagacaacccatttatgatttgcctgttcctgtaagagtgtgggattcctttcctatcaacctgcctgatatcatccttccgggaaggcaagtcccataacatgacatatcctggattttgtgccttagaaccttaaattggaagcattcttaattatgcatctaaatttaaaaagaagataatttcaaaaacagtgctttctttccccttggttttcatcatttttcatatcttaaacccaaattacttcggtatctgacaacagcatcatctacctcagtcattaggatttcttaataaaaaagagattgtatttttgacttggttattaagattattaaaattagcccttcctttgaaatatgacatcagctttgctgttctaaatttaaaattagttgcttcatcagtaccacatttccagtttctataccaagccagtctcctcagttttcccattagaatggacatgttctgttcagcgtgtcatttctgtaatgcttcatgcagagagtttggtcatagtattaaagagaaaatacagtgaggtcacaatgtctccagagctaaaagttagtgaacaagacagat

SEQ ID NO: 155095 - DNA, 371 bp, Homo sapiens; identical to SEQ ID NO: 147246
  misc_feature (1)...(371): n = a,t,c or g

SEQ ID NO: 155096 - DNA, 5213 bp, Homo sapiens
  misc_feature (1)...(5213): n = a,t,c or g
atggcccgcgggtcgctgggggtcagcccccgggcccccctcgctgcgccccgctttagccagtgtggaatgtggcgtgtctgcgcgttccaaacccgctctcgcctggaatgttgcgtgtgcctgcgttccgagcccgttggttacaccggaagtgatgggcggggacatcgcccacactccccggctgttgccttgatggtccagagcagggtctggcagtggagagtgcccctggtgaccaagaatgtcctacgtttgggcacaggggtcaggggaagaccgtgcacaaggttcggagagattaagtcacctgctgccgccatcaacacgttgcagttcgagtacgcactgtgtttaggccgagttcagcggcctggtcacgacttctgtgtgccggctgagcggggtgtcactgaggatgtcagaggatgctttaggcctgaaggacaggacatgctggcgctgctgctggtgggccgcctgtcctgcccgcagcccggactgtcagcccccgtgactgtcagcccccgtgactgtcctactattccctggtggcggggaacaggtctgcttgatttgttcactgctgtgcccccggcactttcccccgtgcctggctgggctgaggagcaggagcggcttcgcttggagcaggagcgagagcaggaacagaagaaggccaatagcctggccaggctggcacatacccttcctgtggaggaaccccgcatggaggcgccacccctgcctctgtctccaccggctcccccgccggcacccccaccaccacttgccacccctgccccactgactgtcatccctatccctgtggtgaccaactcccctcagcctctacccccacccccacccttgcccgcggcagcccagcctctgcccctggcgcctcgtcagccggccctggttggcgcccccggactcagcattaaggagcctgcccccctgcccagcaggccgcaggtgcccacccctgctcccctactgccggactcgaaggccaccattccacccaatggcagccccaagcctttgcagcccctccccacgcctgtcctgaccatagcgccacaccctggagtccagcctcagctggccccccagcagccgcccccacccacgctggggaccctgaagttggcaccagctgaagaagtcaaatccagtgaacagaagaagaggcccggggggatcggaaccagagaagtccacaacaaattggagaagaacaggagggcccatctgaaagagtgctttgagaccctgaagcggaacatccccaacgtggatgacaagaagacgtccaatctgagcgtgctgcggacggcgctgcggtacatccagtccctgaagaggaaggagaaggaatatgagcatgaaatggagcggctggcacgtgagaagattgccacgcagcagcggctggcagagctcaagcacgagctgagccagtggatggacgtactggagattgaccgcgtgctgcggcagacgggccagcccgaggatgaccaggcctccacctccaccgcctctgagggtgaggacaacatagacgaggatatggaggaggaccgggcgggcctgggcccacctaagctgagccatcgtccccagccggagctgctgaagtccaccctgccaccccccagcaccacccctgcgcctctgcctccacacccacaccctcacccccactccgtggccctacctcctgcccacctccccgtgcagcagcagcagccacagcagaagacccctctgccagcccctcctcccccaccggctgcccctgcccagacactggtgccagctccagcccatctggtggcgacggctgggggtggctccacggtcatcgcccacacagccaccactcacgcttcagtcatccagactgtgaaccacgttctgcaggggccaggcggcaagcacatcgcccacatcgccccctcggcccccagccctgcggtgcaactggcgcctgccacaccccccattgggcacatcactgtgcaccctgccaccctcaaccatgtggcccacctgggctcccagctgcccttgtacccgcagcccgtggcagtgagccacatcgcccacaccctctcgcaccagcaagtcaacggcacggccggcctggggcccccggctactgtcatggcaaagccggccgtgggggctcaggtggtgcaccacccccagctggtgggccagaccgtgctcaaccctgtgaccatggtcaccatgccctccttcccagtcagcacactcaagctggcttgaggacgaggccactcagaggcccccagtggggacagggagggggacctgtcccccactctctcacccaccagctccacacattccagccaggcccaggccagcccccccacccacccccaggcctcctaggggaagggggtgcaaagactctgagccaagggagggaagggccaccctgctgcactaggacttggtaagatgactctgagaaaatgcgagactctgatggaatgtgccacctgtccggcccagtgccagctccagtgccgctcctgcttcccctccctaccctcggaaatcagtgcgatgtggacgtcacgctccctgacttcttcccccggccctgccccggccttcgtgtgctgctgctgctattgctgtctggtgaaggtggcccaggcccccggctttcctccggagcctcatgttctcttcccaggcctttggaggggaaatggggaaagcagaactgaagccacttggcccagaaagctgcggattggggtgataaggggccttgctctgagcacaggtgacagatcataggaagtggctggtctggagtcccacccggacaggtggggcctcagcctggggctctctgacccggttgcagtcactgtgattcgttaccgtagatactacttaaaatgattctctaccaacaataaaccaaacccagccactgccaagcttcctgtgccctcaccccaatccctgccactgggctcgtggaccgtcaggagggcaggctgaggtggggaaggagggacttggctgtccttccccttccccgtcccctgcagcctgggtctggatgggaggagagccactgggcccctgtccccagtccccaagtccccagccctgggctttggctctttggcttccagaaaggcaagcaaaagaaggggcgctgttcctgcgttcagcccctgatctctgacctctgctgagtgctgggcactgctccaagggacaggtgggcctggcggcctgtgggtttgggtgcctcctgcagtttgggagacatggaccagcatctggtcttgtttccaggagcatagaagccacatcgttgagacatcaggaaggtaaaaacccagcggcttagccaagccctaagcctgtccccagaccaaccctgggacctatacagaacagagggccagagctagggctgctgcttctgctccagcccctttgcctctgtcctcccatcccctcaacaccctgcttctcccggggacgcttttgagtgggccctgcccggggagctgcagagcagcagcacctttctctgagaagaggtccttggttgggtcaaggacagggctgagcgtggaagggggaggagtcaggggctctgtgttaggatgcggctttctctgcctctgggcagcctgctttggcctttccttgtatgtgggtgtttattacaagtggctttgtgtcagacacgctcggctccccacctggacacacactcaccagtggcctttcagtgtagcgggaggaagccggtgtccctggatgtgaagctcacactgatgggctggggcaggggcctgggccggcgagggggccggggggaggggacagagctgaggatttcctggagtgccctgcaggcacagaggaggtcaacaaaggtcttgaatagattttctctggaaataaagaaaccttagatgcctaaaaattcccttcctgttccctcctgggtcctgggacacctcccagggggactgtttccttattttctctctcctgggtgttgggtaaagggacagtttacaaaccagggtcaccatccttcagagggnttgagccctgttaccccaccccagcacagcccaccttccgccagaccccgtggctctgggagagccagcttttgctatttncccattgtgaacagcgatggcaggcctgaccggacggggcagtttagagcagcctcgtgggagctcgcccctcccttcagcctgcccacctctccctgcatcctgagggccagtggcccccgggcctgccacagatacctcatcatccacccgctggccctccccgtccctgtcccccagcatcggggggcctgcaaatctagtgccgaaatctagtgccgaatgactatgtccagattggtgacgatgggtgttgctgtttttcttgtcgtttgtgaacgcatgtgatgctgtgtgcccaagtgggcagtcaccacccaacccttccttgtgcgtctaccccagagtgctgtcgggaccacatctgtcctcaccctgtgggaccgcctggccctccctccgtagccctttccagccttgggacacacacacacacacacacacacacacacacacacacgcaacgcacacggcacacatcttaccttctcatgcggtgttttacctttttgatgttcagagtggctcactggctgggagtccttaccctcggggaggagggggaggttggttccttggggggccaaagaaggccagggaatgccctggaaggtaaatgggggggccacccatgaccccttcttctttccagaaacagctgcttctccccccatcccagggtcccacccccaaacccccagaaggtggcccttgtttacagtgaggactcggccactgtgtctctgtttcctgaaatataaactgtagcgaccccagactgtagagatttttatgtgtttggatacatctgctgtgtggaaaaaaaaaaaaaactacaaaaaccctaattttgtacatactgtatttttactattgaactgtattctagtggctgttcatgctccaagactttagttaccgagacatgaatactatccatgtaataaagcacttgcctggaataaaatataaaactgaaataaacctgcactgaaacctgaa

SEQ ID NO: 155097 - DNA, 651 bp, Homo sapiens
atgcagaaggaagactgtgtcattgttttggtgaagttggcagtagaaggaatggcaccaactcaacaaatccacctctttgtggccattacctttagtgggtggcctaggcaatgcacaggctcatcattcaaggctattgacctctttttggatccagattctgttatgcagcaaatttattctttccactttggtatcatgtgtaattttgacaatcatgccttccagaacttgatggcagtgattgacaatattaagcaggacagggacatggatgaagctggaagtcatcattctcagcaaaccaacacaggaacaggaaatcaaacaccacatgttctcactcataaatgggagttgagcaatgagaacacatggacccagggaggggaacatcatacaccagggccctgggttcttggtctcgctgacttcaagaatgaagtcgtggaccctcacggagtgaagccacagaccttcactgtgagtgttacagctcttaaagatgatgtgtctggaattcattcattcctcctggtgggttcctggtctgccaacttcaggaatgaagccgcagaacctagtgcactattcacaatagcaaagatatggatcaacctaagtattcatcaacagatgaatggataa

SEQ ID NO: 155098 - DNA, 514 bp, Homo sapiens
gaaacacaccaatacacttctaaggacagcatagaccaagatctaggtttcatatggatgaatttattcttccctttgaggcaagacaagaaggaaagaaagtattgggaataatgctgccctcccatcctcaagggccagtgggaactctaatattgattggttttcacagaattccatggactttaactgctgaaccaatgatgcactgattttgtcacttgtaccagctaacgcatctgggaggcaacaaaacaatactctcctgaggttaatgtggaccaaaaactagatttcatataaaagagtttattccttctacttgaggtgagactttaatttgggcatggtgactgtttcccttgctgccacttgactcaatcccaggagcctcagtagaggatataatattacacaagatgctcaaaatggtggaattgctcagtgctcccataaatatacatttataattttcatttgccacacggtaaactgaaaaatacagactatatta

SEQ ID NO: 155099 - DNA, 2516 bp, Homo sapiens
ccaaatcatagatcaagatattttatttatgtatgtcttttaaatgaagagtggttaggatagtcctgattattgcacataaatattgcctttcactagattattgttttgggccaaattttagactattattttaaaaaagagtaccttagtttaatccaacctttccagatatttagaaattattgaaatgtatattttgtgaagatggtcttatgaaagttgttgagctagaaacatgtccttcaccagtggaattcttagaagctttccttgggcttcactgggtgctaatagaccatgatcgtattgctctgtatataatggtacaaattttgttttataacacttagtcttaatagaatgggaatattttatcttactaacgtagtcattagctggccactctctgtgtccattggaccttatagggtaaagggagggcagtgcgtatttgaagcctgtgcacgtgacacacaaagggcttagcaacctccgtgttttcccagcacaggatacccattcttcctgaatgtttcattgttaaattagattgtgtgtgtgtgtgtgtgtgtgtgtgtgtattttatattaacatacagatgtatgtattttagttgcattttttttcttaaaatgttattttttctctttttcttttatgtcaggtgatgatagagcccctagggaagcaaaactgtccatgcccttgccttaactttcagatacgataaaaacaacatttataaaatacctgtcttagaaatattagctaaaattatgttggggaaagtatgtttgaaaatagaattgtaagctaccacattgtgataaatattactaaatttgtttattgacttgtcaggaagcaagagaatgaattaaagaaaactccagagaatgagctgacaacctactccctgggtcagtggctctccatgcctacctgtggtctcttggacacccttgcagaagatgacttcctggggaactcttctgggagtgaatgttatcagcaaattcccaaaacaacaccccttagacaaaaagccctcctcaccctatgcattgcctagacccacccactaaaaggtgatggccacaaaagaggtggatttgttgagttggtgccattccttctacttgccagctttcaccaaaacaatgacacagtcttccttccgcatgggaggactcttctctttccctgtgttggcagtgggatgcctccgtgcagataagaaatgcttaactgagaaatgctcatgttgggatatcatcgatgagactttaatttgggcatggtgactgtttcccttgctgccacttgactcaatcccaggagcctcagtagaggatataatattacacaagatgctcaaaatggtggaattgctcagtgctcccataaatatacatttataattttcatttgccacacggtaaactgaaaaatacagactatattaaaaagaaactgcatgatttttttttcaaaaattcaaagcatatttaaataatatataaattaaatgccctcctctcttccaattctgtccctatagttttcctctattaagtgaactaccatgcattttttagtggatagatgcacacaaaacacacaagccattatggggaaggatccacgtgtgtggccatattgtaacacatttttctgcaaatcacctctttcatttaacagcccttattcaatggcctttttctttttcagtagtacatacacatctgtgtcatttgttgaatgacgacatgaatgttttgtagataaaatataattaaatgttttaagcatttctcactcatagatatttatgttagcaccaaatttctgtgcaatgaaccctcccctatatatcagtaattttgccatttgtcctataatatccataataaattacttatcagttgaattactgggattaagtatgtgcacactttatatttatattttgaaaattattgcaagattgccttcaaaaatgtggttaacaactttatcttcaaatggcaaggaatgagattgccagctttccctacagcctcgacagacaatggattttataaatatttaacatttttgccaatgtgatcacccaaactattgtcttaaattgtatctcttttgtttttgagtttggtcattttttcatgtttattagccatctgtattttttaatttcttctttatgtccaattttgtgggtgggaggaggatttagtcttcttcctgatttcggaagagctcgatttactatttcgggaaataagatttggattgccaaccattatagctattttttacacacttttcaactttgtttttgttataagaatgtgtatgattgttacatgtccaagtataaccatgttcgcttttatggcttctgagtttcatgtcatttttggaaagatatatatattgagtccataaaacccttcacctatgttaaaaaaaacaaaaaacaaaaaagtcttaaccatctaccttcccc

SEQ ID NO: 155100 - DNA, 699 bp, Homo sapiens
  misc_feature (1)...(699): n = a,t,c or g
gttttttaatccagtgtaatgtttgccttttactttgcaaatttagtccacttaggattacttatatatttggaattagttcctccattctatttttttatttctatacatgtcatctgttttatgtaatttttttctcatttattgtgtggtttggttttgggttnnnnnnnnnnnnnnnnnnnnnnnnnnnnaattgaaccaggtgtttttgttttgccttcttgtgtttgtttttctcattcgttgttcccccataattagtttggaggttaacacaccatgtgtccccctcagaattttctcctttttcaaactcgggcaccttatctaaaggtccggggtttcacccagacaaaattgccttcctcccaggctcccagaagctcctataagctctttaatcacttcatatcctcacctcccaccagagactgcaaccatccacagtcactgtccctctgcactgagacccagctccagagcagatggcagcatggtcatcctgtcctgggtggtcctcctaaagccttcccagggagcagacagccagagagcaagcagagtgtctgggctagatgacagcaaggaggggacacctatctttattttcaaaacagatatccccagaggcttttagcataaaagcccacttagaactaactgtgcccccggcctacccatacaccctagagattc

SEQ ID NO: 155101 - DNA, 414 bp, Homo sapiens
  misc_feature (1)...(414): n = a,t,c or g
ctacacacaacccagctgtaccagcatgtgccagagacacgctggccaatcgtgtactcgccgcgctacaacatcaccttcatgggcctggagaagctgcatccctttgatgccggaaaatggggcaaagtgatcaatttcctaaaagaagagaagcttctgtctgacagcatgctggtggaggcgcgggaggcctcggaggaggacctgctggtggtgcacacgaggcgctatcttaatgagctcaagaggaaggtgctgaggccccttcggacccagacaggaggaaccataatggcggggaagctggctgtggagcgaggctgggccatcaacgtggaggccatcangcggaaggtggagctggagtggggcacagaggatgatgagtacctggataaggtggagaggaat

SEQ ID NO: 155102 - DNA, 2202 bp, Homo sapiens
atgggggagaaacttgctcctggtaacatgtttgaaggactggatcaagctgtgcttgaagtccacccttgtactctgggctccggcacatcagagtcagaagccccagatgaaacctctctgggctggcgaggacactggaaggtcaaggccacctggggggacatccccagtgctgccactgtggaaagagtgggcctggggctctccattcatccttcagccttcacaccaaccctactgggggcccctaccaccaggcccattttccagattgagaagctaaggataggagacaaatccctcatgatgcaggctccgggggctcaggcccaggcaatgctcaactcccacgaaaaggccacatattatacaattgcatttatgcgaaacgtccagaataggcacatctatagatccaaaatgtggattaatggcttccagtggatgccgggagggaggaaatgggtaatgactgctaaaaggctacacacaacccagctgtaccagcatgtgccagagacacgctggccaatcgtgtactcgccgcgctacaacatcaccttcatgggcctggagaagctgcatccctttgatgccggaaaatggggcaaagtgatcaatttcctaaaagaagagaagcttctgtctgacagcatgctggtggaggcgcgggaggcctcggaggaggacctgctggtggtgcacacgaggcgctatcttaatgagctcaagtggtcctttgctgttgctaccatcacagaaatcccccccgttatcttcctccccaacttccttgtgcagaggaaggtgctgaggccccttcggacccagacaggaggaaccataatggcggggaagctggctgtggagcgaggctgggccatcaacgtggggggtggcttccaccactgctccagcgaccgtggcgggggcttctgtgcctatgcggacatcacgctcgccatcaagtttctgtttgagcgtgtggagggcatctccagggctaccatcattgatcttgatgcccatcagggcaatgggcatgagcgagacttcatggacgacaagcgtgtgtacatcatggatgtctacaaccgccacatctacccaggggaccgctttgccaagcaggccatcaggcggaaggtggagctggagtggggcacagaggatgatgagtacctggataaggtggagaggaacatcaagaaatccctccaggagcacctgcccgacgtggtggtatacaatgcaggcaccgacatcctcgagggggaccgccttggggggctgtccatcagcccagcgggcatcgtgaagcgggatgagctggtgttccggatggtccgtggccgccgggtgcccatccttatggtgacctcaggcgggtaccagaagcgcacagcccgcatcattgctgactccatacttaatctgtttggcctggggctcattgggcctgagtcacccagcgtctccgcacagaactcagacacaccgctgcttccccctgcagtgccctgacccttgctgccctgcctgtcacgtggccctgcctatccgccccttagtgctttttgttttctaacctcatggggtggtggaggcagccttcagtgagcatggaggggcagggccatccctggctggggcctggagctggcccttcctctacttttccctgctggaagccagaagggcttgaggcctctatgggtgggggcagaaggcagagcctgtgtcccagggggacccacacgaagtcaccagcccataggtccagggaggcaggcagttaactgagaattggagaggacaggctaggtcccaggcacagcgagggccctgggcttggggtgttctggttttgagaacggcagacccaggtcggagtgaggaagcttccacctccatcctgactaggcctgcatcctaactgggcctccctccctccccttggtcatgggatttgctgccctctttgccccagagctgaagagctataggcactggtgtggatggcccaggaggtgctggagctaggtctccaggtgggcctggttcccaggcagcaggtgggaaccctgggcctggatgttaaggggcggtcaggaaggggtacaggtgggttccctcatctggagttccccctcaataaagcaaggtctggacctgcaaaaaaaaaaaaaaaaaaaattg

SEQ ID NO: 155103 - DNA, 1690 bp, Homo sapiens
cccgtcagaccttcctgacctcccacctggttctctaggggcagggtggacaggaagcagctcagcccagcctgggagaggccaagggctgcctcctatcagagagcgcctgctcgctgtgcccccgggttatgacgacccccaataaaggaaacaaggccttgaaggtgaagcgggagccgggtgagaatggcaccagcctgacggatgaggagctggtgaccatgtcggtgcgggagctgaaccagcacctgcggggcctgttcaaggaggagttcgttcagctgaagcagcgccggcgcacgctcaagaaccgcggctacgctgccagctaccgcgttaagcgggtgacacagaagggggagctggagaagcagaaggcggagctgcagcaggaggtggagaagctggcctcaaagaacgccagcataaagctggagctcgacgcgctgcgctccaagtacgaggcgatgcagaccttcgcccggacggtggcccgcagctccgtggcgccagcccggggcccccttgccgccggcctggggcccctcgtcccaggcaaggtggccgccaccagcgtcatcacaatagtaaagtccaagacgcctcgcccgatcgtagggacgcgcgtctgcccaggcagaatactttgcggggccactaggcacatggcgaatttggctgccctgtccctctgtttccttctcttctctttcctccctctcttccccacccttctctcttccctgcaaagcacaacctgtaccccaggggcgccgggctgagcccctttgatcttcgtcattgtcgtcgtgtgttttggtattgttgggattggtcagttcggcggtgacgtggggtcgccccaaccccttttgtaccagggccatgcaggcttggagtccagagttggtgctgtgggaacggactagagagagttgcgggagagagaaggagcaggcacgctgggcctcgccgtgtccccgagcagtgagggtcccagtgttccctccactcccgagtggccacaggctcgcgggctgggaaaggattcactctctttaagccccaggggagcagctcagcttagccccagcatgaagagatgggctctgctctgaaaagtaagggcgggcttgaaggccctgatgggtggacccacccagccttgggcgcagtggtgctgggggcgtgcagctgggcccaggggctgtgcactcagggcctgaccccgtggcactggaaccaggacccaaatccgctggtctgtgccgctttaaacgtgagggtgggtcccagtgtgcccctgcggatgggtccccgtgtcactgtttacatgacctatttgtgtggttatatagccctttatttaaaagaggagaagttcccttttacaaagttattaaattaattatatgtttaaaagttaaagaaaaaagagctgcagagtatttataaaactgtcttttagaaaaaaaacaagcaagaagaccatttgaccatatgaatggaaaagggaagaaagtataatagaaactttgctagttaaaaaaaaaaagaaaaaaaaagaaaaaaaatccctttcttgtaaacttacggacacctctttgtggctgttggagtttagtttttatatacacagagttatcagacattatttataaaacttagtttaaaaaaaaaaaaaaag

SEQ ID NO: 155104 - DNA, 1713 bp, Homo sapiens
cggcacgagggggccccggagatggcgcctccaccgggatgagctagccagcctgggcaataccagaggcggccctcggcgcgcgcaggggaccgagctggtcgccccaaccgggtttgatttctgatgactctggcctgagttccaggatggttttttcttgggaccagacatgaacaaaagttgacctcatgagcacttcaacctctccagctgccatgctcctccggaggctgcggcgactctcctggggcagcactgctgtccagctcttcatcctaacagaggagacgtttggcctgctgggccccctgggctggcaccgacttctacactcttacttctatttgcgccattggcatctgaaccaaatgagccaagagttcctgcagcaaagcttgaaagagggtgaggctgccctccactattgtgaggagcttccctctgccaatggctcaacgcccattgtctggcacgccaccccccggcacctggctggcgatcaccatcatcactgtggacaggcagcctggcttccactacgtactgcaggctgtgtcccagttccaccggcttcttcagcaatgtggcccccagtgcggaggggcaccaactcttcctgtgcaacgtggagcgtagtgtgagccattttgatgccaagttgctctccaagtatgtccctgtggccaatcgctatgagggcactgaggatgattatggtgatgacccttcgaccaactcgtttgagaaagagaagcaggactatgtctattgcctggagtcatccctgcagacctacaacccagactacgtcctgatggtagaagacgatgctgtaccagaagagcagatcttcccagtcttggagcaccttctgcgggctcgcttctctgagccacatctcagagatgccctttatctcaagctgtatcaccccgagaggctccagcactacatcaatccagagcccatgcggatcctggaatgggttggtgtaggcatgttgctggggcccttactaacctggatatacatgaggtttgccagccgcccaggggttagctggcctggaatgctcttcttctccctgtatagcatgggtctggcggagctggtgggtcggcactatttcctggaactggggagggtgagtccttccctgtacagtgtggttcctgcccctcagtgttgcaccccagccatgctcttcccggcacctgcggcccgccggaccctcacctacctgtcccaagtgtactgccacaagggctttggcaaggacatggcactgtactcgctggttgaggggccaagggagagagggcctatgtagtagagccgaacctcgtgaaacacatcgggctcttcttccagtctccggtacaactttcatcccagtctcctcttagggtgccaagagatgcctttctgaagttggccacttcttgaagattcaaatatttatctctttatttaggacatggttgcctgcaaggtatttcactgtttactgttgttaggagatatagggcactggggggcagctgagggaaccttcaatatgtttaaggagccttggcttttgggtaggcctcctggggaagggagccagccagttttgcccacaggttcccgggacctctccctccacacaggccacactgcctcatggcagtctgacccacccagttgagggttgcatttggaacactg

SEQ ID NO: 155105 - DNA, 1710 bp, Homo sapiens
cacgcgtgcgcccaaatgtggctcaggacagcgtacgggcatgttggctgttaatcatcccaggctaagcctccgtgggcactggctggtgccgcagccatggcgtatggactcagttagaaccaggtagaaagtcagcgacaccccacagaaggccactgcggctaggtaaacacctgagaaagaaactgctccagaagagatgacgtgggcttccaggagcatggaggaggtggcacttgaacttttaggaaactccttagatgagataaagtgggggttggaggtggcgaaaagagggtaaccctgggaaagtcagtcacaacccatggcagaagactgcaggagaggcaggggaaggggcttcggggaccacttgtggacagagctctgaaagcacccttggccaaagcccctcctgaggtgacagagcgtgggaggaggctgcactgggcctgcgtgccatcctcacccctgtttccccactggcgccaggccctgccttcttggtacctgtgccaacaggaggagccctcaccagccgatcttgtcactctccgtggtgattgtgtcttggccagctgtggcccctagtttctagcagcgtttctcagtgtcctttggcccttctgagaaggcaggcggggaggcacacggtgccttgtttctttccccattttgtccagttgctttgcaaagaagaagaatgagtaggagtgaacccgagtgaccttcacccgccctgtcccccacggtcaggacagggcttgaggcctctctgggcgtgagcgaggaaaccaggctgctctaacttctgaagagtgggctctggctcaagacttcaatcggccagaagcccacagagatcaaagcactagcaagttcagctgtcctggccctcgggtagaacccacgggcgtgcctgggtgcggctccacccacatgccccactgtcagcccaggcaggagccttcctggccgggctcaggatctgcctgcagcccagccaggccatcacccagccccgatgcatcctggcactgcacgcttactcttcacaagcacttatacgcggatggcctccgagaccctgcctccctggtctgctgaggtcaggccaggtctcccacggagccgggcagctccacaccccaccacctggcaccgttaggtttcagatctcccgtgtggtgtttgatgtcggcttttgttcctaccttgggagtttggattgtttcctctggtgtctttgcttaccttcctcactgttctacctcctggccagggtctcagcttaagcttccctgggtgtggggtgtttttcaaagccttccagccacagctggtctcccctcaggctggacggctccgggggtgacagggcttcaccctctgcctgcagacccctggtgggcacatctcacaggcttccgtcttgctgagttgggtacggaggcagaaagtgggtttgtggaggaaagtcagagggaaatctgcttcagaaaggaagggtctttagacacaaagactggaaggcccttccccgcccgcacggaagctgccatcgtgggtctcatgcacgtcaagaccttcccacatccaaactcaggcttccaagcaggggatttttgactttgggattgacaaaggcttttatttggtaaatatgctcttaatatgcaactttgagaataaaatagaaacatcatg

SEQ ID NO: 155106 - DNA, 456 bp, Homo sapiens
  misc_feature (1)...(456): n = a,t,c or g
aggaggggaaagctagacctgcagagtgaagaaagctggtaatagatgtctgacaaactaaagaaagacttgtgttactgtctgcacactggaaattcttcctggttgtgagacaagacctcagacttatctgagctaaggggaagaaagactgcaacagtgttgggcctgtgggtacacagaagtcaagaattgaagattggaaacctccacctagatttcagaggacatatggaaatgcctggatatctaggcagaagtctgctacaggggcagactcnactggagaacctctactagggcagtgtggaaagaaaaggtggggttggagactccacacagagtccccactggcacactgcctagtggagctgtgagaacagggccaccattctccagacctcagaatggtagatcaaatgacaacttgcaccatgcaccaggaaaagccacaag

SEQ ID NO: 155107 - DNA, 668 bp, Homo sapiens
  misc_feature (1)...(668): n = a,t,c or g
tttttttttttttttttcttggtctctcctcagtttaatggtggttagtgagattgccaaaccccctccccattcccctccccaccccgtacaaaatgtgtgtgtggttttttgttttttgtttttttgttttttaacaagaaaaagggggcaaaagccaggaatggggagaggggggtgcaatctgatattttcatacagactttggatttttttaatatattatatataaacccataaagccccggaatcctccccaaactcctttccccctccccgggggactctggaggagagatggggaaggcccccccaggagtgggtggacagagagacaaatatggatgggacagacgttgggggagaaggtagagagaaggggagcccaggaacctggggaagggggattggagaaaaaggttggggctgtctccctcactgcccccatcaaaggttttgacacaaagacacagaatccctatttccacgccctccccccacccatccccccaccgtgcaaacatggctttgcaaagaagtgcccagagctctgtggaactcttacaatggctggaaaggggtctaggacccccaaagaaatctgtgttcccggacgcgtgggtcgacgcgnaattcaggtcgtcagtgaggctttcagggtcacgtct

SEQ ID NO: 155108 - DNA, 1105 bp, Homo sapiens
tttttttttttttttttagccaagaaaggtaagacattttattttacatacaaaaagggtgcaaactgagtcctttcctccccaaactggggaagaggtatacttaaaagatcacatttgtgttttccatggtgccctaggaaatgggctactctgagatcacatatcagaacccattttccattttctccaaagaaggctacttcctctgcagagaagattttcctaatgggtgcacaaatatctctcctggggagggaaccatttcaaatacacttgaaattgacattcatgtttaaaaatacttacaaatttcatttttcacagctgaggctttgtgaccagtgccagggggtttatggaaacattattacatccttaaaaaaaaaaaggtaaaaaaagaggcatttaacaataatcagacacatccacacattaaaactggatttccactgctggatttatacattatccagttggtttaaaaatcgcaatcaacatcccaacatctttttaagagtacaatgggcaaagatcaaagacagataaataataatataataaattagagcatgtaatacatcctatgggaattgctgaatcaacattattttccattggggggtatatatttttggtttatctttatcttttctgctggtattttttttctctgcttgataaaatggggctcattcctaaagccagcttgctgagacactaatttcagaagctcacttgtcacttgtttaacctctgagaaatactcaggaacacatggttccccagcagcttgggctgggtctttaatggaagtgaaatgcacatagatgaacacacgcactcacgtgcgcacacacaccacacacacacacagacacgcagtcacacacttccatctgtaaatatatttctccccaaaggaaatggctcatctttcctgaggacattcctaatagactgataaggcttctaaaaaagggcttttgggtgcaagggctggcctggggatttgggtctgggagctcatggaactgaaaatgtctcacctgtactgaaagagggggttgggttggggacattcagaacagctgtcctcttgtgg

SEQ ID NO: 155109 - DNA, 1037 bp, Homo sapiens
tttttttttttttctgtcatctgtcacccagactggactgcagtggtgccatcatgtcttactgcagcctcaaactcctgggctcaagtggtcctcctgcttcagcttcccaagtagctgggactacaggcatgtgccaccacccccagccaaaacatccatattttctcttagaatggtttacattatgatgggggatggggagctgggggagggctgtacattcccaaaagaaagtagtgttataggaaatccaaatgcgcttcagtgattcactccttaaaagcagcctgggtatgttggcagattttgtttgcatttgtcttgcgtatttaaagtctcaggaaatctagtcttggtccaaaacactggagaaaaaaataacaccagacaaaacacatttgagtaacttgaagtagcagcatagaataggcccaactaagaagttggaggggcaaagagaaagccgacagaatcagcttctcctggaaagtgaaagcatcaagttctatttatggtagacagagggtccttatttgctttgccgtggtgtctatgtgggcctattgaggggatggtagttacttgaaggttcacatatgtaagcgtgtggacccagcacagtctgtgacctgattccagatcctcaagagtggagaaggaaagaaatatgatgatttcctatgcttgaccctaacccaaccccaaaactgctagggattcaacagtgagtaagatgtatggcaataagagaacagataacttcttcaacaatgtggcatgccgtttgtgtaggatgttcaggaacttacatatgtgtggaatattcactcccacctttacacacggcacacacactggcaatcacatgggcatttaaaaaatatattgtgtatggggaacttgggcgagggtcagtcaggacctggagctgtaattcataggccttatttgccacttctttgcgttgtgtatacattgaatggctcatagattttaagagattttttttttgtwagtwtttttctattttcact

SEQ ID NO: 155110 - DNA, 378 bp, Homo sapiens
ctcttggccaagctcctgagagcatgtccctcttccctgtgcctctatgtcagagttgagggtcctaaggctcaaggctgtcctgctccacatcaccccgttggtcacgaggctgctggctgagccccaattctctaaccaggctctgagcagccggattggatgggaagcattggataggtggctcctgcgcctgcgccggctcctgcaagtgcaaaaagtgcaaatgcacctcctgcaagaagagctgctgctcctgttgccccctgggctgtgccaagtgtgcccagggctgcatctgcaaaggggcgtcagagaagtgcagctgctgtgcctgatgtcgggacagccctgctgtcagatgaaaacagaatgaca

SEQ ID NO: 155111 - DNA, 379 bp, Homo sapiens; identical to SEQ ID NO: 145102

SEQ ID NO: 155112 - DNA, 444 bp, Homo sapiens
  misc_feature (1)...(444): n = a,t,c or g
aagtcctaagatgaaatttaattgcccattccacatatttccatagaaaaaaagatgttagcaaaacgggtccagggttgttacaaaaaaaaaaaaaaaaaaaatcccaggtttaatataggttgcctctatttacatctgaagagcacagctgtccctggcatccaggcacagcagctgcacttgtctgacgtccctttgcagatgcnagcccctgggcaaagctactgcacagcccacagggcagcaggagcagcagctcgtctgtgtcaggacggtgcgatttgcgactctattgcgatttgccaggagccggcacaggcaccaggagccaacaggcgagcaggagcagttgggagtccatttcgaggccaaggagaagccaggagttcccgatccaagaggaaaacacgcagcgggacagatgaaaagcggccggaatta

SEQ ID NO: 155113 - DNA, 403 bp, Homo sapiens
  misc_feature (1)...(403): n = a,t,c or g
nccctatttccaactagggtggtattaaattaaaaggttataatcctccgggaaaacccttaggacctaggttggggattttttgttaaaggttccaccaaaaaaatgggtcccttaaaaaaaactggttaccaaaaaaaattttggagtttcccagggattaagggaccaaaaaagccaaaggcctttgaagccaaaaatttgggtcccaggggtccagcccattattcccacccctttggagggttaaaccagaggattggtttaacccggggggttccaggcccgcctgggccacataatgaggccctgtttttttttnnnnnnnnnnnnnngaaaaaaattagcaaaatggcagactaaaccctgccttatcagtaattggcattaagcataaatggat

SEQ ID NO: 155114 - DNA, 358 bp, Homo sapiens
  misc_feature (1)...(358): n = a,t,c or g
gttggcgcttccacgcccccaacattttcagaaggtgnnnnnnnnnnnnnnnnnnnnnnnnnnnnnnnnnnnnnnnnnnnnnnnnnnnnnnnnnnnnnnnnnnnnnnnnnnnnnnnnnnnnnnnnnnnnnnnnnnnnggagctgcagtattgggggagttaaaatcgttcccnnnnnnnnnnnnnnnnnnnnnnnnnnnnnnnnnnnnnnnnnnnnnnnnnnnntaaaacaccacccagatagatacacatactccttcagacttacagacctaagctgcatttatggggtagtgatgaggtttagaacatatacatattttgttaaaattccccagatgattcttggtatgaacgac

SEQ ID NO: 155115 - DNA, 451 bp, Homo sapiens
ccaggctctaagattcactttgaggtggaacttaaaaccagtgtactgtatgtatgcattggtaatagctacttttgcttcatagcttcataccaacaaaatatatttattagaatagtatgaaagtactggaggagctgaaagaaaaacacccaaggctgggcgtggtggcacacgctcgtaatcccagcactttgggaggccgaggcaggtggatcacctgaggttgggagttggagaccagcttgaccaacatggagaaaccccgtctctactaaaaatacaaaattggccgggcgtggtggcgcatgcctgtaatcccagctactcgggagggtgaggcaggagaattgcttgaccctgggaggtggaggttgtggtgagctaagatcgtgccattgcactccagccttggcaacaagagcgaaactccgtctcaaaaaaaaaaaaa

SEQ ID NO: 155116 - DNA, 1142 bp, Homo sapiens
ttttttttttttttttttgtcatttcataccagcaattttatttacacaataagaacatacaggtatcgtcagagatcatctctacatttcagatcttgactcagtttaagggccaacaaaggaaggcttttctctttccgttgtttcttgcctctgttttttcgttcgtacaaagtgtgtagtactagcaagtgcattaccatagcatgtctttaattttcaatttgaaatctgatgtgctggagaaaagtgcatcgtaagtttttgtttttgtttttttttccccttacaaattcaaaggactagaataatgatagtcatctgggaaaaagtaaatcatgaatgggctataattttgaaactggatgcctaatggatggcagtggatttttaagtgtgggtaacaaacgttttggggagcatggtatcccccggtcaagaatgggaccagtaacagattcaaagtagtaccatatcgtatcagactggatgtggggggtttttatgtttgacatcagttgggtggagcctgttgttccttagtaaattgatgccataagctaaagttaacatattcatattttccctgccaatagtccttcataaatacctggtcataaactgaaaaaaaagtaatatctgcaatataaatgtgttgtctattagagacggggctagatgtcttaaggatttctaagtacatcttaaaatttataatatagtcgttcataccaagaatcatctggggaattttaacaaaatatggtatatgttctaaacctcatcacctacccccataaatgcagccttaggtctgtaaagtctgaaggagtatgtgtatcctatctgggtgttgttttattttttttttttgagacggagtttcgctcttgttgccaaggctgggagtgcaatggcacgattctcaggctcacccacaacctccacatcagtctggatacggatatgggtactactttggaatctgtttactaggtaccatcttggacagggggatacatggctccccaaaacgttttgtttacccacacttaaaaatcactgccatcattaagcatcagtttcaaaattatagccattcatgatttactttttccagatgactatcattattctagtc

SEQ ID NO: 155117 - DNA, 434 bp, Homo sapiens
tggtagcggtaaagcgagggcaatttctagatcaaataataagaaggtaatagctactaagaagaattttatggagaaagggacgcgggcgggggatatagggtcgaagccgcactcgtaaggggtggatttttctatgtagccgttgagttgtggtagtcaaaatgtaataattattagtagtaaggctaggagggtgttgattattaaaattaaggcgaagtttatttggttttgtcaaagttttacgaaaatatatgatatatatttatactaaaactatataatccttagatttaggaaagcaatcagttaatgtctttagcacactaaagcagtattaaacacaggtacaagttggaaattgtagaaaactgaaagaaaacaagacaaaatgtctatggtagggaataaaagagtttaagatattatgt

SEQ ID NO: 155118 - DNA, 745 bp, Homo sapiens
tttttttttttacaggcacagaaactcatcaattttaatttgggataacaaagggtctcccaaattatattggaaaaataaatcccaagttaatatcactcttgtaaaaaagttgagcacacttttcacaaacaatttatgtaaaagagaagaaaatacacataattttacataatatcttaaactcttttattccctaccatagacattttgtcttgttttctttcagttttcttacaatttccaacttgtacctgtgtttaatactgctttagtgtgctaaagacattaactgattgctttcctaaatctaaggattatatagttttagtataaatatatatcatatattttcgtaaaactttgacaaaaccaaataagcaagccttggttttaagtccacgctcctgccactggtttacaaaatttgatttaatgatcaaaaaactattggttgtcactcttctgttacaacaatcttccttgtgaactgccacccagtttttacataataataacaagcaatagaaaaaccaaagaaattatgttaatcttagctcttcctttgcaagtgtcttttcttcttacacccagtgcttagaaataggcactcctcaaccagtgttcactgaattcaactgctgaaattgtaacagttaaattatcaacacaactcttaataaataaacattcctttgggaaattgtgggaaatcaaaacacttttaagtttatacaagtattca

SEQ ID NO: 155119 - DNA, 2351 bp, Homo sapiens
cacaaataacctgcaataacttgaaatgcatacccttttgaacacttccttttctcatgtataaattaaaatgtttgctgcattttgcaaaatgtcaattctctaaaaatgtgtccgtatatttctgtacctgcagtgtagtaaaggtttagacgaaaccccataattatagtggcatactgtcacttaggtttcaagcagcaaaataaacagtgcagctcagaaattgtagtttggttcttgatgtgtttttattacatttggagttgttttgttttttagtaccttcgaaatttcaaattattttatcttcagttaatgattttaaaaagcctgggggcaaataagttggttatttgctttcaagtttttaaaagtagtctttattgatagagtaaggagaactactttctaacaaaacacgtgcatagttatgacagtgatgctttaaaggaataaaattctttttttttaaagagtgatattccttttcaaaagaatactaactctcagaatgttcactttaaacgaatatgccagaacatagacagctaaatgaatgttactctgcatagtgatcatgctggaaggttatttcctaatgccagcaatctaccattgcccaaaacctgctgagtttactcttttagaattgcattcaaagttaatttgtcacacacactaaactttatgattatacattgttttaaaaaatatagtattaggaagcttgattatttttagttaccattacttggcaccaaatgaaagtttccaaaacttccacctaacctttgaggtaatgcagaaagtatataactggctttgaaggcaatcccaaaagagttttaaaggttttttgagcagtggcagtatacttaggagaatgaactgtggccttccaaggtaactaccttgaaggaactcagctcatttgaatgtattgagttttggatgtatttgtttcattttttaaaaagttcacattattttatagtgtcgaaaggaagaactaggattaacataaatttctttggtttttctattgcttgttattattatgtaaaaactgggtggcagttcagaaggaagattgtggttacagaagagtgacaaccaagaattttttgatcattaaactcagattttataaacagtggaaggagcatggacttaaaacaaggcatgcttattcggttttgtcaaaattttacgaaaatatgtgatatatatttatactaaaaatatataatccttagatttagaaaagccaatcagttaatgtctttagcagactaaagcagtattaaacacaggtacaagttgggaaattgtaggaaaacggaaagaaaacaaaagacaaaatgtctatggtaggggaataaaagtttaagatattataaaattatgtgtattttgctcttgttacataaatcatttgtgaaaaggtgtgctaaactttttttacaagagtgatattaattaggatttatttttcaatataatttggagacccttagttatccaaataaaaatgatgagtttttgtgcctgtattcaaatatgtatgcatgtgataacccttgaaagctaaagcccttcttaacttttgagttgatggaattagaattcaaagatttgaatgaaatgatttaacctttatcctccaattcttacagtgcccagttctcctgtgctatctttgctttgtacaatagtgcatcttccactttctagagagaaagcatgcacttgttatttggaaaactgggctaaatatataacagtatccaaagttataccataataatttattgtaattgtgtattacatagctttgtttacccagatataggtgcgttcttttttttctgttagtcatctgtgacttttgttctggaatacaggtttttaaatatatcttaacagtctgactaacttaaaataatttattcttcccttaaaacatttttctgtgtttttgtgcatcaaatattgtagagttgaaatcttagagattgcttatcgaaatataaatttaggggaagttaaaaatcgattggcaaatttgtagcatttattcactgattaaatcttttccacttttgtgaaaaccataccagtggtttacatcatattgtaatgtgttcatctcattcttctttttatccctaaacctagctaaaagttactgcaaagaaatctttggctgccacaagtagatgctctctactaccagagctggatttccattactcactcttgctcttacattaaagttgttgattaaataaaaaaaaaaaaaaaaaacatttgcggccggtccaacatcagaatggtacctcgtgccg

SEQ ID NO: 155120 - DNA, 2310 bp, Homo sapiens
  misc_feature (1)...(2310): n = a,t,c or g
ggttataggaacagagttttatttatatgatctggtactagacttcttaatataactgttacactgtccttgtctttcctactcaaagacagtatcatctgaagttgcctaataaggtcatgtgagtcaagaactttatctgtgggagctgatttgcaccattttacctttttttttttttttttttgagacggagctttgctctgtcaccaggctggagtgcagtggcgcgatctcggctcactacaacctctgcctcccgggttcgagcgattctcctgcctcggcctcccaaacttctgggattacaggcgtgacgaccgcacccagccaccattttatctctctaaagtctggtcccagtattaaacctattctttagtaaactcatattactgttctaaattgaagaaattatttattactctgtacttctagactcaaaattctttatcaaagatagtctcaaagaggtagtacaagtcctgtttaactgcactttttcacattcacagtgcttcctctgatatctttccttacatcattatacactgttgatatcattttactcttctttctcttctacatttcttaaattttgggttcttttcctgtacatgtgttttagcggggcccttttctttgaactttgtttaattagcctgtacatttttgtttcttttaaggtagaacagatctttttttgtttctccttttaagtctactggttttaaaagaggtaaatgtatccatagaccacagtgccttggctttttcctctgccagcacatggagcacgggattagatgcacaaacctatttagggaactattttggtagatgtttgagtttatacagaaattgcagctggtattttattttgctgtacatttactcaacttgtccattagtatttaactatttccagagtttgtttaggagtaagaattgacccattcgttagtttaccatattttttcctgggataaaaaggagccagaaataaccctaattgctaaataattaattatgtaagcccacctaggtcctgcataagatctcccctcacatacttcacaatatatatgtgtgtgtgtgtgtgtgtgtgtgtgtgtgtgtgtgtgtgtgtgtatttggctaaaaaattatactgccaaaattactgattataaatacttgactacactgattgatgggacaaaatgattaaagtattttcagggatcttattccatatgtcaccaccaaagatttctacagtgttataaagtatataaatattccaaatttctgtggttaaatatttttttctttttttbtccttttttagaataacacagtctgtgctttccaaaaatgcttgaacttttatgttgttaagaaatatataatgatatcttacattaaggcatgagtcctaatttggtattaattggggatgggaccaaattttccatttggattatccaggaaaaattaaggaggttatatatttaaaaggcaattttctgtgttttcttctttgtaaggttgactccatttgtgaagccaattagggcaaatttttgaggaaggatccattgttattgtgggtttgcagtatatatttcttaggtaaatatccacttaaggattaaatttttcaggaaaggaaaattataggcttttttcccaaaatatttttaaagatttaatcttctttgtagtatgcctacagattttaataatattaactctttttttaagacattgaccatgacttaacattttgcctttctaacaccttttaaatctatgtactttaatagttaagagaaaataagtttgcagatttttaataatctgtttgtaaaaggctatctctaagcctagtatgtgggtaattttacaggtgtgttttttgataactttaatataaaataaactcattcttatttgtggcaaaaaaaaaaaaaaagatcacctaaaaagctgctaccaagacagccacgaanatcctaccaaaatgaagcgcttcctcttcctcctactcaccatcagcctcctggttatggtacagatacaaactgggactctcaggacaaaacgacaccagccaaaccancagcccctcagcatccancaacataagcggangcnttttcnttttcttcgtggccaatgccataaatccacctctctgcttcagttgaaggtgacacgtctcanccttaaccctgtggcccctgaaacagctgccccatcactcgcaanaaaatcccccccacctttgggaagggtgnatgccnacatcccccnttnntnnaattt

SEQ ID NO: 155121 - DNA, 2900 bp, Homo sapiens
tgatccctagtccagtgcggtggaattcggagttgctctaggtcgtaaccagcctttgaaaaaggagaaaccaaaatggaaaagcgattatcctatgacagatggacaactacgcagcaagagggatgaattttgggatacagcaccagcttttgaaggccggaaagagatttgggatgccttgaaggctgctgcacatgcttttgagagcaatgatcatgaactggcacaagcaatcattgatggtgcaaacataacattaccacatggtgcacttacagagtgctacgatgaactggggaacagatatcagcttccagtgtattgcttggcaccgccaatcaacatgatagaggaaaagagcgacatagagactctggatattcctgagccaccacccaattctggatatgaatgtcagcttcgtttgcgcctttccacaggcaaagacctcaagcttgtggttcgcagcacagacacagtattccacatgaagagacggttgcatgcagcagagggagtggaaccaggtagtcagcggtggtttttttctggcagacctctcactgacaaaatgaagttcgaagagctgaagatcccaaaggactatgttgtacaggttatagtgagccaacctgtgcagaacccaacaccagtggagaactgaactgagccctgttggccagctcccacatccctctgctcctttttatggttcttgttgtcatttcctactctgcggcgtgaaatctatttcactgctctaaattccctatgaatggatttagttctgaggaattaccagtgaaaaattccatctgtgatggagaccaacaaaaataataaaacacaaagagccaggctttgagactcatgtaattacaatttctaatttgaaaggcagttaagaaatagataaccatttattttagaacactcaacaactatgtaatggctatatttcagtgacttggactgtaaatgaaacattgcatccatgaaggacagcaccaagcacctttttgaatacagaatttttttagaaaaatatatcaaattatataatttccagaaaccataaataatggatataaaacttaacctttttgttttgttttgttttgttttgttttgttttgttttgttttggttaatggaaactgaaaagagcagtatttgaggttgcttctattctggttttttattcttaggctcaattaatatttagccataaatgagtaggagactgggcaaattgtgctttagtgttgcttttcctcatccccacatcttgagctccttatttacattcacactaaattttgggtgccttccagcacgttagtggccagggcacccttctggggacactaggggcaattaattttcatcaattacagtcaggtctcttgagtttcaacagatactcagttgaaaagtcgctgtcatcttgctgcataagtattttgaaaggtctgtataacgaagccatttttatatccaggcttagaaggtcactactatatagtaccttcattgatctatctattctgcttggaacttttcatagctaagtataacccccaaatgcatggttcctggggtcaggagacaccaaaatcaattattaggctgtttcccactcaagtttattaaagtaagatgatttcctccactttgcatggcggggtgtaaggaaagcctattttatctgtgcctgggagaactgtgcctattttcagtcttttagggggaaatttcacctcaaaatttttaagtgtgaaaggtttactggtgtcacataaacattagcagtgagaccaaataatgaaacattgctttataccttagtgctttccagttcactgttacctctagtcatggtagatgacaattttccctccctcatccttttgtcgccaaagacgccaattttaaggccccttttgcaagttagattaggggactgaaaaatccagggagataacctgattcttctatactatgactggagtaaagctgcccaagagttaggttgaatttggagcccttttaaaagttggttccattaagtgagaaggggggcctaacatgtgaccactgtgccccctgagaatcccatgagatggaaaagtacagacaagaaggcacttaacgcctgttcctcagttggaaaatgtcagcccctccacacctgtttggatgtgaagtgccattattaattttaatgacaaaatgaaactgcctaattagtttaaatgtaatgtttaaatggtattgaatttcctattgcctgattaaatatatctgtaattgtaacatcatgtttctgagagctttaactacttccttatttttatgcaatcattttaaagattgtggctatatctaatttaaatttgctgatgattgaatctaaattcaagtgaagaccacagcattaatccccaaagggagattttttttatgtttagaggtggagatattagggtaaatcagtatattgctcctgtcatcaaagtttttgttcaatttgtgtgccacatcgaatagcagcacttctcaaagtttgtcaactggaaaaaaagtgtttaaaactgtttttttcttaagcagatttggtgatgtcatcaatatctatgatatcgattggtaaaaggtctttctttgttgaggatttgagctctctttttaagagtttattttattttaaaggaacatatgctttgaataacaattctctgggcatgtttaactaacctaggtgggaaaaccatggtggtgtttaattgtaaatagattgatataagattggaccagtacttgatgtgtataattttagtatgtagggttcaccgcgctttttttaaaaaaaaaaaaaaaggttcaatttttaaaaa

SEQ ID NO: 155122 - DNA, 456 bp, Homo sapiens
  misc_feature (1)...(456): n = a,t,c or g
ttcctgggtcgacccacgcgtacgcccacgcgtncgcccacgcgtncgcccagacagccactgtttattttctcctccccagctcacccacgcctctccaagcctcccaacagaagacagaggtcccccacagccagagacatttcctgaagacatggggaacacagaggcagaaacagcccatccacccaggagctgtcccccacactgccgggagccggcacccagagccgccaggtaaaactgaggccacctggttcaacatcacctttcacagaaggggaagcagccacagaaagaagggcctcgttaagaagtggaacctgggacccccaagcggtgtctctcagtaaggccctcatgtgaaggaggcaggggttgggacaagtgctaagtatgcaagactcaagggaagagctgctggagccaggagaagcacctccctcccggcccctc

SEQ ID NO: 155123 - DNA, 1332 bp, Homo sapiens
tttcgtgccagggagccgcaggcaagggactaaggggaggggggctcagtgccagctgcttaaaaatgcccctgtggcagcgaggggcaccagttggctgggtctaattagttgagaagcagtgacacccccaaccactccccaaacaggctggctcccgtctccaggccccaaggagccacacctggaccagaccccaggaaaggcaagggcgctagctggtgggagccaccccgccatgctgatgtcagagaagcaagaattctggagaagcagcctcctgggaccagaggagggccagcagcaggcagcccggagacagaactctcacccacgcctctccaagcctcccaacagaagacagaggtcccccacagccagagacatttcctgaagacatggggaacacagaggcagaaacagcccatccacccaggagctgtcccccacactgccgggagccggcacccagagccgccaggtaaaactgaggccacctggttcaacatcacctttcacagaaggggaagcagccacagaaagaagggcctcgttaagaagtggaacctgggacccccaagcggtgtctctcatcctgactggggatccagagtaggagggagcctttggtggggtaagtggaatggggcggggtggggggtggccatagacccctcttctcagtaaggccctcatgtgaaggaggcaggggttgggacaagtgctaagtatgcaagactcaagggaagagctgctggagccaggaaaagcacctccctcccggcccctctgcccctcctcatagcccagctgcactgactcctcctccaggaagccttctcagcttccccaggggtgggaacctttttgtcctccaggtgtgcttggctgtcctttcttgggctctctctctctctctctcctcatcccacttgagtctgccccctattcaccttgagaggggaatttttcttctactcaatctgaccgaggccctccaggtcaaggacagcgaggctctcagtcccacttccccttggcacatagaagaggcagtgcgctgaagggacaggtgaaatgattagaccctgcccccaaaccaaggcctggccaattggacagggcatgagacattcagcgtagaggttaaaacgagggccctgggttaggaaccccagctcagttctcagctctgtacccttggaaaattcccttcccatggagctttgtggatgcacaaggacttgcacaaagaaaacattcaatatccaggactataaaattccacaaatgattgtgcttattacattcattatcacgatgattattcca

SEQ ID NO: 155124 - DNA, 2894 bp, Homo sapiens
tcagtacgcgtctgaccattgtgcatgccgcccacacttcggcgtagaataatgcacctggtgcttctcagtatcctcgttcatcaatgcttggatatgtacaagacattgcccaccggcatacttgtgctccactacaggcttggtttttaccggggacaaggagacgaggagaacagcggcggcaacggagggcacaggcgcgagcgacggagacagcgagggagaagtgacgacggcgcagacgcgcagacggaaatgtgcaaccagcatcgcagtgggaacgatgccctcattcagcatttgcatggtttgttgaaaaccggacatggcactccagtcgccttcccgttccgctatcggctgaatttgattgcgagtgagatatttatgccagccagccagacgcagacgcgccgagacagaacttaatgggcccgctaacagcgcgatttgctggtgacccaatgcgaccagatgctccacgcccagtcgcgtaccgtcttcatgggagaaaataatactgttgatgggtgtctggtcagagacatcaagaaataacgccggaacattagtgcaggcagcttccacagcaatggcatcctggtcatccagcggatagttaatgatcagcccactgacgcgttgcgcgagaagattgtgcaccgccgctttacaggcttcgacgccgcttcgttctaccatcgacaccaccacgctggcacccagttgatcggcgcgagatttaatcgccgcgacaatttgcgacggcgcgtgcagggccagactggaggtggcaacgccaatcagcaacgactgtttgcccgccagttgttgtgccacgcggttgggaatgtaattcagctccgccatcgccgcttccactttttcccgcgttttcgcagaaacgtggctggcctggttcaccacgcgggaaacggtctgataagagacaccggcatactccgttgtagcgccgggaagatgcttttcacgctggccctttgggggtttttttgccaaatggtcattgcaggcttcgccaatatacaccagattcagacagccaacgcggtcgcaggcacctttacagccgccatcgttgtcattccacagcactgttgatgcccgctcgctgaatgatatccgggcgacgccttcctggtgctgtgccagctcttctttgtagtgctcacgcggcatatccgagaacatgcacggtactgaaactgccgttgccgtgccgcaagatgcggtattagggaaatagaccacgttatctttcgccagccgcgggttagtttcacgcgggtagccgttgagggagaagttctccgcccgcgaggttgcgccgaccatcaggatggtcaaatttttacgttgttcgttctgcattaacgggttgcggtgcgcgtcttcaccaattcgcaccagcggcagatttgccagtcgctgatgggagtaccatgaccagctggcaacaatgctgttagaggggcttaaggatttcaccagctctttgttattgcggaacaacgaggcgtagtctttataaaacagtgcggcgaccagcaaaatcagtagtacagaaaccagaatattggctccacggaaaagaacactgcgcagacgcgaggtggcaggtttgatttgtatccagcaggcaatcagcgcagcaagcacgccgctgaatcccagcgttgatgacattggcggtgtcatcagcgcataactttctgccggagtggtatcaataatattggcaatcatcgagcggtcgatgacgatgccgtaagtcattatgaaatattggtgcagccgcgccagaataaacaggcaggccagtggtcgattaagccataagaaagagcttagtgtcaggacaatattaatcacgctgaaagcgacgaccggcatcgacaagaaaaccagtacgttatgcagcgaatccagcggcagcgcctgcaacaccttaaaaaccctgttatgattggtgctagcatcacagaagttgactgtagtacctgtcactgatacacggaaaaccaaactttggcggattatcggaatacctctgttacctgggtattcgctggtctgttctagagtgcctttgggctgcttttggcctggtttccgattttggctgcgaagcaggcgaaaacctgcagcaaactgggtctcggaagtctccatgggtgagtgtgaatggtccagcatacctgagtgactcagcagatcattctggaggtcctcgatcagagagaagggctctctgtcttcactgctgctttgtagtggaggaatttcattggctgagggtaaagttccatccaagaaagcttctagttggttctctaagctggcagataaactgcccataggttcggcaaggacgaaaatggccaaaacactgtccacggatgacaccccgtgaaacacatcattaggcccccgaagcacacgagtggaaagaagccgaacaagagggtgacccgaaagaatagcatctttatggacgaagtgtaaccaagaaagatagaagtcgaatttcaagaggaagtggtaattcgtggcatgatgccctggtccactagttgttctctcgtcctcctttgttgcagcctcagctggagcacccaaatagtaaatttttagagtcttgcctataattgcttctttaacactggagtccacaggaaggatgtttttctctaccagctccataggaccaggtctttgagcaatcttttcattcagatcatctgctagtcgagctcttttcaacttcatctgagtagcctgcagggatggctctgcaaatgtttgtggcatgatgccctggtccactagttgttctctcgtcctcctttgttgcagcctcagctggagca

SEQ ID NO: 155125 - DNA, 1489 bp, Homo sapiens
ttagccgctgctgccgtcagcacggggcccactatgccactgggagctcgaccctgcaaccactacccccaaagccagccacttctgccactgacacttcaacattctcatggggtgcctccaggtgacagggccgacatcatacggcttgtaatgtgggatttcctcaaagacagataggttacagatacaacgctgtctcctacatcctgcccatccttgatccagcactgggtgcggcagaggtggcaggattgagcttagattgaccaacaggaacgatgagtattcctgggaagaagtcacacttttctgtgtgctaacatcatgtacattctgattctctgtcctgtgtgccattccatcatgctctctaccagcaaaacgccaccagtcttggtgaatgttgggagagaatgaagactgcggctgagaggcagcgccttgagccttgaacggaaagagggacagggcctgggggctgtcactcccactcccctcagcccttttctcctggggtcccgaccaggcttcagagggggtgtctgggagcgccctgaagttggatgcagcttggtatatgggtttcttgggagagagtttttccagggcttttgtctcgttcctaaaagggtccccgatccccaagtggtcaagaaccattgtttggcctctatttaagcttcccttgctactttctcctacattactggagtttccctgcaatttcttataaaaacttttaaatattgtaaagtaatgccagtttatagtgggcttaatctgcccgttcatttgaaagactctcgtaccaggcgaatcttcattatacagatctgtcccaccttcttcctcaggtggacttgtgctttgcgtcttaaagtgtggtgcccacaccatcagcacgtcagcagcatcctggagcttgtttgaaatgtagactctgagctccactccagaccaactggaccagaatttgcattttaaaagatcccttcctgggcaatgcacgtgaacatataaaaatcacgggaccagatctgtggctgtcaaacttgagttcacaataaaggtgcttataaagagaatgtaagacaggaaaataattaaatattcttaccgagtgtcttcaataggccgtgtttaagaggcgtcttacactccctgttgccagtggctggaacacaatggatcacacaggggcgatagacaccgaggatgaagtgggacctttagcccatcttgctccaagtcctcaaagtgaagctgtggctcatgaattccaggaactctccttgcagtccagtcaaaacttaccccctctgaacgaaaggaaaaatgtgctccagctgaggctgcaacaaaggaggacgagagaacaactagtggaccagggcatcatgccacgcaagatttataccatcactgccatccctaacgtgacagaacatgacgggcgtgtccaagaagagcctgcatcttgctctgg

SEQ ID NO: 155126 - DNA, 2385 bp, Homo sapiens; identical to SEQ ID NO: 147565

SEQ ID NO: 155127 - DNA, 957 bp, Homo sapiens
  misc_feature (1)...(957): n = a,t,c or g
agcgtcccccaactgagnccaagttttgcangcacgngctnggaannttncgnccnnnnnnnnnnnnnnnnnnnnnnnnnnnnnnnnnnnnnnnnnnnnnnnnnnnnnnnnnnnnnnnnnnnnnnnnnnnnnnnnnnnnnnnnnnnnnnnnnnnnnnnnnnnnnnnnnnnnnnnnnnnnnnnnnnnnnnnnnnnnnnnnnnnnnnnnnnnnnnnnnnnnnnnnnnnnnnnnnnnnnnnnnnnnnnnnnnnnccatccttaaaccattttttgtatagccaaggaaggtcttgaaatagagttggcatagtagaaagcataagaccagaagtcagaactgaggcttttgtcctggcttggagactaaagagctgtgtggccttcagcacatcttactgtatctcagttgtccactctaatgtgaaagtgtttggaatagatgatctctgaagttctgtcagattctgtggttctattatgaaacaaaagccctgccagtcactgagattaataaagtctaaacagcgcaaatggagacgaagttagtcatggtgtcagggaaggctttgaatggaaggaacaagatgctggatctgcatgtgtgaatcggcatgcacaaaccaggcacactaatatagctgaatttctaaagtaagtaaaaaaaatgtttaaatgcatgaatgtagtgtgggaagttaaaataagaaaaaaaaaatttaaagattgatttttacatcctattgctcctaaggaagatttatttacaggaaataaagttttcttctcatggaggcactgaaagaaaggctcataaaaattccctgaaaagttcattggtgcagggcttggtggcatgtgcctgtgttcccagctagtgggaaggctgaggcaggaagattccttgagcccaggagtttgaggcaagcttggacaacacagtaagaacatctctctaaaa

SEQ ID NO: 155128 - DNA, 976 bp, Homo sapiens
aagggggaagccaggggcccatttgggggcccagcccccaatcccacccagcagaggaagccaaggtcggggcagctgtgattgctccctggtcctggagaggaaactggccatctgctttatctgaagattttcagctgatgaagaactaggaggctcaaacactatcttacctgagtccaggacaagtgacttggagagtgtgctcttctgtggcaggatcaggtctgtctagggcaggatggcccaggatctcagcgagaaggacctgttgaagatggaggtggagcagctgaagaaagaagtgaaaaacacaagaattccgatttccaaagcgggaaaggaaatcaaggagtacgtggaggcccaagcaggaaacgatccttttctcaaaggcatccctgaggacaagaatcccttcaaggagaaaggtggctgtctgataagctgatggcatggagccctgccctgagtgtctgtccctcttcagccaagcccaagtctcctagacccccagggagccagtgaactgtcaccttctcttcatcacagaatgagtaaagatcccttgaacaattgcattgtgaacccatttccccattcccacctttcactctttttttccaatatttcctccacctgctgggtctctgctgaccttgcttggggacactttgagggcagtgtggcttggccgagcggttgggcccatgggtggtggggtgtgaaaagcctgcaataccccaagaccccagagggcagtccttaggaagcacttaaaccaccctgggaacccctccgtcttttccctctactctcatcctaggaataaagcatttccacgccagagtagtttgggctgggggccagggttgggtggtcctgtccctccatatcatgtcctaccctatggtcctgttcctagtcatttagatcaccccagatggcctgatgacaacaagagtttgtgaagtta

SEQ ID NO: 155129 - DNA, 636 bp, Homo sapiens
atggcattaaggaagaatgaagtttttgaaggttgggatggacgaaaaggtgtttctcatggagagggatgctttagcaaaggctcaaacattggggcatatttaggcaagagccaagaacagtttgaagggaacatcagaggaaataggcaaataatagtaaataatgaatcaaaactaaagatatctgaagaggacctaactcccaggatgcggcagcgaagcaacacactccccaagagttttggttcccaacttgagaaagaagatgagaagaagcaagagctggtggataaagcaataaagcccagtgttgaagccacattggaatctattcagaggaagctccaggagaagcgagcggaaagcagccgccctgaggacattaaggatatgaccaaagaccagattgctaatgagaaagtggctctgcagaaagctctgttatattatgaaagcattcatggacggccggtaacaaagaacgaacggcaggtgatgaagccactatacgacaggtaccggctggtcaaacagatcctctcccgagctaacaccatacccatcattgtgagtagaataccttcccgtggctggtacaacacctttccgcttgaatgggccctggatatatga

SEQ ID NO: 155130 - DNA, 706 bp, Homo sapiens
gctgtgtctcacaaaccttttggtgtgcttaaatggcctaacaatcaccaatcactaaatgaaccagtctctgatccacctttagtgcctccttctccctgcaggctcctaccacctccactcactccccctacctctcctcagatactcttctctagttctgctgctgccactgtcactgctgtctcagctcctgtctttctgcttcagtccttcccacctcaatacctccagatttagaccatccacattttccttcttaagacccggctcaggtcttatcaccctcaagttctgaacattgaaacaaatcctacttgggctactactaaagttccagtgttagggctaggttcctcagccccaaatctaccttctttctcccaagtcttacttaccattatttactattatttgcctatttcctctgatgttcccttcaaactgttcttggctcttgcctaaatatgccccaatgtttgagcctttgctaaagcatccctctccatgagaaacaccttttcgtccatcccaacccttcaaaaacttcattcttccttaatgccatctgctccttgcccctgcttttttctccatttttgcagcacttggctgtactttattatgcaggaatcaaatctgcccttctattagattatctgagtatacgacctaatgcttttactaaaagcaagggacgcgtggg

SEQ ID NO: 155131 - DNA, 1612 bp, Homo sapiens
tttcgtccacgcttctcccgctccgggccccgcaatggcccaggcagtgtggtcgcgcctcggccgcatcctctggcttgcctgcctcctgccctgggccccggcaggggtggccgcaggcctgtatgaactcaatctcaccaccgatagccctgccaccacgggagcggtggtgaccatctcggccagcctggtggccaaggacaacggcagcctggccctgcccgctgacgcccacctctaccgcttccactggatccacaccccgctggtgcttactggcaagatggagaagggtctcagctccaccatccgtgttgtcggccacgtgcccggggaattcccggtctctgtctgggtcactagccgctgactgatgtatgtgccagcctgtggccaggggctttgtggtcctccccatcacagagttcctcgtgggggaccttgttgtcacccagaacacttccctaccctggcccagctcctatctcactaagaccgtcctgaaagtctccttcctcctccacgacccgagcaacttcctcaagaccgccttgtttctctacagctgggacttcggggacggcacctcctctctgccacgactgggggtcccggagaacactggtgaatcagccactagccctgcctttgtggtgtcttcacctaatagaggaggccattggtgcccaaaacagccatttaaggaaggccttctctggcctcggtttgctcatctggaaaatgggccagctgacctggagccctggctggctctaggctgtgatgacaggacccagatggtgactgaagactccgtggtctattataactattccatcatcgggaccttcaccgtgaagctcaaagtggtggcggagtgggaagaggtggagccggatgccacgagggctgtgaagcagaagaccggggacttctccgcctcgctgaagctgcaggaaacccttcgaggcatccaagtgttggggcccaccctaattcagaccttccaaaagatgaccgtgaccttgaacttcctggggagccctcctctgactgtgtgctggcgtctcaagcctgagtgcctcccgctggaggaaggggagtgccaccctgtgtccgtggccagcacagcgtacaacctgacccacaccttcagggaccctggggactactgcttcagcatccgggccgagaatatcatcagcaagacacatcagtaccacaagatccaggtgtggccctccagaatccagccggctgtctttgctttcccatgtgctacacttatcactgtgatgttggccttcatcatgtacatgaccctgcggaatgccactcagcaaaaggacatggtggagaacccggagccaccctctggggtcaggtgctgctgccagatgtgctgtgggcctttcttgctggagactccatctgagtacctggaaattgttcgtgagaaccacgggctgctcccgcccctctataagtctgtcaaaacttacaccgtgtgagcactccccctccccaccccatctcaatgttaactgactgctgacttggagtttccagcagggtggtgtgcaccactgaccaggaggggttcatttgg

SEQ ID NO: 155132 - DNA, 1819 bp, Homo sapiens
tttttgtagttcaatacttttttctttttaattcatactgtacttccatggctctagctactttacattaagatttggctgggcagccttgtgtgtttctaggtacctagcagtaagttttctgaccttgcgcacagcgccaggcaaagtacagttatagatccaaatacagatggccagacaactcgactgcactcgaccccgtgttctttcccatagatggcccagtgcaggtgttgcggctgctccctctgcctcaccccactccaccccacgtcaggattatccaggggccactatggccttctggacccatccctccccaacttgggaggtctaggttgagttggggggaaaaaggcaccatgggtttgggaagatggtctggtccatgcagagagtggtctggcccttgagtgcagggtaggaaaatgtggggagccacaagctattgttggcaaaaatggctgttttgactatgcaatctcagcacgtggcacccaagccccaggccgatgccccagacagagccagctgcccttgcttggagcagaggccacccttttgcttctgcaatgtcttattgtattgagagaagcaaggaggggctgaagaacgacaatgttctttaagccttcagatgttggggagatcgtcagcatcagctcctcctggccggccaaggtgctgctccattagctgccaagactccagtcctggctccagggcctgttgaggatctccagtcacaagaccccggagctgttgcacagaacatcaaaacagggagctggttgggcccttcacagccatggccagagcagaagtgaggtaacaaggctgggcagagaggtgggaagggagctctctaaatagtgtgccaagtttctgctctgcactatgacagcaagcaggggccttaaaagatggccttccaggaaaatgctcctctcagacccaaaatgcatcttctagaagaaaacacagaggtgaagaggattggggccaacctgctggaggttgggggaatgaaagtcaaggatgtcaaggatgtcaagtggtgaatgggatgattgtcccatagcctagagacaagtggcgaaggtggggagagtcaggaaggggcccccggagattcctcctggaggaggcaggcagggtatgaggttttagggaggcccagagccctgccatctgggggaagggagaagagtgctatttctcctgggggcagtaggagaaaagggctggctttggctgcccctgaaagagctttaaagaaagtggccatggtatgaacacagaaagtacccttctgggaccacaagcatccagaaagatacttcccctagtcctttctcccaggatctcatcttagggatactgccctggaaattgtaataggtattagttccaagtttgggtggggggcagggacacggagagaatccacttctcacaaaagcattcctctttgagctctctttgtcctccccatgtcattccaggttcttagtgtcagtgttctaaggcaaacccaagggttttagccaaagcttcatactaaatccaaaccctatcttaacaaaagagaagtgctagaaccagaagtggctactctccactgtttcttctaccaataaagaggaaggatggatagatgaaaggctgaacagaccctagagatagaagatgagctccattgaaaagaatgttcttctcccaacttagagaaagtccaaaggaagatcccttcacaaactaggccaaagagaaagaaacccttctaagtgaatactgagcaatacatcaagctcga

SEQ ID NO: 155133 - DNA, 961 bp, Homo sapiens
gttccacaaacaaggacagaaagatctttcatacaccaagcatcaggtggagtcctgagaacagtattgccttcgttgtatggataaatgagcccaagagtaaagcctgtgtggatcagcctaacaaacctcagaatcaagctttgaaaagatcaaactgaccccatgtaacttacatgtatggcagaagaaaactaaggctctttaaaaaaataaaacaaaatcctgcacagaagataaaattaatgcctagcattcaatcaaaaattagcaggcatacaaccatgcccccataactagggcaatcaatcaatagaaatgacagaatcaatcaacagagatggatctagaagtgatcagagattacagaattcacagacaaggacattaaaagctctcttacagaaatgctccctatactaatagaaggaaagcatgaatgttataaggagtgaaacagaagatataaaaaggactcaaatggaatctctagaaatgaaaatacaaaatggatggatgagattaacagaactgcataacagttacaaccataatctacaatgtctaagcacatggctatgccatgctctctcccttaacactcatgcagtctaggtttaacaaataactgtttcatgcccatcatcagttgcaggttgatctacagtcatccagttgtctaaagatctttctccactccattcctaaggaagggctcatgagaacaatacttcctaagttacagctcactgagaagtttgtgtgtttttcatctgaaaagtcggttttgctggaacaaaaaatgctttactcacattttcttttcttgagtgccttaaacaggatactcaatttcttcttcataaagaattgtcatctgctgggctcagtggctcactgctgtaatcccaccactctgggaggccaaggcaggtggactgcctgagctcaggagttcaag

SEQ ID NO: 155134 - DNA, 636 bp, Homo sapiens
ggggctcacagggttcccgcagatgctcaggccggccaggaatgcatctctggctctctgttcccacggatgtcactgcctcagccagcctcccccagagcccgccagccgctaagccggggccacacctgggggtgatttcatgcctcacctccagtaggcaccttggtttctttgggctaatctctggctcccttgcgctaactcttgctctcacccagctaatccctgcctcaccctgactgccccaggggctgaccactaacaaccaacctggccctgtctgggggttccaggctcctggcctggccctgaccagttcttaattaacctttccttcaccttgactaactcctgccttcctggtctgttcctttcagcagaaactaatgggttgtggatttttttctgactaacaacaggtctaacattcctcgttactgttaacagcttggatgtcggcatggctgggaaggggctaacacagctttgaacttggctaacacaggtttgaacttggctaacacaggtttgaacttgactaacacagggaaaagcatagctaacaattttgggcgtggtggctgctctgagtcagaacaatcagaagtcggtaaagatggtagttttctaaag

SEQ ID NO: 155135 - DNA, 3083 bp, Homo sapiens
cagcatcgcaggctttcctccgagtccccgcgctgccgatggacgtgctccctttgcttgttgtggaggatcctccaacgggggcagccagggggccggggccagaccctacaacccaccagcccccagaggtagctatttttgcagccagccgtgttgaaggtggacttcggccagagcaggagaacaggagggacgcgggacggcctcagatccggacgcccaagcaggggagggcagaacagacccgccacccagccagggtcagcagcggtggtggtggctctcaggagcccacacaggtcaacaccttcatgtccttcatattccccatggtggtcatctcggtcctgaacaccatcatcgccaacaagctgaccgtcatggtacgccaggcggccgagcagggccaagtgtgcacggtcgggggcgagcacagcacattcagcatggccatcgagcctggcagggtccaggccctgcggcacggcgtgcgcgtcctacgtgcagtggtcatcgcctttgtggtctgctggctgccctaccacgtgcggcgcctcatgttctgctacatctcggatgagcagtggactccgttcctctatgacttctaccactacttctacatggtgaccaacgcactcttctacgtcagctccaccatcaaccccatcctgtacaacctcgtctctgccaacttccgccacatcttcctggccacactggcctgcctctgcccggccaaggcccaggggctctgccaggacaccacatgggagggggctcaggcctcagcctcaagatcttcagctgtggcctctcgggctcggcagaagggacgccggatcaggggcctggtctccagcacctgcccgagtggccgtggccaggatggggatccaggctccacagagcacatgactagccaggcccctggcttaagaaggtcgcctaagcctaagagaagacagtcccaggagaagctggccgggaccagccaggagctgggagccacaggaagcaaaagtagggacacgtgtccacgcaccacagacacacccacgacacctgatctcgtatcactagcttgcggccaggtcatgatgtggccccggaagctggccctgcgtgccatgagtgcgtcggtcatggagtccggagcccctgagccggcccctggtgacggcacagccctcacagctcaaacgcccacccccactcccaccatctgcaggccagtgtccctcctggcccagagcggtacccgggccctcgactgctgccctccacgggctccctgcctgaacctgtccacaccccgattcgtccccagagttggacactccgtgatgtttaagggatccctgggctctgtgccaaggaggaaggagctggagcagcgaggcaacaaggcagatgggcgggctcacgtcagaaccaccagggagcctgttccagaccagtttcccaggccccagctgagccccaggcgatcagaagggcataggagatcactgcaccccaaccggaggaacactgacattgacgacaacatcataggaatggaaatacaaccatggaattccagctcagtcatggagcgggagatctggggacactggccgggcagcctgccccaggcacccctgaactccagtcccctgaagccagagcccgggccaactaaccaggtgactagcagagccactggggacacccccagccaggcccagaccccagccaattacccagggcctggagcaaggccctgtcagctcaacccccatcatctgacctggttcaaggcccatggccaccgagagccagtctgcagctgggcaaaagggcagacagggccaggtgaggtggacgtctcttgcacctacacatcctcgcgacaggaggatgcacgtcgtacagatggggaaacaggctgggaaagggagtgtgacctgcccgtgatcccagaggtgtggctaccagagctggaactaaaaccggagcccttcaccaaatccagctcccaggacctaagctggccttggatgaacccagtacggtgcctctcctgcctgtatcggggcatccgggcactgccagcgtcccattactggactctggtcaaggagcttggggacagagtggccgccgaggggacggagcctgccgtgtcccgtgtgcagcggcggaccaccaggcagagcgccaaggggagtgtccggagatccagcatgggaagagccccctgccacttccagcaaggagcacacagagagggggagcctcctgttaagcatccaagtcccaagtcaccggccggcatcggctgcagctctctgtgtgtggagacatctcattctggtgtcttctttacacagggtctgcatctgggggtccactggggaggactcagcctctcccgcgtcctccatcccacacacctgtccctgggcagccacggggaacaggagcacaggggacagcaggcagagggcagcgcccgggcgaaggggactttcgcccttgcttcatgcagccctggcacccgcagcaggacctcggctgatcccaagggggtccacagtggatatggtccttcaggggtgcccttgaaggcaggaaggggacaggactttatactgttcctcccaccccttcgagcagtcaccaactgcagcccagatgaggtcaacagcatgtctgatggcgtggtccccagcctgcctgatggcgtggtccccagcctgtctgatggcatggtccccggcctgtctgatggcgtggtccccagtctgtctgatggcgtggtccccggcctgtctgatggcgtggtccccggcctgtctgatggcatggtccccggtctgtctgatggtgtggtccccagcctgtctgatggtgtggtccccggcctgtctgatggcttggtccctggtctatttgatggtgtggtccccagcctgtctgaaggtgtggtccccagcctgtctgatggcgtggtccccggcctgtctgatggcttggtccctggtctatttgatggtgtggtccccagcctatctgaagatggggagaggagctga

SEQ ID NO: 155136 - DNA, 345 bp, Homo sapiens
aaggtggacttcggccagagcaggagaacaggagggacgcgggacggcctcagatccggacgcccaagcaggggagggcagaacagacccgccacccagccagggtcagcagcggtggtggtggctctcaggagcccacacaggtcaacaccttcatgtccttcatattccccatggtggtcatctcggtcctgaacaccatcatcgccaacaagctgaccgtcatggtacgccaggcggccgagcagggccaagtgtgcacggtcgggggcgagcacagcacattcagcatggccatcgagcctggcagggtccaggccctgcggcacggcgtgcgcgtcctac

SEQ ID NO: 155137 - DNA, 618 bp, Homo sapiens
cttaaacatcacggagtgtccaactctggggacgaatcggggtgtggacaggttcaggcagggagcccgtggagggcagcagtcgagggcccgggtaccgctctgggccaggagggacactggcctgcagatggtgggagtgggggtgggcgtttgagctgtgagggctgtgccgtcaccaggggccggctcaggggctccggactccatgaccgacgcactcatggcacgcagggccagcttccggggccacatcatgacctggccgcaagctagtgatacgagatcaggtgtcgtgggtgtgtctgtggtgcgtggacacgtgtccctacttttgcttcctgtggctcccagctcctggctggtcccggccagcttctcctgggactgtcttctcttaggcttaggcgaccttcttaagccaggggcctggctagtcatgtgctctgtggagcctggatccccatcctggccacggccactcgggcaggtgctggagaccaggcccctgatccggcgtcccttctgccgagcccgagaggccacagctgaagatcttgaggctgaggcctgagccccctcccatgtggtgtcctggcagagcccctgggccttggc

SEQ ID NO: 155138 - DNA, 4143 bp, Homo sapiens
tcaagctcgccccgcgcagcccgagccgggctgggcgctgtcctcgggggcctggggaaccgcgcggtttggagatcggaggcacctggaacccgtggcaagcgccgagccgggagacagcccgaggaaccacgggttctggagctaggagccggaagctgggagtccggaggagagcggagcccggagcccggagcccggggcggcgcgtctgggtctggcgcttcccgactggacggcgcgcccgctggtcttcgccacgcgccctcccctgggctcgcgttcatcggtccccgcctgagacgcgcccactcctgcccggacttccagccccggaggcgccggacagagccgcggactccagcgcccaccatgcgcctcaacagctccgcgccgggaaccccgggcacgccggccgccgaccccttccagcgggcgcaggccggactggaggaggcgctgctggccccgggcttcggcaacgcttcgggcaacgcgtcggagcgcgtcctggcggcacccagcagcgagctggacgtgaacaccgacatctactccaaagtgctggtgaccgccgtgtacctggcgctcttcgtggtgggcacggtgggcaacacggtgacggcgttcacgctggcgcggaagaagtcgctgcagagcctgcagagcacggtgcattaccacctgggcagcctggcgctgtccgacctgctcaccctgctgctggccatgcccgtggagctgtacaacttcatctgggtgcaccacccctgggccttcggcgacgccggctgccgcggctactacttcctgcgcgacgcctgcacctacgccacggccctcaacgtggccagcctgagtgtggagcgctacctggccatctgccaccccttcaaggccaagaccctcatgtcccgaagccgcaccaagaagttcatcagcgccatctggctcgcctcggccctgctgacggtgcctatgctgttcaccatgggcgagcagaaccgcagcgccgacggccagcacgccggcggcctggtgtgcacccccaccatccacactgccaccgtcaaggtcgtcatacaggtcaacaccttcatgtccttcatattccccatggtggtcatctcggtcctgaacaccatcatcgccaacaagctgaccgtcatggtacgccaggcggccgagcagggccaagtgtgcacggtcgggggcgagcacagcacattcagcatggccatcgagcctggcagggtccaggccctgcggcacggcgtgcgcgtcctacgtgcagtggtcatcgcctttgtggtctgctggctgccctaccacgtgcggcgcctcatgttctgctacatctcggatgagcagtggactccgttcctctatgacttctaccactacttctacatggtgaccaacgcactcttctacgtcagctccaccatcaaccccatcctgtacaacctcgtctctgccaacttccgccacatcttcctggccacactggcctgcctctgcccggtgtggcggcgcaggaggaagaggccagccttctcgaggaaggccgacagcgtgtccagcaaccacaccctctccagcaatgccacccgcgagacgctgtactaggctgtgcgccccggaacgtgtccaggaggagcctggccatgggtccttgcccccgacagacagagcagcccccacccgggagccttgatgggggtcaggcagaggccagcctgcactggagtctgaggcctgggacccccccctcccaccccctaacccatgtttctcattagtgtctcccgggcctgtccccaactcctccccacccctcccccatctcctctttgaaagccagaacaagagagcgctcctctcccagataggaaaagggcctctaacaaggagaaattagtgtgcggcaaaaggcagttttctttgttctcagactaatggatggttccagagaaggaaatgaaatgtgctgggtggggccgggcctccggcggcccggctgctgttcccatgtccacatctctgaggcctgcaccccctctgtctagctcggggagtccagccccagtcccgcaggctccgtggctttgggcctcacgtgcagaccctgccatgcagacccatgcccccctcccccaggcagctccaagaaagctccctgactcgccccttcaggcctggcaagctgggggcccatcgccgtggggagtccctcccaccaccctcgccgcaggcagctgcagcccccagaggggaccacaagcccaaaaaggacaaaaatgggctggcctggaatggcccagaccccagcctcccctcctccctcccatcctcacccaggccaaggcccaggggctctgccaggacaccacatgggagggggctcaggcctcagcctcaagatcttcagctgtggcctctcgggctcggcagaagggacgccggatcaggggcctggtctccagcacctgcccgagtggccgtggccaggatggggtgcgcattccgtgtgctttgcttgtagctgtgcaggctgaggtctggagccaggcccagagctggcttcagggtggggccttgagaaggggaatgtgggacaggggcgatggtgcctggtctctgagtaagatgccaggtcccaggaactcaggcttcaggtgagaaggagcggtgtgtccaggcaccgctggccggcagccctgggctgaggcacagactcatttgtcaccttctggcggcggcagccctggccccggcctccaagcagttgaaaaagctggcgcctccttggtctctaggatccaggctccacagagcacatgactagccaggcccctggcttaagaaggtcgcctaagcctaagagaagacagtcccaggagaagctggccgggaccagccaggagctgggagccacaggaagcaaaagtcagccttttcttcaagggatttccctgtctcagagcagcctttgccccagggaaatgggctctgggctggctgcctgcaccggccatgtcgacccaggacccggacacctggtcttgggctgtgttcagccactttgccttctctggactcagtttccccgtcttgagaaatgagagtcgaatgttacagtatcttgcagttcgtttggatcttggctgtttgagtttgacgggttccttgaaccccacaaaatccctctccaaccacaggacccttcggctcaccaagaacggggcccaggggagtcaggcctattcgctgcacttcctgccaaactttgcccccacaagcctggtcatcagccaggcagccctcccagtgcccaagggccaccaaccccagggaaacagggccagcacagaggggccttcctcccccacagagctcccatgacatagtctgctctgggcggaagagctttgctgccagccagggatgtccagaggtcggtgcagcccctatccctgctcaggagtgggctcagagtctagcaaatgctaaggcccctcaggctgggctctgaaccgaggacctggactcagagccagacagggcagcctcagacccttctctggggctcctggaccattgggccataatttctgagcctcggtttccccatctaaggaacagatgtggtcgttccgccctctcagctggatgagactgtcctggaggatccaccccggaacagacagaatggtgtctctcaaggatggtgctctgagagagggcagagtggatgccccacttgccctagaccctcggtagacgtggggtctctggggccggggtctgtggctgtgactgaagtcggctttcccgttgatgtcttgatgctcctatctgtgcactttaccgtaggtagggacacgtgtccatgcaccacagacacacccacgacacctgatctcgtatcactagcttgcggccaggtcatgatgtggccccggaagctggccctgcgtgccatgagtgcgtcggtcatggagtccggagcccctgagccggcccctggtgacggcacagccctcacagctcaaacgcccacccccactcccaccatctgcaggtggtgaaaacaaaccccgtgtatctctcaataaaggtggccgaagggcctcgatgtgg

SEQ ID NO: 155139 - DNA, 1641 bp, Homo sapiens
acagagcatttttccattttaataagattaacagacctactcaaggtaattttattctgtgtattgtaagtagggataagacgacttagaagacgtgttacatacgaaaaatgtacaaggttaaacttgtctgtactgaattacaaaacctgcacgagcatgttaataaaagagcacacttaaaaacattctcgaccattatttagcctctaaaaattactgaagttcaacagtagtaaatagaggaagctcttacatatatatatatatatatatatatatatatatgatttaatctactggcagttttacttaatgtaagtatttaaaaggtcacattgctattgaatgagtctctagatcaattttagaattgtctctcaaaacttaagtcaaccaaaatattatttcaaatagtaattccaattctgaagaattttaataccagcaaatatattatggcctcatagtagtaactgaaccaactttccaaagtgcctggtagctgtccagatgaattaggctgctttggaaaactgtactgtctctacagccattgagaagccattcagtgccctggtaggggcatgagactttccagaattcacacagcagtctatgatccctcaaatgtaagaggacagggggtcagcctattttctcttctcagtgaatgtggagggcccaagcaatatgacttgcaaccctaagctagaagcttgggatctacagtaaggaggaaggagaattaaagtagagaaagaaaatgtataaggagaaagggaaaagaaggaccaaagagggaaaagaacaaaccccaaggatgcctgctaatggcaggaagtggtaaagtgcctataactacaacttacaagccacccactaattctaatgccattcatttgcctactcccaataataagaaaagctggctttactggaatatagaatctagagcaacattacccgcctcatgttagtgagtaactagtattctaaagttgtttgccatacatatcaagttcttctaacctttgaagcaaaccaaaacacttcaaaactcagggctcccagggctgctgctccagattcccagcattcagcatgcttcattatgtggagaaagacatttcaagacaagctgtatctatacaccttcagaaggaacaaagctctaagaaggtgggattatgttaacacatagtacatggtttagcgtttctccacatttcaaactcaaaatagctcaataactatgctgctacatgagcattgattctgaatgttcataatataaacttcaatttgaagcaacaatgttacacagttcagctgttattaccaacctactctgtaagttaaaatacaaataaaatattaattttattgagtaactaaaaataagttcccactgacttaaaatcgtcaaatggctaactctctctcaactaagaggagcaccacagatggaagcagagaggccaactgaatataaaataaaatttgtcaatccactctataatctgcacttttaaaatccccttttgcatatatgtatgtataggatcacagttgcccaccaacattatgtcaagtctgccctaaagatgacaatttactgtaacgttaacaatttatgca

SEQ ID NO: 155140 - DNA, 1608 bp, Homo sapiens
atgggcatcgtggagccgggttgcggagacatgctgacgggcaccgagccgatgccggggagcgacgagggccgggcgcctggcgccgacccgcagcaccgctacttctacccggagccgggcgcgcaggacgcggacgagcgtcgcgggggcggcagcctggggtctccctacccggggggcgccttggtgcccgccccgccgagccgcttccttggagcctacgcctacccgccgcgaccccaggcggccggcttccccggcgcgggcgagtccttcccgccgcccgcggacgccgagggctaccagccgggcgagggctacgccgccccggacccgcgcgccgggctctacccggggccgcgtgaggactacgcgctacccgcgggactggaggtgtcggggaaactgagggtcgcgctcaacaaccacctgttgtggtccaagtttaatcagcaccagacagagatgatcatcaccaagcagggacggcggatgttcccattcctgtcatttactgtggccgggctggagcccaccagccactacaggatgtttgtggacgtggtcttggtggaccagcaccactggcggtaccagagcggcaagtgggtgcagtgtggaaaggccgagggcagcatgccaggaaaccgcctgtacgtccacccggactcccccaacacaggagcgcactggatgcgccaggaagtttcatttgggaaactaaagctcacaaacaacaagggggcgtccaacaatgtgacccagatgattgtgctccagtccctccataagtaccagccccggctgcatatcgttgaggtgaacgacggagagccagaggcagcctgcaacgcttccaacacgcatatctttactttccaagaaacccagttcattgccgtgactgcctaccagaatgccgagattactcagctgaaaattgataataacccctttgccaaaggattccgggagaactttgagtccatgtacacatctgttgacaccagcatcccctccccgcctggacccaactgtcaattccttgggggagatcactactctcctctcctacccaaccagtatcctgttcccagccgcttctaccccgaccttcctggccaggcgaaggatgtggttccccaggcttactggctgggggccccccgggaccacagctatgaggctgagtttcgagcagtcagcatgaagcctgcattcttgccctctgcccctgggcccaccatgtcctactaccgaggccaggaggtcctggcacctggagctggctggcctgtggcaccccagtaccctcccaagatgggcccggccagctggttccgccctatgcggactctgcccatggaacccggccctggaggctcagagggacggggaccagaggaccagggtccccccttggtgtggactgagattgcccccatccggccggaatccagtgattcaggactgggcgaaggagactctaagaggaggcgcgtgtccccctatccttccagtggtgacagctcctcccctgctggggccccttctccttttgataaggaagctgaaggacagttttataactattttcccaactga

SEQ ID NO: 155141 - DNA, 819 bp, Homo sapiens
gtgtacatcgcagcctttgctgtctcggcctactcctccacataccaccgagccggctgcaaacccttcaaccctgtcctgggggagacctacgagtgtgagcggcctgaccgaggcttccgcttcatcagtgagcaggcagtcacggcaatgaactgggtttcttggaaagtaaagatatgcgtgttggaagcgttgcaggctgcctctggctctccgtcgttcacctcaacgatatgcagccggggctgcatgtacacatctgttgacaccagcatcccctccccgcctggacccaactgtcaattccttgggggagatcactactctcctctcctacccaaccagtatcctgttcccagccgcttctaccccgaccttcctggccaggcgaaggatgtggttccccaggcttactggctgggggccccccgggaccacagctatgaggctgagtttcgagcagtcagcatgaagcctgcattcttgccctctgcccctgggcccaccatgtcctactaccgaggccaggaggtcctggcacctggagctggctggcctgtggcaccccagtaccctcccaagatgggcccggccagctggttccgccctatgcggactctgcccatggaacccggccctggaggctcagagggacggggaccagaagaccagggtccccccttggtgtggactgagattgcccccatccggccggaatccagtgattcaggactgggcgaaggagactctaagaggaggcgcgtgtccccctatccttccaggggtgacagctcctcccctgctggggccgactaa

SEQ ID NO: 155142 - DNA, 1377 bp, Homo sapiens
atgggcgtttcccatcgagggagggggcgctggcatgagctgctccccaccctgctggcaggcaaagcaccaaggactggggctgaaagcccacacatccctcagacccacctagcctctgggagcccccgaggctgcaagtgctcaggggttaactcctgtgagtgcagcgcgggtgccctggccgaaggagacttgaaagaaaggaacccctccttcaatggaaaaaccatcatgttgtcttgtaagaaaatgtcatggaatggcacaaccatttgccagtctgggaaggagtggagtgtccaggtgggcattaggctctctgatccctcatgcacaaccatttgccagtctgggaaggagtggagtgtccagatcacaatcgaagcaatgaaaagtgacattgatgaggtggctttacaagggatagaattctggtccaatgtctgtgatgaggaaatggatttggccattgaagcttcagagatgattgtgctccagtccctccataagtaccagccccggctgcatatcgttgaggtgaacgacggagagccagaggcagcctgcaacgcttccaacacgcatatctttactttccaagaaacccagttcattgccgggactgcctacctgaatgccgagattactcagctgaaaattgataataacccctttgccaaaggattccgggagaactttgagtccatgtacacatctgttgacaccagcatcccctccccgcctggacccaactgtcaattccttgggggagatcactactctcctctcctacccaaccagtatcctgttcccagccgcttctaccccgaccttcctggccaggcgaaggatgtggggggatcctctagagtcaaccgcgaggtcagcaaggattttgccgatttcggaaccaccatcaaacaggattttcgcctgctggggcaaaccagcgtggaccgcttgctgcaactctctcagggccaggcggtgaagggcaatcagctgttgcccgtctcactggtgaaaagaaaaaccaccctggcgcccaatacgcaaaccgcctctccccgcgcgttggccgattcattaatgcagctggcacgacaggtttcccgactggaaagcgggcaggattttgccgatttcggaaccaccatcaaacaggattttcgcctgctggggcaaaccagcgtggaccgcttgctgcaactctctcagggccaggcggtgaagggcaatcagctgttgcccgtctcactggtgaaaagaaaaaccaccctggcgcccaatacgcaaaccgcctctccccgcgcgttggccgattcattaatgcagctggcacgacaggtttcccgactggaaagcgggcagtga

SEQ ID NO: 155143 - DNA, 2112 bp, Homo sapiens
atgcaggagatacatggagcgctggatagccctggagacacggacagtgacatgaagatgcagagacagacacaaacacgctacagagacaaggcaagttccgaggcccacagcccacgcgaccctctcgcgcgcggaggggcgggtcctcgacggctacgggaaggtgccagcccgccccggatgggcatcgtggagccgggttgcggagacatgctgacgggcaccgagccgatgccggggagcgacgagggccgggcgcctggcgccgacccgcagcaccgctacttctacccggagccgggcgcgcaggacgcggacgagcgtcgcgggggcggcagcctggggtctccctacccggggggcgccttggtgcccgccccgccgagccgcttccttggagcctacgcctacccgccgcgaccccaggcggccggcttccccggcgcgggcgagtccttcccgccgcccgcggacgccgagggctaccagccgggcgagggctacgccgccccggacccgcgcgccgggctctacccggggccgcgtgaggactacgcgctacccgcgggactggaggtgtcggggaaactgagggtcgcgctcaacaaccacctgttgtggtccaagtttaatcagcaccagacagagatgatcatcaccaagcagggacggtcagctttagtggtggtagtggtggtggtagcggtggtggtgaagagaaaggctaagccattggagctggtgatggaattggtgctggtggaggtggtggttgtagtgacggtactactggtggtggttgtgacggtgaaggtggtggctgtagatggtggtgcccgtgctggtgctggtggagatcgtggttatcgtgatggtggagggggcagttgtagtgacggtggttgtgatggtggtgatgggtggcggatgttcccattcctgtcatttactgtggccgggctggagcccaccagccactacaggatgtttgtggacgtggtcttggtggaccagcaccactggcggtaccagagcggcaagtgggtgcagtgtggaaaggccgagggcagcatgccaggcaaagccctacatccaccagggtttttgtccccggggcttgaatgtaaaagaggtgaactgtccacaggaacccgcttgtacgtccacccggactcccccaacacaggagcgcactggatgcgccaggaagtttcatttgggaaactaaagctcacaaacaacaagggggcgtccaacaatgtgacccagatgattgtgctccagtccctccataagtaccagccccggctgcatatcgttgaggtgaacgacggagagccagaggcagcctgcaacgcttccaacacgcatatctttactttccaagaaacccagttcattgccgtgactgcctaccagaatgccgagattactcagctgaaaattgataataacccctttgccaaaggattccgggagaactttgagtccatgtacacatctgttgacaccagcatcccctccccgcctggacccaactgtcaattccttgggggagatcactactctcctctcctacccaaccagtatcctgttcccagccgcttctaccccgaccttcctggccaggcgaaggatgtggttccccaggcttactggctgggggccccccgggaccacagctatgaggctgagtttcgagcagtcagcatgaagcctgcattcttgccctctgcccctgggcccaccatgtcctactaccgaggccaggaggtcctggcacctggagctggctggcctgtggcaccccagtaccctcccaagatgggcccggccagctggttccgccctatgcggactctgcccatggaacccggccctggaggctcagagggacggggaccagaggaccagggtccccccttggtgtggactgagattgcccccatccggccggaatccagtgattcaggactgggcgaaggagactctaagaggaggcgcgtgtccccctatccttccagtggtgacagctcctcccctgctggggccccttctccttttgataaggaagctgaaggacagttttataactattttcccaactga

SEQ ID NO: 155144 - DNA, 1318 bp, Homo sapiens
ttttgttattttttttttaatttaaagaaaacttctttattaagtaaatggacagttggtacacagatattgcaaaaatttcgaggcgggtacatgaatgactgaaattcaggagacgcggggagttagcacagaaacactttcctcattcagagctcttttggctgcgaagaaacagacacccaatcaaaatcagcttcagcaaaatgaagagaatgtatcctgaacaagggacgctcacagggcctaaaggaagagtgctgggccccctgggaggactgagggaagccggcaggtccctgggaggcggtgcccggctgctctccaggcgcctgtgattcctctggtccctgccttggctatgccgtatcttccctctgagccagagcccattttctcctacccacattccatgcaaggtgccccatccccccgcaacacacacagacaaacacacacacatggacacagtccacagctcccagggtttcctatgtgttcaggtaagggacctgcaaagcctgaacagcctcccctaaatctagatgcccacctctcatcctttcagctcccatcagaggatcaaggggcccaaattcgcagaaaaggggagggtctaagatgagcagtcaccctgccaagaggtgtctgcctcaacattagtggcgtataacaatcccatgaggtagctttaacctcataggtaatgaccctaagaggtaggaaattcagtgcctggtccctcagcaggaaatgacacagccaagacttgaaccgggcttgtgtgatgctgcactagcccccgggtcatcccatcagccaagtccagcccacagctaccatcccagactccagcaggttacaggtccatcgagaggcatttctcaaaatcagcaatccggtgtttgcccggtacaccaggaaatgagtatcccagcttcacagggacactgactggaaggaaggaagacttctctgaaggagcacagagctctagaaaccagagaagtttcctctgagccccttgggtctgaggctgccaggttcacactgcagatacttgtctcagggcaggagaggaggctcatttgcatatacttgccaaaaatcacaagcagacatctagagatccccaggagaagctgacacctggctgacacctgctgacagtaactgctcctcccacctcctggaagctatgttaggaggaccctcccagagggcaagggaggagagaactgacagacccttctacccaggggcctcatgtacttcccagcccatgtgcctggaattccaccacgctggtcagagcggc

SEQ ID NO: 155145 - DNA, 397 bp, Homo sapiens
tgaatttcagactctcgtgtcctatcctaggctgaccatttcccatgcaccagtcccatttcccctgagtcgggcactaagctctgtgaggccagtcactccatcctctgttctgggatcttgcccaggtgccagaagagtgccagtgaacttgcggatatggaagattgtacacgcagagtgagatgggagtgggagggccaatctgatacagaagggggtgaaggcaatcctcctctggaatgtctcttccctcttcagtctgggttctgcctcagccacgaactgggaaggagtgaggaacatcccaacggcaatgagagtatcccagtgactccaaacaggaggaatcagtgttcagaaagtcaggcactaagctttactgaaacctactggg

SEQ ID NO: 155146 - DNA, 1680 bp, Homo sapiens
caatgagcaggggctgggagtagagggtttctggggcctcagggttctgggaaagcaacagctatcagagagagaagggccagaccccatagcctcttagattcctggcagtagaaggagaaggatgggtaaattgacctctgaagtccctgaccattagcatggtctaggatcctttctagaaggaagatctgaggctctggtgctcagggggatggcttgggccttttctctcaaccttggctgagcctaccccttactttgccaaagacttgaggaccctgtatgtcttggagttcagtcccctcctctgtggggctcaggtgattgaaattttgggatgaaacatttctctacttcaagaccacctctccctgcaaacaccacacacacatggcatgcatgtacgcacatgcgcacacacacacgcacacacctcaataatttctctcaagtttcctgagtctccagaaaaacagcactaacgctggacctgtctactctcagaacccggcacagattctctcttgatctccttttggaatctgagattcttagaagacaggatagggttaaatttagtagcagctcagttctagctaaatcactagaggaagttaattaactttaagccttcatttctccagcactaaaatgggagtggagagttggggtggaaataagacatccttaaaaggttaaattgtctgcaaagcacctagcccagtgccgagctcccagtaggtgttcagtaaagcttagtgcctgactttctgaacactgattcctcctgtttcggagtcactgggatactctcattgccgttgggatgttcctcactccttcccagttcgtgggctgaggcagaacccaggactgaagaggggaagagacattccagagggagggattgccttcgtcaggggtaagggggtggggctgctcagggggccctaccctttcacccccttctgtattcagatttggccctcccactcccatcttcactctggcgtgtaacaatctttccataatcccgcaagtttccacttggcactcttatgggcacctgggcaagatcccaaaacagaggatggagtgactggcctcacagagcttattgcccgactcatgggaaatgggactggtgcatgggaaacggtcagcctaggataggacacgagagtctgaaattcaaggcacccagctttgaagtggtttgagaagctggaaaccaaaacatgggcctaaaagaagatagggccaaaatacaagaacgaggaatctggaactgaatgtggagaaagttagcccacggaagccatgaaactgtatccctgcacaaagtccctccttccccgcctccctaattcattcatgcccaaaaggccttacgtgaaattcccagcccagagtactcatgacttgagagacgtggacagagccagcttctaccttgcctggccgtctctcccctgtcttaatgtctgctcttgctctaagctccagaagagtggcgggccatgtatcttcaatatgtttttgctgtatgggcaggttgtcttattatgtgatcaacagatgtccaggaactaatgagtggaatttaatattattgtcaaataaaacttgatttgtccaaaaaaaaaaaaaaaaaaaaaaaaaaaaaagtcgtatcga

SEQ ID NO: 155147 - DNA, 797 bp, Homo sapiens
cggacgcgtgggtgaagctcaacactatttaagtaaaacaccagagtcatctgcacaaccaagtgaaacaattctttgggatgttcagacagactcaaatcctaatcaggaaaaagactcatctagtaatgagaaacaaactattagtctgccagtttctactagcaaatcaaggaaagagtctacagaaccaaagacatgtatagaaagtatggaaaagaaaacagacagtttagttcagaatggaaacgaacgttctgatgacactgtttcaaatataagcttgatagaccaaaagatgcctgacatagagccaaattctgaaaataattgtagtagtagtgatatagtcaatggacacagtgaaatagagcaaacacctttagtttcatcagatcctgctttgaaaattgatacaaacagaatcaggacagaaaatggttccattttgcccagtgttgtaccacaagaacacaacaccttgccagtatctcaggcaccttccaaaccaaatctgacaagtgaacatacttcatatggcttaattttaacaaaaccatacgtcagaccattgcctcccagttaccttgatgaacggtatcttagtatgccaaaacgcagaaaatttctgactgatagagtagatgcctgttctgatcaagataacgtgtataaaaaatcagtgaaaagattaagatgtggcaaatgcctgaccacctactgtaatgcagaagcacttgaggctcatcttgcacaaaagaaatgtcagacactctttgggatttgattcagatgat

SEQ ID NO: 155148 - DNA, 2571 bp, Homo sapiens
cgacttttttttttttttacatatgcaaaataatcttgtttattagaaaatgaacattcacaatgtaaagtagaaattaaattacaaataagtcttcaatggtcaaaaatggtgcccagaatttcttctcaaaataagttaatctattcttaaacagatgcaggtaagtagtttatccttgtcaaaacaaaaaattaacagatttcactttatgtaagagataaggtttatatgaacaagaagagtttatttttaaatgtaaagctgaacaagatagaatggagatgctttgtgaagttataaatcccttcaaaatatgaaaatcatcctttcaagtttaaatttgttttcaaaaacatattttctcttcttaaatatgtactactcttaacaatatatccataccttaaaatctcctgttgtcattttctctttatacgccaacttggcctactcaagaagacatcaaacatggtgattttttttcctcaaactttatctccttgctcttttcccaatcccatgttacttcctttcgccttcttttgtgccaagatgagcaaggtataatcctccaaagaagaaaatgctccaaagaaaatgtttgtttcccaggctggtcttgaattcctggcctcaagcaatcctcctgccttggccttccaaagtgctgggattacaggcatgagacactgcacccaacctataaagtgcagattatatagtgtttattctcagatttgaaactatttctaacttaaagtagaaaacatttggaaaagtgtttagaaatatttttgcattttcttaacagtgcttatcaatatacatagttatctactagttccttttatcagcattcaacttatgtagaggtagaagttaaacatacagtgttatttagccaacttcaggtaaactcagtaaattgttagattaaagccattttgcctcaaatacttattagcctgactagtttggggctgtcagggatcatccaaattaaaaatccaactaaaattctgcagctctacacaactatgcagacgctagattgaaaactgttgtgttcctccccgccactactgagagatgggaaaaattaaagtaaattaattaatgttttactaattaaatgtttttctccagtttaagggggttgaaaaatagcaataattttaagaaaccatttactgttttgtatatatatatataaaataacacatatctggattatgtttctaatgtgaatttttggcatttgaaaaaaagtaggtatacatattaggctaataggcagtgaagtatcttgatctcttaatcctctgtattgctcaaatattagcattatccatactcatttattaatgtaggggttacttagtgaaaccctgaactaaaataaggcagaggtgtagtattagaagaaagactcatagaaggcaaggtaggatgttaggcacgctaaatggaaaatatgtgttataatttttatttcataagtgaacttgataatagaaaatgcatttttttataaataaaaagtaggtgtctgaataaaaatacctctacttgggtagaggtatttaaaattctataattttgttctgctatggctaattcttacagaaccctctttctggttccactgtatattattttaatgacacttctgcagtgggtattaagaatacagcttcacatttattcatcattgtccattcactcattagttcatgcaaccacaaaaaggtattataagaataatatttcatttctgaggtaaggaaattatcatctagtatgtttttatataacctactattcacaatgacatgtagaattctctctgttattcaacatatgttcttgttcttcaaaatctgcaatatctgtagtctgattcttggagactggctcaccgcaattgtctagcagagctttagaccagggaagtgccacacagcaagtagtttccatcacagtcttaggctagtttattcctgaaatcctcccatatcttacaggaaagagccaatgaggtcttttgtaaaccactcccaggagggtgatggtgagcactattattccacacaccaggctgaatgcccatcgtggtccccagtgagcatacacttggctgatgaacataggcccaagaatccgggctccacttccagatgctgttacccagcccatgtatacaccctgttgggggtgaaatggaggacaagcagattgatattggggtttagttatttaaaagcaaagaaatggtattaccaaactacagcaaacttacaagaatcatttctgcatcttttacttttaaattaaacataaaatgcctcctataaatatagcatttaatattaagtcagattaaaaaaaataaaaggagtgtaaagggaaaaacttactgtctgctgaagccctgggaataataaaattgattaaaataccttttaaagctaacatttattttgtacctgctacatgccagtcactgaggtaggtgctttaaatacatcatttgtaatgttcacacccacgcgtccgcggacgcgtggg

SEQ ID NO: 155149 - DNA, 753 bp, Homo sapiens
ctttattaaaaataagctgtccaaaattatttgacctttatggaataaaccaacaagctcatgcagcaggcttcgtttcctctgtggtaggtttttttttcagctactgatgtcttggttggtagctgctgccctttttcccaccagaggtttctcctgcttaaaaacaacaaccttctttcctttcttccctaccacaggcttcttgactgcaaccccctttctcatctgatttggcctctagtgctgctggtgctgctggtgctgctggtgctggtgctggtgctgctgctgctgctgccaccgccgccgctgccttatccacctggagtttgtggttgctggcctggcaaagcctgcacaggaaaacaaaaacaagtaagtaggcaagccatcaagcagaaaaccaatttcaaacttctccaagttataaaaccagcaaagaagggacttttgtgggcagaaagtgccaactttttagatatagtgataaggaaagttgaaaggactgaagaccaacggatgacagtgcagccgactgaagggagtgggatgccagaagaggtggccgtggagatcagcagcagcgaaagcgctctgggcttagaagaggaaaagggctgcgtgagcccaagagcttgcatcggaaggctccaggaagagcatctgcaaaaaagaggattccacgggatgacccccgacaactcttggaattctaaaatcctatacccttgcccgcacccattcgtgtag

SEQ ID NO: 155150 - DNA, 458 bp, Homo sapiens
  misc_feature (1)...(458): n = a,t,c or g
cccacgcgtccgggctgccctgacagcggagcattttgcagcactccagagcctgctcaaggcctcctcgaaagatgttgtcagacagctgtgtcaagaaagcttttccagttcagcccttggcttgaaaaaactcttggatgttacatgttccagcttgtctgtgacccaggaggaggcagaggaactgctccaggctctgcaccgcctcactaggctggtggcattccgtgacctgtcctctgccgaggcaattctggctctctttccagaaaatttccaccaaaacctcaaaaacctgctgacaaagatcatcctagaacatgtgtctacttggagaaccgaagcccaggcaaatcagaatccaagaagatcccagcctatgcggagacaaaccctccatctcagctgtcaccgtggagctgagcanagaaacactggacacccatgtagatggn

SEQ ID NO: 155151 - DNA, 492 bp, Homo sapiens; identical to SEQ ID NO: 141978

SEQ ID NO: 155152 - DNA, 1352 bp, Homo sapiens
ttttttttttttttttgaagttttagaactgttgtttatttccaattattcccacttcttcacctaggagtggctgcattagatgaaggaagagggccctggtttcatgaagaagggaattagcacccatttcagacttcctacactgaagaggggttccagtatggtggagggggctcaaggaaacactctggatggaccatgctctgtgggcctctgcctgggcttccctgacagaagaaccaggaacctgctgggcatcaacctggtccgatccctccatgtgttctgggattgggaaatgaactaattaggagctaatgtrrggaaataaacttacttattgggatagggctgcatgatttggggcctgaaatttctcaaacagctatgcaggagggcagctgactgatgcaaattttccctcacccctgccaatggtggtaattaaagttggcactcaggagcttttcaaaagatggggggcttctgctctccagcttcagaaagagaaagaagatgagtgagaacagcggggtatctggctggcttcttcgcaatccaactgtaccttgtggatgcgcagtagccccctgctgtccccaccatcctgcctgttgtcagctgcagctgcaagggcagcctgcatatggggagacatttatcactcatgagcagctgggtcatggcagtggccctggcagctggctggatcatttactggccacggcagagagttggtctcggatgcggcccaggccatctaacatggtgtccagtgtttctttgcctcagctccacggtgacagctgagatggagggtttgtctccgcataggctgggatcttccttggatcttcatctggagcaggcaggtggggacggccatgcggcctgaatgctgtctgaagaaggttttgaatatcccactctccagtcccagatcgaacccaggcgtggacagagagatctgcatttgcctggggctttcggtttctcccaagtagacacatgttccctaggatgatctttgtccagcaaggtttttgaaggttttggtggaaaattttctggaaaagagagcccagaattgcctcggccagaggacaggtcacggaatgcccaccagcctagtgaggcggtgcagagccctggagcagctgcaagataaacggaaccacctgtagttcctctgcctcctcctgggtcacagacaagctggaacatgtaacatccaagagttttttcaagccaagggctgaactggaaaagctttcttgacacagctgtctgacaacatctttcgaggaggccttgagcaagctctgcctggcttccctgacagaggagca

SEQ ID NO: 155153 - DNA, 1329 bp, Homo sapiens
atggtcggaccacgcagccagcctgacacagccaatcgcgctcccacaggtctgacacagctgatcgccctccaatcgccctcagcccacaggcctgacacagcccatcatgctccacccacagacctgacacagccaatggccctgcacccacagcctgacacggcgatggccctctgcccacaggccccgaaacgccgcacccacccggtgctcaatgaatgcacagtgaatgaccgagtgaacgacccgcccaacatccaggtgcctcggccaccgggtctgctctctgctcctcctcctcccccgatccttcacctcacactcctccaggcatcaccggacatgcgtctttatggactggtgttcttatttctgtcaggtggaactcgccagcgctgctcacctgagctgctagtgagggcagctggcatgtgcgcgccctctacctgcactcgtgttctgttcacacaaagggacagaggccagagccctgggcccctgcagggcccctgccacccatacctcgccccacacatgacctcctgccggctcttctggttctttgctggccggcagaccactgcgggggttcccgtgttgaagcaggtgggctgcaagctgagcctggtcttcctgcagtactgcatcatggccaacttcttctggctgctggtggaggggctctacctccacaccctcctggtggccatgctcccccctagaaggtgcttcctggcctacctcctgatcggatggggcctccccaccgtctgcatcggtgcatggactgcggccaggctctacttagaagacaccggttgctgggatacaaacgaccacagtgtgccctggtgggtcatacgaataccgattttaatttccatcatcgtcaattttgtccttttcattagtattatacgaattttgctgcagaagttaacatccccagatgtcggcggcaacgaccagtctcagtacaagaggctggccaagtccacgctcctgcttatcccgctgttcggcgtccactacatggtgtttgccgtgtttcccatcagcatctcctccaaataccagatactgtttgagctgtgcctcgggtcgttccagggcctggtggtggccgtcctctactgtttcctgaacagtgaggtgcagtgcgagctgaagcgaaaatggcgaagccggtgcccgaccccgtccgcgagccgggattacagggtctgcggttcctccttctcccgcaacggctcggagggcgccctgcagttccaccgcggctcccgcgcccagtccttcctgcaaacggagacctcggtcatctag

SEQ ID NO: 155154 - DNA, 3943 bp, Homo sapiens; identical to SEQ ID NO: 147867

SEQ ID NO: 155155 - DNA, 2793 bp, Homo sapiens
gcccctgctggacagcaaatacgtcctctgtgtgtgggatatttggcagtcttcagggtcacagaaggttctgatatgtgagtcccaggtcacgtgttgctgcttgagccctttgaaagcatttttactgtttgccggaacagcgcacggctcagttgtcgtctgggatttgagagaagactcaaggctgcattactctgtgacgctgagcgatggcttctggacgttccggaccgccacgttttccaccgatggaatccttacctcagtaaaccaccgaagccctcttcaagcagtagaacctatctcaacgtccgtccacaaaaagcagagctttgtgctttcacccttttctactcaagaagaaatgtcaggtttgtccttccacatcgcttccttggatgagagtggggttctcaatgtatgggtggttgttgaattaccaaaggcagacatcgcaggttcaataagtgatttaggtctgatgcctggagggagggtcaagctggtacatagtgctctgatccagttgggtgacagatcctaatcactttattattggcacagacatggtgagtagtattttaaatttaatcctattactcattctccttgttttcctgacttacctgataaatatcttgatttaggattaacttactcttttcttttataaagtttaaattgtttgaggaacagtagctgtatccaatctcgtgtgtaatgcactcgttcagtcactcttgggcttcttcttcacagggtctcataagccatggcacaagacaagatttgagagtggctcccaaactattcaaacctcagcaacatggtataagaccagtgaaagttaatgtcattgatttttcaccatttggagaaccaatatttttggccggctgttcggacggaagcatcaggctgcaccagctgagctccgcgtttccgctcctgcagtgggacagcagcacggacagccatgcggtcaccggcctgcagtggtccccaaccaggcctgccgtgttcctggtgcaggacgacacatccaacatctacatctgggacctcctccagagcgatctgggtcctgtcgccaaacagcaggtctcccccaacaggctggtggccatggctgcggtgggtgagcctgagaaggctggtggcagcttcctggccctggtgctggccagggcgtctggctccatcgacatccagcacctgaagaggcggtgggcggccccggaggttcacagttgcgtggaaaggaagtggagtggacacacggcctctcgagtccacacccactcaccgtccttgctgctgttttgcaacccgcttgatgattggtctagaagttttgagactgaggctcctaagcattgggtgttttttgagccatatagaaatgtgaagttcgtgaagaaagaaacatccaaaaaggccaacgatctgcccctcagcctcacccccagggaggagctggcccggtgcttgtgggcccctcccagcccgtctgttgagggccccatgacagcagaggcagtgccgtggaacgaatcatcgcacagcagcaaaggtaggagggaggggcccgagccgcacagacggcgcagttcagcggagcaggaggtgcaggcggcgcggcttcagggaaaggagcggaaagctagaggagagcatgggaggagcatcaaaggccgggagaatggggcaaagcaagacaagcctagacaagccccacctactgttagtgtctttagacaaccttctcctccctccagagaaagtgcccattctagtgggacacgattccagctgggctgcagccacacggagctcaccggaggccacctggcaagcctctgtgattatctgctgcagacgccgaggcctggagtccctgagcatcgagcctccccggggagcaaatgcactcggcactcccacagccacaccctaggtcgtggagagggtgtggtctgcacctgcccgtcagccacagacacgccccaggtcgtggagagggagagcaaccccctagacgaagtgaggcggggacacgccggggagcacaggctgctgagccagagcctgagcacagtcggagccgagagcatcagcagcaagagcactggctgggcccctctgaacgctcctgtgaggacgttccttggggaatcacttggaagtgctttcagctcagcctccatagccctgcggacctcagtgaagcgcaggcataagtgggcccggccacacacgaatggggcccggcaacccccagggggcaaaggcaccccaccagggggaaaggaacacccctatgagatcaaggcgccccccccatgtgtgtcaaggtggctgtcctcgccgccgccaggcaccccgagctgcaccactgtgaggaggtcatggctgcccagtgccctaaagcactgctgcgtcctccgacgcgagatggctgtgtgccaccgactgtccaaatgccctgccaatgccatcgtgaagcatccgtgtgaaggaaaaagtccaccttaccgtgcgctgtggcatcgatcaggcgtgtggacagtcgcaggcacgcagcggtctcccaacatcagggcacaccgcgatcagactcttcgtaataattatacaatactaattccaaatggaaactggaggcatggagcctatgccggcgtctccagcttctccagaggtaggaatggacactcaggtctccactgcatgctggtggatttgggagagtgtgatccatccaagccatgcgaaaatctgcacgactga

SEQ ID NO: 155156 - DNA, 3283 bp, Homo sapiens
cccctgaagcaaaataaatgaatatgacatgtatatcagaaactttgggaaaaaaaataccaagcaggcatatgttcagtgtaacgaagataatgttgaaagagacattcaaacggaggatatagagaccagggaagtgtggacccagcacccgggagaaagtactgttgtatctggaggcagtgaacaaagagatacctctgatgctgtagttatgccaaagattgatactccaaggttatgtagctttctgcgggctgcttgtcaggtgatggccgttttgctggaagaggatcgcttggcagctgaacccagctggaatcttagggctcaagacagggccctgtattttagtgacagctcatctcagctgaacaccagtctaccattccttcaaaatcgaaaagtatcctccttgcacacctcccgagttcagaggcagatggtggtctccgttcacgacttacccgagaagagctttgtgcccctgctggacagcaaatacgtcctctgtgtgtgggatatttggcagccttcagggccacagaaagttctgatatgtgagtcccaggtcacgtgttgctgcttgagccctttgaaagcatttttactgtttgccggaacagcgcacggctcagttgtcgtctgggatttgagagaagactcaaggctgcattactctgtgacgctgagcgatggcttctggacgttccggaccgccacgttttccaccgaaatgtcaggtttgtccttccacatcgcttccttggatgagagtggggttctcaatgtatgggaagaggacggcctcccgcgcgctgcctgcttcctcaggaagaggacggcctcccgcgcgctgccggcttcctcaggaagaggacggcctcccgcgcgctgccggcttcctcaggaagaggacggcctcccgcgcgctgccggtttcctcaggaagaggacggcctcccgggcgctgccggcttcctcaggaagaggacggcctcccgcgcgctgccggcttcctcaggaagaggacggcctcccgcgcgctgccggtttcctcaggaagaggacggcctcccgcgcgctgcctgctttctcaggaagaggacggcctcccgcgcgctgccggcttcctcaggaagaggacggcctcccgcgcgctgcctgcttcctcaggaagaggacggcctcccgcctgctgccggtttcctcaggaagaggacggcctcccgcgcgctgccggtttcctcaggaagaggacggcctcccgcgcgctgcctgcttcctcaggaagaggacggcctcccgcgcgctgccggtttcctcaggaagaggacggcctcccgcgcgctgccggcttcctcaggaagaggacggcctcccgcgcgctgccggcttccacaggaagaggacggcctcccgcgcgctgccggcttcctcaggaagaggacggcctcccgcgcgctgccggcttcctcaggaagaggacggcctcccgcgcgctgccggcttcctcaggaagaggacggcctcccgcgcgctgctggctttatctgggctcctgaggttctcctttgagtgtcatcacacccacacttgcgactccttcccgccacagagggagacctcagagtggacgtccagtctctctgtgcgggccaagtgtacacagttttgttccgtcacaacttccacgacaggccagtgtgaggtttttgagctggtgctgactgaaaactgtcagctgcccaaggacctgggagctctgctccccactcctggtgcatcaattagagtgcgctcagtagtcacattgcagtccgcacacttctcgtactacatgcgagacagcagtcgcacatgtagcgagaggagcttcaccatgagcgacacgctgtattcattgcgccaagagacgttctcactcgacacgatcagcgcacagcattactattcaccagcgccggacgaggtttgccagaggccacgaggtggctatactgctcaaattgttgatcgggtagccatgcaaccggcatatctttcccataaaggtaatgaattttggggcactacacaaacactgaatgttaaatttctgccttcagatcctaatcactttattattggcacagacatgtgggacagcagcacggacagccatgcggtcaccggcctgcagtggtccccaaccaggcctgccgtgttcctggtgcaggacgacacatccaacatctacatctgggacctcctccagagcgatctgggtcctgtcgccaaacagcaggtctcccccaacaggcaaacagagaaacagaacaagaagaaacggatgtttggaaggaaggagtttagatacaagcaaggatttaacacttttagagttacgttacaatctctgacaatgacttacccgttgcatgtggttgagaagcaggtgggctgcaagctgagcctggtcttcctgcagtactgcatcatggccaacttcttctggctgctggtggaggggctctacctccacaccctcctggtggccatgctcccccctagaaggtgcttcctggcctacctcctgatcggatggggcctccccaccgtctgcatcggtgcatggactgcggccaggctctacttagaagacaccggcgcgcctttatcggttgtatggcgggtgaccacggcgcctaaaacggtgttagatgcgcggaacgccgggcaccttttgttcgtgtttatatcccgggataccccgggccaccttaagttcagtttttatattcaggttgaacgccccggccacctttatgatccagcaccccgagtgcacactgtgagaggtcatgctgccagtgccctaaagcactgctcgtccgcgacgcgagatgctgtgtgccaccgactgtccaaatgccctgccaatgccatcgtgaagcatccgtgtgaagtaaaaagtccaccttaccgtgcgctgtggcatcgatcaggcgtgtggacagtcgcaggcacgcagcggtctcccaacatcagtgcacaccgcgatcaggtgtgtggacagtcgcaggcacgcagcggtgctgcagcagcagggccaccgcgatcagggcgctgggtgcccttccagggtgacctcacgggtgcccactgcagttcctgcttctccccacgggaactgagcgtgccgctgggaacacagcactcactgtgcacagttctgcacatggacttatgtggacaccacctgcttgcattcatcccctcctcctcatctctcccttgctga

SEQ ID NO: 155157 - DNA, 648 bp, Homo sapiens
tttttttttttttttttgaaacaaaattttgctcttgttgcccaggttgaagggcaggggcaccacctcagctcactacatcccagctgggttgacaagagcaagactctgtctggggaaaaaaaaaaaaaaaagccaggcccggggactcacacccgtaatcccagcactttgggaggcccaggtgggcggatgacttgaggtcaggtgttctgcccgcctcggcctcccaaagtgttgggattacaggcatgagccactgcacccagccattgtttctaatgcttataacttatttttatctcttaatgcatcagctggggcagtcagtacaacatgaacagtgataaaggagatatttttcttgttcctgacttaaatgggaatgtttctaaaattccaaccactacctcagtgtaagacaaaaggtaggtacccctacaaaataaatctggtgacgtatttaccctctaaattaagtgttcaagtactcattagctcattaagaaatggctaggccagaaaatgatcaggttagttctcaagtccttatcccagcacaatgaaacttaaagtagtatttccatagcgcaatagccatttaagtttctgctgcaacgagggtctataaaacaaaagcaatgtaat

SEQ ID NO: 155158 - DNA, 1810 bp, Homo sapiens
aggatacacagtaaaacagtgatatcttggagacaagttatcaaatccccccacactgagcagatgccagacaacagttgagtgcgcaggaaggacacaccaggaccaggcagttgcttcaggcgcttttattaggttccactgcaggggctggggtcaatgtaatgcaaaatccaagcccagtgatgcaacacctgtgagccgaaacagagccgaagcaggagcacctgtgtcccaggagcagctggttggagggagccagggccaggccccaccgtcctctcgggaccaggagactggcagccgctgtgttcacctgggcaggtgtgcacccagtcacccccacttggattatgggtgctggtaacattgagagggttgtgtccacaccaaagggcaggttgaagatgccgaggttggggcttgagacctcccttcccacaaagaggaggtggctgagcttcccaagggccttgaactctcaacagcagggcttcaccccccaaagcctgtatgcttagctcttgactctctttgggacaataaaataaagtgcagttactgaacaaagagtaactcaaaaccagaatcagacaaaccgccaatgcttttcctttagctaaaagacaaaagaaaacatgaatgatgtgaatgccggaacttccagagtaagggaaatgctggtggaggacaacggaaactataatagcgtggtggataaggacgaagcgaagtgggaagaggaacttggcaacgcggctctctctagaagtccgtgctgtccagcctctgcccagtggtgggggaaggccttggactcacagggaagcaatgcaggaagccttggccacctaggctcacagctcatctcaggaccagaggagacagcagaggacaaaacttcagtgtgacagctgctaggagggagagcagacagcccgcggtgggcaagctgggagttgcatccgcagcagtccgcttcaaccaggctccttctccaacccttcctgaccctccacaaaagctcggccgtgaccagacacaacccaactggcccctggtcccaaagagcaagatgagctgcttgggccttccacttggtgtcccatgcccaggcggacctggaggtgtcagccatggccctgaccacttcagaagccaacaggcaaatgttctctgttcatagtgccaagaatgtgggtcacgtgggcttaccccccaggatggacacagaagtccctaagcagtctgcagctgggccagcctctgctcgtgggtgcagagcagcccagatgtggccatcattaaggcaaagaagcatcgagatgcccaccactccccgggtaagagccaggccccggcctggccacgccacagaggaacgcagagcacacaagcaggaccccaccacgtgcgtgttccagatcgcccagtctccctctattggtacactatcaattgtgcagtgccccagggaggtcccaaatggccctcacaagaggcacagcccctaacgccctcagccaggcggtgcagtgggacgaaccagcgtattggggagggccagcgcatcggcaccggtgacccagctctcccacccaggccatcgcagggcagcctcagggcaggcgccaccactgctcctgctcagcccgcagtatctgcagttgctgcagctgtgtggcttggtagaaaagtctcaggcactgaggtttacttcaagggagaactgactggtgcccccgtccacactcatcaccctggacacaacctcggggaattccaccacactgggctactcaggcgtcac

SEQ ID NO: 155159 - DNA, 424 bp, Homo sapiens
gggggcagcctgtgtcaccttcttcacgtccttcccgctcattgactgccctcgcccacgccgcctcaggaccctgttctgccccaaagcccggagggcggagagcccggcgaaggatgagttggccagttccccgtcgcggcccggcagcttaaaggctaagggaaaaggggtttcacgaaggagcggggttctttttaataggggacatatcggttgggaagactcgctcacccgcttcccggctccagcgccccagttccctgtccctcttaccgtagttcccctccccctccacacccagaaatagcccgcgacaccaggaggccgccagcttccccaggagcggggagggggacgcccggggtagaggagggtcccatttacatgctctttagcctgccaactcgtgctggcctggcaa

SEQ ID NO: 155160 - DNA, 2783 bp, Homo sapiens
  misc_feature (1)...(2783): n = a,t,c or g
ttttgcgattgctttaaagaaaggtttattggctacatacatcctaagaatgtactgtaaatggagcaagatctaaataaaagcttttcaaatataaagcggttaaagttaactaaaccactagcaatgtttgaaaacagaactctaaaaacttttttttcattttttttttgtgtggttggctcttaacactaaaaaaaaaaaaaagttcacatttcaagttataaacttacttacctcagtagtgtacatgaaatggttttgaaacaataggaacagataagtcccaaataggaggctcactgatacttaattggccatgtcaccaatgtttgtttttaagggagtttggtggttgccatgttatcattttttttattctttctttctttttctttctttctttctttctttgctttcttttctttcttcctcttcttcttcttttttgcaaataatttacaggcatatgtaaaatacagtaagaatactgggtcatagtttcatccagtgaaactctgtgacaatccttcactagaaggagaagtacttttttcacacagtcaggggatgaggatctgatccgaattacattttgtccgagtcactcattcccacagatttgaagtttgaatgcagcttgtggggtacatcatcaaggaacattggcacaattattttaatgtcatttaaaagaatggatgggaaagggaatgttaggcgggtgcttaaagggcctcaggtagggcacttcaataattttataggaataggttaaaattaaatattggctttacacataaaaaactcatcctcatttccaagatgagggggaaaaaggcatttggggaatctcttaatttaaaacaaaacaaaagtacttggcctaagggcatgatccctcttatgaatccacaagaattcagccatcaacaaaaatcccgtgagtggaaaattgtatggatctctaacatgacataaataacgcaactgcgttttacttgctaccttattgcacacctcacttccttgattgagcctttaaaaaacaattccaagttgatattttttttttaaaaagtagatgacaatcttaacattttcctgtattttacattcactctgctaaacaaaagcctttaaacaggcacaaaacactgcaacaatacattaacttcctaataaaacaaacctttttaataacattgaaataaaatggtttcattttgcattaaactacataccatgaacttctccaacataaaaggactaaaaacaagcattagaagatatttacaaactatctttaaacttatacaggtctctcctcctcctcctggaatgtgcacacccccaatccacgttcacccagttcaagtgcacagcaaaaggaagagaggcccattttaataaacataatgtttccaacacccttgaggaccatggacagttttgcaagaaacatggtaaggcaactagaagcataactttctggctggaaaagagtctctgggggttcttgntcttacggattaacatacatttctttgtccctacaaactcatacttccaaaaatgaataaaagcatcagaaatgggcattaaagttttacattgggcaattaaatagctatgcaaaggtgtcttatgcaactcgattaaaaccttgtgcttactttgctactgaaaatagcacacgttagaagacaatacttccccaaccatacaaaaaaaaaaaaccaaaaaacaacgaaaccaaccaaacccccaaccaaaaaccccaggaaaaagtataaaaaccccccatttcttatatcagagctacttatcagtcctaggcttgccaaacattgcggtgggattgggaatctggggaggaggggacagggtgagagatgtgggagtggggggcatgtttaaggctaaggcacatggagaatgagccccggctaacggtggcaaaggagagctttccagtgtttggactcagaagtgcggcatagtcttttcaatggtggcttaaggagagatccagtgtttaatttcttttaaaaaatagtaccgacatgatgatacatggtaacaccatcaacccttaattccagcaggtaatacagaggttttactcattttaaaattgcactttccagtataacctttaaaaataattgcttttgtagtatttttttaaagcactactgtttgtatctttaaatattgtatatatttttccaaaatagttccctaggctcctcaagtgtgctttttttaatatatagttgatatattatgggaaggtactacaaaatagaaatctctggagtgcagaagttaagaaaataacccttcatactgaaaatatatccttaaaaaaacaacaacaaaaacctctatacaaatgtagtacagccttaccaaatttttaccaagatggaatgaaggcacggaaccattgccaagtcttttggaaatgtatgaaccgtaggcatgcctaagttgaaaaatagtcttaaaaaacgtagtgaaaacttcatgtatataaaataattcagaaataaatctgctaacattcttccactttcaggttgcatgtgtgaatccaacatgtttccttcttcataaatagtcaagccgttccttcagtggtgtttgtgtggtctgtcttcgtgctggtcaccagccctcagtatgtcagggtagacgtccggggatggggacctgaatgggcaagcagcaggggaaggcctgaaggtatggtagcctgcgtatcctccataccacgg

SEQ ID NO: 155161 - DNA, 430 bp, Homo sapiens
caggggcgtgcttgcggcaaccctgtaaccgccggtgcgcaagttggaggggcaaggggctgccgtgtcctggtctggaggcggcccaggctgccttggtgattctggcttcgcggcctcatggcttgcggccggtttgcgcaacggcctgcgaaccaccaggcgcgtccccgccggcttgggtccgccccgaagcccagtccctcggcctggcccgctatgccctgcacactggcggagtctggcgtggcgcaacccggcgtggggttcggccccgccaggtggtcagcccttcctcggagtccaggtggctgggggcgcttcggagagtggccagttgccaaaacaaaggggatttggtgatggaggctttgttagaaggaatacaaaatcgagggcatggtgggggatttttgacatcttgtgaagg

SEQ ID NO: 155162 - DNA, 1486 bp, Homo sapiens
taaaaacctacggaaaaccagaaatcttggtagtggaagaaatgtgtaaggtcaccccaatcggtagattttaatgaacgttgtggaatgttgggaagaggggatgttaagttgaatgcagaatttcactaagtacttagtgtaagtttaaggatgtagctctttttatctaagaattcaatgtaatggccaaaaggcagatttactgtttaaaaatttgaataattttacatgacattcttgaaattctaagaagttttatgtgtagaacattttaaaaattcatcagattattaaagggaaaataaatgattaatgataattttggaaggttaatgtgagctagacttaagtaaactttggttcatttgtgttcattgaatgttttggaaatgaccaaaaaatgtaaatggccttcactcaagtttgagtgtttaaagttgaaagatgtgctctactaaaagttatagtaattctaacctcacattgaaatgagacagtattccttgttatacaggctgaatttgaagattagagaggatctaatgtttacttaggtaaaggggcataggttttgtagttaagatgaccagacagctaaaagctgtgatgggaagtatggactgctcctatttatagtctcagaaaatggacctttaggtctctatccgtattggcaattattagaagaaagttacacccttttgaaactacaaaagctgtcttggaatttccccctcttctccctatttatgtccccttagaatattttagggagcctataattattttctaaccaaggaaaaacttaagtctctttaagaagcaattacttttcataacatcagattgaataacccaccttgctgttcagcccacatcctactgggaaacaaaagggtaaggaacccattttctggttcttgattgtttgggtctgaattttgtttttaaaactaagctaagtttaatgttttttaaaatgctgtttggaatatgaatagattccccgtaaaatgatttttcctaagttttatgccttaagtaaatattcagtgctcacgtctgtgcatcatagtgcttgcgtttaatatgatttattgtagaatctcaacttttcttggtgtttgttgtctttgaaacattgtcttggtcgattagggctggtgttttcacatttctgtggtcaaggtggatttcttatgtgtgcctttttgcttactttgtatatgaattttgtaatttaaattggcaagtaagttatatatatgtatttaccataaatagtattaaaagatgagaaactgttagactgaagttctgttgtaacataaccattatttccatcacagtaggaagaccggcaaacgcagaaaacagattacagtcttttatccattttttgaaatccaaaaactacgaaaacaaaagattttttgttgttgagctaattaaatgtgaaccctggccagaaaaaaaaaaaaaa

SEQ ID NO: 155163 - DNA, 1676 bp, Homo sapiens
gggtcgacccacgcgtccgaattgaccggtgctaaagtctcctgtttatccataaaatgggtacattatgggcagtgtaatacaagctttcttttcattgcctagtactttaccagcagaccacagttttgccctggctagaccaaccctcagaacaaaatcatcattccttgtatttatatttgtatctgagatagtaaacaagatggctggccaggtcaacatggcaccttaacttatttttttaataggtaaaacttcttcaaaagtagcttgctttgtataagaactaagctatcagtatagatatagctatccttggagcttatgtttcagacaagaattatttactaaaataaataataaacaagataatgcattatacaatttgggcatttctcgtttctcaagtgtatgcatcatggtaaatataaactaaccacaagataggtagattgattcatttcattttaatctccttgtgtaattcagtacctccataattgttctaatcttcttcccactgtttacaaattaccagttaattaactcgtgaaagaaaaattcacatatcagaataaaaataaatgtatactcactttatcaaaatcaccactgctgtctttccttaatactagcagtggaaatgtaagtggcttactctacaaattttggtgctggcaaagtacataggcaaactggttggggagctgctctagttacattcctcccttcttattccctttttctcttcctccactttattgcataaccatattccctggtaccccaaagccattcctacccaccagttcctaatttgactcccacttgtaataactcctttaaaaaattccatgtttaaccatatgaccctggcttggcttactcatattctccctccctctccccttcctttctctctcttccagaagtcatttgcctggtttgaaatattttgtagggattgcttattatattattttagctgatgaacctcaggacaatgtctacacacacacacatacatacacgcacacaaaatctcagctgttgaagagtgggcttggaatcagacttctgtgtccagtaaaaaactcctgcactggaagtcattgtgacttgagtagttacagactgattccagtggaacttgattctaattttctttttgattctaattgaatgtgtctgcttaccttgtttccttttaattgataagctccaagtagttgctaatttttggaccaactttaaatggggtttcattcacttcttttacttaatgttttaagtaatagtacccaataaatttccattaaccctgttctccaaggggtttagctacccatttctgccatttttaatttttatttaattttatttgcttgagcacactgatcaaccactgaactgccttcttccattgtcctgcaatgatataagggttacatttttgtgtatatggctttcatagttgggatttcagagcactgataccagatattttcagtttgttctctgggggaatttcgatttgcatctatgtttttagctatctgtgataacttgttaaatattaaaacgatattttgcttctattggaacatttgtatactcgcaactacctttctgtaaacagctgcagtcacaaaataaaacactgaaagttttaa

SEQ ID NO: 155164 - DNA, 2741 bp, Homo sapiens
atagagaaaaaataaattaccagtatttattattagaaaagatagaaagacagacaaatcagtggaggaattaaaacagagaaactggagtttataaaacagagcccaatccttgccttctctccctccactcaaatagaaaaggagaatggagaaagagaaagaaggtattaggctacagtttataagagagatgaggaaaaaaatacatttgggaatagagggaaagggtcaaaaggggtcacatttggagaaatatctgaaaatgagaaggagcagaatttttggaaacattttttaaagtctggcaacgctaattaagctgttgatctaaggatttgcaaattgagaggtgcaattattttccaaatgatttgtgacactcttattaattagaatatatattttgtgaatattgaaatctgagccaaaactagttagctttattaatatcttagggaaagaagagagaaagaaagagggagggagagagagaaagaaagaaagaaagaaagaaagaaagaaagaaagaaagaaagaaagaaaaagaaaagaagaaagaaagaaagaaaaagacaggaagaggaagagagagacagaaagaataaaaaaacagcaattctgaggatgagaataaattaatggtaggtattacatatgcatgtacatatatatatatctgtacacatatatatgtaaatatgatttggaatacatcaggattgtgaacttccacttgggatagcataaaagcaaaatataccatacaatttttcattttactcacaaattttactcacaaattctcctaaagacatttcactaggtcagtacatttccgagaaagttttaaaaacgtttcttcttttatagtccctaattatcttacctggagtgttatcaaaatgtcatacaactggaaaatgcaattattattataaaaatatctctgccttctcttgtgtaatgaaatttatggcattaggagatgacatttcaagagattttagaggtcaatgtagagactccccccattcttcttaattgaacaaacatgcataaatctagggtttcaggtagagagcagatgggaatctacaggaaactgtcttccatagtgtatgaaaaccgtgtttgttgtgtggtgaagcaaaaggaaactatgaagcgcacagtcaatagattcagctagtgagtcccagcactcctttcaggccctcactaggattagcagcccagatgtcatgccaaggccactggtgcagtacaaagacagttcagtgacaagttccatcccataccatgggaaagagggttaaaacttggtgggctggttttttgccacagcatgacccagagacattctcaataaatggcactaggaatgatgagttttagaggggcctaaaatgttccaaacttgatactcaccactgtacctttaaagcacaaccacagatattggtaaaaatggaacagaattacctcaatacctctttaactcattctgaatgaattcattttgatgacagacattttttgtcaccatttggaataagaactacaacagcttatgattgaggtgaggaactgcagtcaaatggcttaggttcaaacacgagttctgacacaaatctaggtaattttgggcaatattttaaaatcttagtttattcaccaattaataggagtaaaaattacccctacttaatagaattattatgaagatttatataagtaaatcatataaagtgcttagcacagtgtgactggcccacatggaacatttaatacttggtctgcagtatatgaagaaaatggtgtacatgttaacttaaatggtttcattatttctcttcaggatttttaaaatgtgggatcagaatatatgttactattttgaaaattagaaataataagaaaaccagaatgtatacattaaaagtcatgcctaaatttccaaagagtagtttttttaatgccagagtttaaataaaatattattttccagagagtaacttttctaaaggtcctaaattctgaaaagagagaaaactactgttataaacaagtttattactaaaagatgcaatattcattactatgatttattattattttgtacatgtaaaccttgataaataaacagcatctcaacccaagtttattactcattgcacagttcaaagcaactatgactctcaaaatagcaacagaaggtggggagggtcttttccctttgtttatatagtatttgctaaaaatgaactttactattttgtggctttatagggttacaccatttcattctaaagagaaacaaaaagtaaaccattggccatgtggctttcaaacagtatttcaaagagaatattactgaaatatttttgtgctgttacagtcttaatcaaacattattacaaagatcagatacggaaaaaatagaggagtctcccccttaattgttccctttgaaataaattgttttaaattattacagaagttatagctgtatgtacatgcacatttgtatatttacaagtctcatgtacttaatctcaatattgcaaattagctaggtttactatagagttaacggcttttatctagcattaacaatcttggagtacaacccattttccaacaactaaaacttaattgaagtcatcaatgggacacatgccaaggactccaattcataaactaataaaatgtaagtccgtcattgatgagtaccatta

SEQ ID NO: 155165 - DNA, 1218 bp, Homo sapiens
atgactcttaaggagcatgctgccttcaagcatctgtttaacaaagcacatcttgcaccgcccttaatccatttaaccctgagtggacacagcacatgtttcagagagcactgggttggggatattgtacatagagatctgaaactggaaaatataatggttaaaagcagtcttattgatgataacaatgaaataaacttaaacataaaggtgactgattttggcttagcggtgaagaagcaaagtaggagtgaagccatgctgcaggccacatgtgggactcctatctatatggacagaggttggaacagtttggagggctcagaacaagacaggaaaatgtgggacagtttggagctccctagagacttgttgaatgtctttgaacaaaatgctgataatgatatggatgatgaaattcaggctgaggtgctttcagatggagatgaggaacttcttgggaactggagcaaaggtgactcttgttacgttttactaaagcaactggcagcattttgcccctgccttagagatttgtggaactttaaacttgagagagatgatttagggtatctggtggaagaaatttctaagcagcaaagcattcaagaggcaacttgggtgctgttaaaggcattcagttttataagggaagcagagcataaaaatttggaaaatttgcagcctgacaatgcaatagaaaagaaaatcccattttctgaggagaaattcaagctggctgcagaaatttgcataagcaaccaggaggcaaatgttaatccccaagacaatgagaaaaatgtctccagggcatgtcagaggtcttcacagcagcccctcccattacccagagtactaggaggaaaaagtggtttcgtgggctgggcccaggattctcatgctgaaatctatacctttggaagaatattgggaaaagggagctttggaatagtcattgaagcgacagacaaggaaacagaaacgaagtgggcaattaaaaaagtgaacaaagaaaagtctactgcttatgaaaagcaatttcctgcaaccagtaaggacaactttgatatgtgcagttcaagtttcacatctagcaaactccttccagctgaaatcaagggagaaatggagaaaacccctgtgactccaagccaaggaacagcaaccaagtaccctgctaaatccggcgccctgtccagaaccaaaaagaaactctaa

SEQ ID NO: 155166 - DNA, 693 bp, Homo sapiens
  misc_feature (1)...(693): n = a,t,c or g
ccgagatccccgaccatgcccgccgacctcagcggtacttggaccctgctcagcagcgacaacttcgagggctacatgctggccctaggtattgactttgccactcgtaaaatagccaagttgctgaagccacagaaagtgattgagcaaaatggggattcttttaccatccacacgaacagcagcctaaggaactactttgtgaaatttaaagttggagaaaaatttgatgaagataacagaggcctggacaacagaaaatgcaagagtttgggtatctgggacaatgacaggctcacctgtatccagaagggagaaaagaagaacagaggctggacccattggatcgaaggagacaaactccacctggaaatgttctgtgaagggcaagtgtgcaaacagacattccagagagcctgatccacatccagcagcagagcccacttgtggctgcagctttatgccaaattatattgcagactgaacagacgtttatctatcccatttggcgacgaggactcgtggctggagagagccacacagcgtgtaacctgaagtcatctaaattatggggaaactgctcagcttcaataaacctgtccaaatgnnnnnnnnnnnnnnggggcggccgttttaaaggatctcttggggggcccaagtttacccggggctggaaaggtattgtttttttct

SEQ ID NO: 155167 - DNA, 404 bp, Homo sapiens
tgtttggcctccatctgagcagccactctgggccactgtccctcatctatacagtgctggaggtctgctggaagctgccccagagcaagctcatcggggccacaggcatctcctatggcatgggtctaaagcacagatttgaggtagatgtcgtgggcaacatccctgcagggctggtgcccccagtggcccccaacacccagctgttctcaaagctcgtgggcagcgccttcaccatcgctgtggttgggtttgccattgccatctcactggggaagatcttcgccctgaggcacggctaccgggtggacagcaaccaggagctggtggccctgggcctcagtaaccttatcggaggcatcttccagtgcttccccgtgagttgctctatgtctcggagcctg

SEQ ID NO: 155168 - DNA, 506 bp, Homo sapiens; identical to SEQ ID NO: 154093

SEQ ID NO: 155169 - DNA, 4128 bp, Homo sapiens
gccctgcccacctcacgcagactgccgggacctctggcagaccttttcttgcacctgccagccaggttactacggcccaggctgtgtggatgcctgcctcctgaacccctgtcagaaccagggatcatgccggcacctgccaggagccccccatggctatacctgtgactgtgtgggtggctatttcgggcaccactgtgagcacaggatggaccagcagtgcccacggggctggtgggggagcccaacctgtggcccctgcaactgtgatgttcacaaaggttttgatcccaactgcaacaagacaaatgggcagtgtcactgcaaggagttccactaccgaccgcggggcagtgactcttgcctcccatgtgactgctaccctgtgggctccacctcgcgctcatgtgcaccccacagcgggcagtgcccctgtcgcccaggagcccttggccgccagtgcaacagctgtgacagtcccttcgcagaggtgacagccagcggctgccgggtgctctatgatgcctgccctaagtccctgagatctggtgtgtggtggccccagacaaagtttggcgtcctggccacagtgccctgtccccggggggccctgggattgcggggtgcaggtgctgctgtgcggctgtgtgatgaggcccagggttggctggagcccgacctcttcaactgtacctcccctgcctttcgagagctcagtctgctgctggatggcctagagctgaacaagacggcactggataccatggaggccaagaagctggctcagcggctacgggaggtgactggccacactgaccactattttagccaagatgttcgagtcactgcccgcctgctggcccacctgctggccttcgagagccatcagcagggcttcgggctgacagccacacaggatgcccacttcaatgagaatctgctgtgggccggctctgcactgcttgccccagagacaggggacttgtgggcggcgctggggcagcgggcccctgggggctccccaggcagcgcgggactggtgaggcacctggaggagtatgcagccacactcgcaaggaatatggaactcacatacctgaatcccatggggctggtgacgcctaatatcatgctcagcattgaccgcatggagcaccccagttctccccggggggcccgtcgctaccctcgctaccatagcaacctctttcgaggccaggatgcctgggatcctcacacccatgtgctgctgccttcccagtccccacggccatccccatctgaagttctgcccacaagcagcagcatagaaaactccaccacctcaagtgtggtccccccaccagccccgccagagccagagcctgggatctccattatcattctcctcgtttaccgcaccttagggggactgctccctgcccagttccaggcagaacgccgaggtgccaggcttcctcagaaccccgtcatgaactccccggtggtcagcgtggctgtgttccacggacgcaacttcctaaggggaatcctggagtcccccatcagcctagagtttcgcctgctacagacagcgaatcggagcaaggcgatctgtgtgcagtgggacccacctggcctggcggagcagcatggtgtgtggacagcacgggactgcgagctggtgcacaggaatgggtcccacgcacggtgtcgctgcagccggacagggacctttggggtcctcatggatgcctctccccgtgagaggctggagggcgacctggagctgctggctgtgttcacccacgtggtcgtggctgtgtctgtggctgcgctggtgctgactgcagccatcctgctgagcctgcgcagcctcaagtccaatgtgcgtgggatccatgccaatgtggcagccgccctgggggtggcagagctcctcttcctgctggggattcacaggacccacaatcagctggtgtgcactgcagtcgccatcctcctgcactacttcttcctcagcaccttcgcgtggctcttcgtgcaggggctgcacctctaccgcatgcaggttgagccacgcaacgtggaccgcggcgccatgcgcttctaccatgccctgggctggggcgtccctgctgtgctgctgggccttgctgtgggcctggaccctgagggctatgggaaccctgacttctgctggatctcagtccacgagcccctcatctggagctttgctggccctgttgtcctggtcatagtgatgaacgggaccatgtttctcctcgctgcccgcacatcctgctccacagggcagagggaggccaagaagacctctgcactgacccttcgcagctccttcctgctgcttctgctggtcagtgcctcctggctctttgggctcctggcagtcaaccacagcatcctagccttccactacctccatgctggactctgcggcctccagggcctggcggtgctgctgctcttctgtgtcctaaatgcagatgctcgggctgcctggatgccagcctgtctgggcaggaaggcagcgcctgaggaggcaaggccagcacctgggctgggacctggggcctacaacaacacggctctctttgaggagagtggcctcatccgcatcactctgggcgcctccaccgtctcctctgtgagcagtgcccgctccggccggacccaggaccaggacagccagcggggccgcagctacctcagggacaatgtcctggttcgacatggctcagccgctgaccacactgaccacagcctccaggctcatgctggccccactgacctggacgtggccatgttccatcgagatgctggcgcagactccgactctgacagtgacctgtccttggaggaggagaggagtctctccattccatcttcagaaagcgaggacaatggccggacgcgggggcgcttccaacggccactctgccgagcagcccagagtgagaggctcctcacccaccccaaagatgtggatggcaatgacctcctgtcctactggccagccctgggggagtgcgaggcagccccctgtgctctgcagacttggggctctgaaaggcgcctggggctggacaccagcaaggatgcagctaacaacaaccagccagacccggccctgaccagtggggatgagacttctctgggccgggcccagcgccagaggaaaggcatcctgaagaaccggttgcaatacccactggtgccacagacccgaggtgcccctgagctgtcctggtgccgtgcagccaccttgggccaccgtgctgtgccagctgcctcttacggtcgcatctatgctggcgggggcacgggcagcctttcacagccagccagccgctactcttctagagaacagctggacctgctcctccggcggcaactgagccgtgagcgactagaggaagcccctgcccctgttctacgtcccctgagccggccagggtcccaggaatgcatggatgctgcaccaggccgactggagcccaaagatcggggcagcaccctgccacggaggcagccacctcgggactaccctggcgccatggctggccgcttcgggtcacgggatgcgctcgacttaggggcaacctcgagagtggttgagcacgctgcctccgccccgccgcacccgggaccttgacccacagcccccacctctgcccctgtctccccagcggcaactctcaagggaccccctcttgccatcccggccgctggactctctgtctaggagctcgaactctcgggagcagctggaccaggtgcctagccggcacccctcacgagaagcccttgggccactcccgcagctgctcagagctagggaggactcggtcagtggccccagccatggcccctccacagaacagttggacattctttcctccatccttgcctctttcaactcctcggccctctcctctgtgcaatcttcaagcacacccttgggccctcacaccactgccacaccttctgccacagcctctgtgcttgggccctccacgccacgttctgccacgtctcacagcatctcggagctgtcgccagactcagaagttcccagaagtgagggtcactcctgaggggatgacggcgtggacgaggaacagctga

SEQ ID NO: 155170 - DNA, 12438 bp, Homo sapiens
gatttcacacagtaccccctcccagagctatgagaacgctcatgggcaccaaaatttcagaccaaaatccgggacacggttcagaactagtggtcaggaagggggaacaagagatctggaaggacagaaaaaggctgggagacggagctgggacagcgccctagaaggagggagccaggaggagctggggggcggtgggcaccagggctgggacccaggcttagctgccactacggggccaagggcgcatatcggtggcggagccttagctctttgtccggagtcttccggggtccgggaggatggggggcctggcctgggggtcagggagcctatcttcgtggggctccgagggagaaggcaaagcgcccggaatagtcgagggccccctgagcagccgaatgaggagctggggattgaacacggcgtccagccattgggcagccgcgaacgagagacaggacagggaccagggtctgtgttatactggcgcccagaggtctcctcttgcgggcggacaggacctttgcaaagaggtagtctgtcaccaggggctctgtcctcaggggtcccgggctcggggaacagctcgcccctcccttcagactttttgattcggcaccacggtcccaagccggtgtcctcccagcggaacgctgggacaggctcccgcaaaagagtgggcaccgcgcgctgctgtggggaattatgggcaacagggagcaagggtcagggcgagagagccacgacatccggagcagaaaggacagccccccggcggaactgtcttccaggggcctcgggatctggccccgagctggattcagcaccacgcacggcgaggacagctcctgcatcaggttcagcaccccgcgagtctcggacagctcccgagccggcgcccaagcgcatgcgctcccggggtctcttccgctgccgcttcctcccgcagcgccccgggccgcgtcccccgggactcccggcccgtcctgaagccaggaaagtaacctcggcgaaccgggcacgctttcgtcgcgccgcaaaccgccacccgcagtttccgcagtacaactaccagacgctggtgccggagaatgaggcagcaggcaccgcggtgctacgcgtggttgctcaggacccggacgccggcgaggccgggcgcctagtctactcgctggcggcactcatgaacagccgctcgctggagctgttcagcatcgacccgcagagcggccttatccgtacggcggcagctctggaccgcgagagcatggagcgtcactacctgcgtgtgaccgcgcaggaccacgggtcgccgcgcctctcggccaccacgatggtggccgtgacagtagccgaccgcaacgaccactcgccggtttttgagcaagcgcagtaccgggagacccttcgcgagaatgtggaggagggctaccctatcctgcagctgcgtgccactgacggcgacgcgccccccaacgccaacctgcgctaccgcttcgtggggccgccagctgcgcgcgctgcagctgccgccgccttcgagattgatccacgctccggcctcatcagcaccagcggccgagtggaccgcgagcacatggaaagctatgagctggtggtggaagccagcgaccagggccaggaacccgggccgcgctcggccactgtgcgcgtacacataactgtgctagacgagaacgacaatgctcctcagttcagcgagaagcgctacgtggcgcaggtgcgcgaggatgtgcgcccccacacagtcgtgctgcgcgtcacggccactgaccgggacaaggacgccaacggattggtgcactacaacatcatcagtggcaatagccgtggacactttgccatcgacagcctcactggcgagatccaggtggtggcacctctggacttcgaggcagagagagagtatgccttgcgcatcagggcgcaggatgctggccggccaccgctgtccaacaacacgggcctggccagcatccaggtggtggacatcaatgaccacattcctatttttgtcagcacgcccttccaagtttctgtcttggaaaatgctcccttgggtcactcagtcatccacattcaggcagtcgatgcagaccatggggagaatgccagattggagtactccctaactggtgtggcacctgatactccttttgtgataaacagcgccactggctgggtctctgtgagtggtcccctggaccgtgagtctgtggagcattacttctttggtgtggaggctcgagaccatggctcacccccactctctgcctcagccagtgtcaccgtgactgtgctggacgttaatgacaatcggcctgagttcacaatgaaggagtaccacctacgactgaatgaggatgcagctgtgggcaccagtgtggtcagcgtgaccgcagtagaccgtgatgccaacagtgccatcagctaccagatcacaggcggcaacacccggaatcgctttgccatcagcacccaggggggtgtgggtctggtgactctggctctgccactggactacaagcaggaacgctacttcaagctggtactaactgcatctgaccgtgcccttcatgatcactgctatgtgcacatcaacatcacagatgccaacactcatcggccggtctttcaaagtgcccactactcagtgagtgtgaatgaagatcggccaatgggtagcaccatagtggtcatcagtgcctctgatgatgacgtgggtgagaatgctcgtatcacctatctcctggaggacaacctgccccagttccgcattgatgcagactcaggagccattacattacaggccccattagactatgaggaccaggtgacctacaccctggctatcacagctcgggacaatggcatcccacagaaggcagacactacttatgtggaggtgatggtcaatgacgtgaatgacaatgctccacaatttgtggcctcccactatacagggctggtctctgaggatgccccacctttcaccagtgtcctgcagatctcagccactgaccgggatgctcatgccaatggccgggtccagtacactttccagaatggtgaagatggggatggagattttaccattgagcccacctctggaattgtccgtacagtaaggcggctagaccgggaggcagtatcagtgtatgagttgactgcctacgcagtggacagaggtgtgcccccactccggactccagtcagtatccaggtgatggtgcaggatgtgaacgacaatgcacctgtcttcccagctgaggagtttgaggtgcgggtgaaagagaatagcattgtgggctcagtggtggcccagatcactgcagtggaccctgacgaaggccccaatgcccatataatgtaccagatcgtggaggggaacatccctgagctgttccaaatggacatcttctctggagaactgacggcactcattgacctagactatgaggctcgccaagaatatgtgattgtggtgcaggccacatctgctcctttggtcagccgggccactgtgcacgtccgcctggttgaccagaatgacaacagccctgtgctcaacaacttccagatcctcttcaacaactatgtatccaaccgttcagacaccttcccgtcgggcattattgggcgcatcccagcttatgaccccgatgtctccgaccacctcttctactcctttgagcgtggcaatgagctgcagctgctggtagtcaaccagaccagtggggagctgcgactcagccgaaagctagacaataaccgcccactggtggcctccatgttggtgactgtcacagatggcctgcacagcgtgacggcgcagtgtgtgctgcgcgtggtcatcatcacggaggagttgctggccaacagcctgaccgtgcgccttgagaacatgtggcaggagcgcttcctgtcaccgctgctgggccgcttcctcgagggcgtggctgcggtgctcgctacgcccgctgaggacgtcttcatcttcaacatccagaacgacacagacgtagggggcaccgtgctcaatgtgagtttctcggcgctagctccacgtggggccggggcgggcgctgcagggccctggttcagctccgaggagctgcaggagcagttgtacgtgcgccgggcggcgctggcggctcgctccctgctcgacgtactgcccttcgacgacaacgtgtgcctgcgagagccctgtgagaactacatgaaatgcgtgtccgtgctccgctttgactcgtccgcgcccttcctggcctcggcctccacgctgttccgacccatccagcccatcgctggcctgcgctgccgctgcccgcccggattcacgggagacttttgcgagaccgagctcgacctctgctactccaacccatgtcgcaacggcggagcctgcgcgcggcgcgagggaggctacacgtgcgtctgccgcccgcgcttcaccggagaggactgcgagctggacaccgaggccggccgctgcgtgccgggcgtctgccgcaacgggggcacctgcaccgacgcgcccaacggcggctttcgctgccagtgcccggcaggcggcgccttcgagggcccgcgctgcgaggtggctgcgcgctccttcccgcccagttcgttcgtcatgtttcgcggcctgcggcagcgattccaccttacgctgtccctctcgttcgcgacagtgcagcagagcgggctgctcttctacaacgggcgcctgaacgagaagcacgacttcctggccctggaactcgtggctggccaagtgcggctcacatattccacgggtgaatccaacaccgtggtcagccccacagttccagggggcttgagtgacgggcaatggcatacagtgcatctgagatactacaacaagccccggacagatgccctagggggtgcacagggcccctccaaggacaaggtggctgtgctaagcgtggatgattgtgatgtggccgtggctctgcagtttggtgctgagattggcaactactcatgcgcggctgctggtgtgcaaacaagctccaagaagtccctggacctgacgggccctcttcttctgggaggtgtccccaacctccccgagaacttccccgtatcccataaggacttcatcggctgtatgcgggacctgcacattgatggccgccgagtggacatggcggcttttgtcgcaaataatggcaccatggcaggctgccaagccaagctacacttttgtgactcaggcccctgcaagaacagtggcttctgctcggagcgctggggcagcttcagctgcgactgccctgtgggcttcggcggcaaagactgtcagcttactatggcccatccccaccatttccgtggcaacggcacactgagctggaactttggaagtgacatggctgtgtctgtgccatggtacctggggctggcatttcggacacgggcaacgcagggggtcctgatgcaagtgcaggctgggccacacagcacgctcctttgccagctagatcgggggttactgtctgtgacagtgaccaggggctcgggccgtgcttcccatctccttctggaccaggtgactgtcagtgatggccggtggcacgatctgcggctggagttgcaggaggaaccaggtggccggcggggccaccatgtccttatggtctcactggactttagcctcttccaggacaccatggcggtggggagtgagctgcagggcctgaaggtaaagcagctccacgtgggaggcctgccccccggcagtgcagaggaggctcctcagggtctggttggctgcatccagggggtgtggctcggctccacaccctctggctccccggccctgctaccccccagccaccgagtgaatgcggagcctggctgtgttgtgaccaacgcctgtgcctctgggccctgcccacctcacgcagactgccgggacctctggcagaccttttcttgcacctgccagccaggttactacggcccaggctgtgtggatgcctgcctcctgaacccctgtcagaaccagggatcatgccggcacctgccaggagccccccatggctatacctgtgactgtgtgggtggctatttcgggcaccactgtgagcacaggatggaccagcagtgcccacggggctggtgggggagcccaacctgtggcccctgcaactgtgatgttcacaaaggttttgatcccaactgcaacaagacaaatgggcagtgtcactgcaaggagttccactaccgaccgcggggcagtgactcttgcctcccatgtgactgctaccctgtgggctccacctcgcgctcatgtgcaccccacagcgggcagtgcccctgtcgcccaggagcccttggccgccagtgcaacagctgtgacagtcccttcgcagaggtgacagccagcggctgccgggtgctctatgatgcctgccctaagtccctgagatctggtgtgtggtggccccagacaaagtttggcgtcctggccacagtgccctgtccccggggggccctgggtgctgctgtgcggctgtgtgatgaggcccagggttggctggagcccgacctcttcaactgtacctcccctgcctttcgagagctcagtctgctgctggatggcctagagctgaacaagacggcactggataccatggaggccaagaagctggctcagcggctacgggaggtgactggccacactgaccactattttagccaagatgttcgagtcactgcccgcctgctggcccacctgctggccttcgagagccatcagcagggcttcgggctgacagccacacaggatgcccacttcaatgagaatctgctgtgggccggctctgcactgcttgccccagagacaggggacttgtgggcggcgctggggcagcgggcccctgggggctccccaggcagcgcgggactggtgaggcacctggaggagtatgcagccacactcgcaaggaatatggaactcacatacctgaatcccatggggctggtgacgcctaatatcatgctcagcattgaccgcatggagcaccccagttctccccggggggcccgtcgctaccctcgctaccatagcaacctctttcgaggccaggatgcctgggatcctcacacccatgtgctgctgccttcccagtccccacggccatccccatctgaagttctgcccacaagcagcagcatagaaaactccaccacctcaagtgtggtccccccaccagccccgccagagccagagcctgggatctccattatcattctcctcgtttaccgcaccttagggggactgctccctgcccagttccaggcagaacgccgaggtgccaggcttcctcagaaccccgtcatgaactccccggtggtcagcgtggctgtgttccacggacgcaacttcctaaggggaatcctggagtcccccatcagcctagagtttcgcctgctacagacagcgaatcggagcaaggcgatctgtgtgcagtgggacccacctggcctggcggagcagcatggtgtgtggacagcacgggactgcgagctggtgcacaggaatgggtcccacgcacggtgtcgctgcagccggacagggacctttggggtcctcatggatgcctctccccgtgagaggctggagggcgacctggagctgctggctgtgttcacccacgtggtcgtggctgtgtctgtggctgcgctggtgctgactgcagccatcctgctgagcctgcgcagcctcaagtccaatgtgcgtgggatccatgccaatgtggcagccgccctgggggtggcagagctcctcttcctgctggggattcacaggacccacaatcaggtgcaggatcagggccagggaacttgtgtcctgatgaccctactggcccaggaggcctggggccaaaactcagggtcagagctggtgtgcactgcagtcgccatcctcctgcactacttcttcctcagcaccttcgcgtggctcttcgtgcaggggctgcacctctaccgcatgcaggttgagccacgcaacgtggaccgcggcgccatgcgcttctaccatgccctgggctggggcgtccctgctgtgctgctgggccttgctgtgggcctggaccctgagggctatgggaaccctgacttctgctggatctcagtccacgagcccctcatctggagctttgctggccctgttgtcctggtcatagtgatgaacgggaccatgtttctcctcgctgcccgcacatcctgctccacagggcagagggaggccaagaagacctctgcactcaggacccttcgcagctccttcctgctgcttctgctggtcagtgcctcctggctctttgggctcctggcagtcaaccacagcatcctagccttccactacctccatgctggactctgcggcctccagggcctggcggtgctgctgctcttctgtgtcctaaatgcagatgctcgggctgcctggatgccagcctgtctgggcaggaaggcagcgcctgaggaggcaaggccagcacctgggctgggacctggggcctacaacaacacggctctctttgaggagagtggcctcatccgcatcactctgggcgcctccaccgtctcctctgtgagcagtgcccgctccggccggacccaggaccaggacagccagcggggccgcagctacctcagggacaatgtcctggttcgacatggctcagccgctgaccacactgaccacagcctccaggctcatgctggccccactgacctggacgtggccatgttccatcgagatgctggcgcagactccgactctgacagtgacctgtccttggaggaggagaggagtctctccattccatcttcagaaagcgaggacaatggccggacgcgggggcgcttccaacggccactctgccgagcagcccagagtgagaggctcctcacccaccccaaagatgtggatggcaatgacctcctgtcctactggccagccctgggggagtgcgaggcagccccctgtgctctgcagacttggggctctgaaaggcgcctggggctggacaccagcaaggatgcagctaacaacaaccagccagacccggccctgaccagtggggatgagacttctctgggccgggcccagcgccagaggaaaggcatcctgaagaaccggttgcaatacccactggtgccacagacccgaggtgcccctgagctgtcctggtgccgtgcagccaccttgggccaccgtgcagtgccagctgcctcttacggtcgcatctatgctggcgggggcacgggcagcctttcacagccagccagccgctactcttctagagaacagctggacctgctcctccggcggcaactgagccgtgagcgactagaggaagcccctgcccctgttctacgtcccctgagccggccagggtcccaggaatgcatggatgctgcaccaggccgactggagcccaaagatcggggcagcaccctgccacggaggcagccacctcgggactaccctggcgccatggctggccgcttcgggtcacgggatgcgctcgacttaggggcacctcgagagtggttgagcacgctgcctccgccccgccgcacccgggaccttgacccacagcccccacctctgcccctgtctccccagcggcaactctcaagggaccccctcttgccatcccggccgctggactctctgtctaggagctcgaactctcgggagcagctggaccaggtgcctagccggcacccctcacgagaagcccttgggccactcccgcagctgctcagagctagggaggactcggtcagtggccccagccatggcccctccacagaacagttggacattctttcctccatccttgcctctttcaactcctcggccctctcctctgtgcaatcttcaagcacacccttgggccctcacaccactgccacaccttctgccacagcctctgtgcttgggccctccacgccacgttctgccacgtctcacagcatctcggagctgtcgccagactcagaaccgagggacacacaggcactgctgtctgcaacacaagcaatggacctgcggaggcgagactaccacatggaacggccgctgctgaaccaggagcatttggaggagctggggcgctggggctcagcacctaggacccaccagtggcggacctggttgcagtgctcccgtgctcgggcctatgcccttctgctccaacacctcccggttttggtctggttacccgggtatccctgggcgtgactggttcctgggtgacctgttatccggcgctgagagtggccatcatgcagattgcgcagggcttggcctacgccctcctggctggattgccccccgtgtttggcctctatagctccttctaccctgtcttcatctacttcctgtttggcacttcccggcacatctccgtggagagcctctgtgtcccgggaccagtagacacagggacctttgctgtcatgtctgtgatggtgggcagtgtgacagaatccctggccccgcaggccttgaacgactccatgatcaatgagacagccagagatgctgcccgggtacaggtggcctccacactcagtgtcctggttggcctcttccaggtggggctgggcctgatccacttcggcttcgtggtcacctacctgtcagaacctcttgtccgaggctataccacagctgcagctgtgcaggtcttcgtctcacagctcaagtatgtgtttggcctccatctgagcagccactctgggccactgtccctcatctatacagtgctggaggtctgctggaagctgccccagagcaaggttggcaccgtggtcactgcagctgtggctggggtggtgctcgtggtggtgaagctgttgaatgacaagctgcagcagcagctgcccatgccgatacccggggagctgctcacgctcatcggggccacaggcatctcctatggcatgggtctaaagcacagatttgaggtagatgtcgtgggcaacatccctgcagggctggtgcccccagtggcccccaacacccagctgttctcaaagctcgtgggcagcgccttcaccatcgctgtggttgggtttgccattgccatctcactggggaagatcttcgccctgaggcacggctaccgggtggacagcaaccaggagctggtggccctgggcctcagtaaccttatcggaggcatcttccagtgcttccccgtgagttgctctatgtctcggagcctggtacaggagagcaccgggggcaactcgcaggttgctggagccatctcttcccttttcatcctcctcatcattgtcaaacttggggaactcttccatgacctgcccaaggcggtcctggcagccatcatcattgtgaacctgaagggcatgctgaggcagctcagcgacatgcgctccctctggaaggccaatcgggcggatctgcttatctggctggtgaccttcacggccaccatcttgctgaacctggaccttggcttggtggttgcggtcatcttctccctgctgctcgtggtggtccggacacagatgccccactactctgtcctggggcaggtgccagacacggatatttacagagatgtggcagagtactcagaggccaaggaagtccggggggtgaaggtcttccgctcctcggccaccgtgtactttgccaatgctgagttctacagtgatgcgctgaagcagaggtgtggtgtggatgtcgacttcctcatctcccagaagaagaaactgctcaagaagcaggagcagctgaagctgaagcaactgcagaaagaggagaagcttcggaaacaggcagggccccttttgtctgcatgtctggctccccagcaggtgagctcaggagataagatggaagatgcaacagccaatggtcaagaagactccaaggccccagatgggtccacactgaaggccctgggcctgcctcagccagacttccacagcctcatcctggacctgggtgccctctcctttgtggacactgtgtgcctcaagagcctgaagaatattttccatgacttccgggagattgaggtggaggtgtacatggcggcctgccacagccctgtggtcagccagcttgaggctgggcacttcttcgatgcatccatcaccaagaagcatctctttgcctctgtccatgatgctgtcacctttgccctccaacacccgaggcctgtccccgacagccctgtttcgccctcactcgctgtctcctcagatgtgaaacagttggaaccagagctgcttctcaggaataatttgctctcaggaatacccgagaaggtacagggcagcgtgggtgccaatgggcagtccctggaggatacagagtga

SEQ ID NO: 155171 - DNA, 378 bp, Homo sapiens
  misc_feature (1)...(378): n = a,t,c or g
cggccaccagctgagtttttgatcaacactgtagccatgttttctgtgttgatcactaaaagtggaccctatccaggaagaaatgtatataaggggtgtgtctcataaaggaaataaaagattcttggagcctctggtccatgaaatagtatctaaaactttcactcattctttcttctgttccccaaacatcccattctccttttgggaagggaccttctgactaagtttggagccacaatttctctaaatcaggacagaatagaggtgttctgagcccatggcactgccatgctggccctagttcctggggaagttccagacttggggcctcatatgactccttggctaatgcggnactagataattgtatagcat

SEQ ID NO: 155172 - DNA, 940 bp, Homo sapiens
ggatgacagagtgagaccttgtctcaatgaaaaagcagggggcactgggaggggagaaccaaatgccctatcctccagttctcagcatatagaagggagctctctcatctgctagccactcctgcctcactgtgccatgctttctgtaatgcactctgggtccagggactgcttggcaggaggtgggaagaacaagaagtttagggccttcccagtttcttatggcctgtctggagagggaactagcgcttactgagtttttacgatgtgttacacaccatgtaaaggcctttacctacattatttcttataacccaaacagagagcaaataagtatccccattttttagtcacatagagttccagagttgccacagttacatcgcaaagtcaggatttgaatccagtgcagaccgcaaacaccatggttttctctccaaagcagagcagctccagaggtggaggtgactggaatgtcctagattcagtgggaccaggagctgggggtgcttagcagaggctcctcatctcccccccagggtcttgtcaagtccagaagtccctaaaccccttcaaattaaactatcccctcctaatcccccagctgaacccctgggtaataccctccccaccaagaggtatcctgtgtggaaccctggcccctattttagggattaggtgatggagataaatttcccatggcaaacggccctcgtccccgttcgtttgcagagcacaacaatcccagattaaggtacagagtttgggttttatttggagattagttggtattacaggtgatggtgataccaaaacccaatgctgctatacctgcctccatcccagatctgtcaggttgtctccacagccccacatcagagggcatcccaatctgatcctttgtgaaaattaaatcaacattaagccccaaaaaaaaaaa

SEQ ID NO: 155173 - DNA, 1023 bp, Homo sapiens
agtgtggtggaattcccactctctgtgaggtgaaaacccatttcaagggctgcagccagggtgaggcctctgtggacccctatggacgtggctggccacagaaagctgttaaagaaatgagggtggggatttctggggcataaggacaggaaaagggacacatacgtgtcaaccaccatttcaactgcaccccctccttcgagaggatgccatggccacactcagctgggccctaaggtgggctgagccagaggaaggcaggcaggagctctgtctcccggccttctccactggagcctgaagcacctcctgcccaggccagcaaggtgcaggaagcgtcccacctagagacctctgcagacttgaccacacaccccagggcaagcaagggccccactcctgagcctacctctgatcctacagttccaagagacagaagccaaccttgcccctcccttctggaccccagagtgccctgtgggcactattactgctaacgtttgagtgccagctctgtgccgggtgccattctgggcagtcgcaccagctaccactaccacctgtagcagtcctgcccccgttcacagaagacattcaggagcccagcctgtgggggcagttcacatctgggatctcaagtcctaacacaaccaagcaatcctcgctttacagatgatgaaattgagccgccatggtggggaagcccaacccaaatgtgtcatctctgctgtgagctagacagcacagtggctgtgggcctggagggcagggctgcctgatgggcagccatcctgggaatgtctgcaagggtctggtgcttggtacagaccagtgagtctggggaattggggtctccaccaagatctgtgggtgcacttggcatgtttgctgcagaaaaggccccagaatgggctggcttgaactggaaaaacacactttctcatcccttttggaccacgagcttcttgagagcaaagcatgtgtttgatattcctttgctcaccctcaggccttgggttgcaa

SEQ ID NO: 155174 - DNA, 411 bp, Homo sapiens
  misc_feature (1)...(411): n = a,t,c or g
cccactactcggggctccgctcggcttcttcgcgccgagatgcctaagaaggctggtgcgacgaccaagggtaaaagccagagcaaggaaccagagagaccacttcctcccttaggtcctgtggcagttgatcctaaaggatgcgtcaccatagccatccatgcaaaacctggctccaaacaaaatgctgtaacagatttgacagcagaggctgtaaatgtagctattgcagcacctccatcagagggagaggctaatgctgagctctgtcggtatctttccaaggtcctagaactcaggaagagtgatgtggnnnnnnnnnnnnnnnnnnnnnnnnnnnnnnnnnnnnnnnnnnnnnnnnnnnnnnnnnnnnnnnnnnnnnnnnnnnnnnnnnnnnnnnnnnnnnnnnnt

SEQ ID NO: 155175 - DNA, 398 bp, Homo sapiens
tttcgtcttcccaggcggggatgctgcggctccgcagcgggctgaggcaccttcgggcaacacccaatactcggggctccgctcggcttcttcgcgccgagatgcctaagaaggctggtgcgacgaccaagggtaaaagccagagcaaggaaccagagagaccacttcctcccttaggtcctgtggcagttgatcctaaaggatgcgtcaccatagccatccatgcaaaacctggctccaaacaaaatgctgtaacaggtatacctggacactggggtgggattcaagtgtgaatcaggtgtctcctacagccctcctttgctttggttagctgaaagcttattctatgacagttgatttttcacatctgcagttagaggcttctccattttaaaatg

SEQ ID NO: 155176 - DNA, 432 bp, Homo sapiens
ttggagatatgatttttaatttacaatctagaaaaactgcattcaacaagtagtccaaggatttgggttctagttgccagcttgcatggtacaatcttgagtaagtctctcaacttctggatataggaaatcaaaggccccccaacagaatgaaaggtgttaaatcaggtcatcttgaatattcttcccagctctgttattttacaacgccatgaaatcagagtaacatgttccaggctgtttggggtttgggattttagaacctgatgcaatgtatagcactttttaaatttctactttttggagtcttattcgaatatatacatatatatatgtcccccatgttcttctgtgcatgtagtatatttttttattgctaatggtgaagaggctgataaataaaaaaatatactacatgttcttctgtgcatg

SEQ ID NO: 155177 - DNA, 443 bp, Homo sapiens
tttcggcacgaggctgcgctccgcagcgggctgaggcacttcgggcaacacccaatactcgggcgtccgctcggcttctttgcgccgagatgcctaagaaggctggtgcgacgaccaagggtaaaagccagagcaaggaaccagagagaccacttcctcccttaggtcctgtggcagttgatcctaaaggatgcgtcaccatagccatccatgcaaaacctggctccaaacaaaatgctgtaacagctctgctattccattcctcaacaattggaggagactcaggagggcgtttcaggtattcctgatactccttgttattttctgtgaatctactagcaaacatctcttcaaactttggaacagcttcggcagtgtcagtcattctgaaaatctgtacaattttaaagacatttccattaaaaaaaatttaaaaattaaaa

SEQ ID NO: 155178 - DNA, 963 bp, Homo sapiens
gccttcccaggcggggatgctgcggctccgcagcgggctgaggcaccttcgggcaacacccaatactcggggctccgctcggcttctttgcgccgagatgcctaagaaggctggtgcgacgaccaatggtaaaagccagagcaaggaaccagagagaccacttcctcccttaggtcctgtggcagttgatcctaaaggatgcgtcaccatagccatccatgcaaaacctggctccaaacaaaatgctgtaacagatttgacagcagaggctgtaaatgtagctattgcagcacctccatcaaagggagaggctaatgctgagctctgtcggtatctttccaaggtcctagaactcaggaagagtgatgtggttttggataagaagatgagagacttactcaagattgtaccatgcaagctggcaactagaacccaaatccttggactacttgctgaatgcagtttttctagattgtaaattaaaaatcatatctccacaacggttctggaattctggggattgccttctaatccagtttacaagtgacagaaaacctgttatgctgctttgtagtcttaccttagatttttaaatgcttatttaaatgtaaaaaaaatttttttttacatcttttaaagactatatttaccattttgttgaaaaagtaaagaaaaatcatgacttgtaattaaatgtgaattataatttttgagaagtcactgaattttcatcttcctctaataacttaaataatcagcaaattcagtagtttttatgaatctccaaagatccttaaaagaagaaagaggacttggaagctattttcagtatttgtaaaagcttgtcagaaattacatctatattaaagtttcaaaagctaataatatatttttacatcttcaggtcaagttatagtaatttattaaagaaaataaaattaatttcctttgctgatcaggaaa

SEQ ID NO: 155179 - DNA, 2168 bp, Homo sapiens
aacgacgtcggacgcgccccttcttggaacaatgtcccaccacggaggagctcccaaggcctctacgtgggtcgttgctagtcggcgaagctcgacagtgtcccgagcgccagagaggaggccggcggaggagttgaatcgaacaggtcctgagggatatagtgtcggcagaggtggtcgctggagaggcacctctaggcccccggaggccgtggccgctggtcacgaggaactgccgctgtgttttgctttgaagagccactttgttggcgcggtaatcggtcgtggtgggtcaaaaataaagaatatacaaagtacaacaaacaccccaatcccaattattccaggaccacccagaatcattagtcaaaatttttggcagcaaggcaatgcaaacgaaagcaaaagcagtgatagacaattttgttaaaaagctagaagaaaattacaattcagaatgcggaattgatactgcattccaaccttctgttggaaaagatggaagcacagataacaatgttgttgcaggagatcggccattgatagattgggatcaaattagagaggaaggtttgaaatggcaaaaaacaaagtgggcagatttaccaccaattaagaaaaacttttataaagagtccactgccacaagtgccatgtcaaaagtagaagcagatagttggaggaaagaaaattttaatataacgtgggatgacttgaaggatggggagaaacgacctatccccaatcctacctgcacatttgatgacgcctttcaatgttatcctgaggttatggaaaacattaaaaaggcaggttttcaaaagccaacacctattcagtcacaggcatggcccattgtgttgcaaggaatagatcttataggagtagcccagactggaacaggaaagacattgtgttatttaatgcctggatttattcatctggtccttcaacccagccttaaaggtcaaaggaatagacccggcatgttagttctaactcccactcgggaattagcacttcaagtagaaggagaatgttgcaaatattcatataaagggcttcggagtgtttgtgtatatggtggtggaaatagagatgaacaaatagaagagcttaaaaaaggtgtagatatcataattgcaactcccggaagattgaatgatctgcaaatgagtaacttcgtcaatctgaagaatataacctacttggttttagatgaagcagacaagatgttggacatgggatttgaaccccagataatgaagattttgttagatgtgcgcccagataggcagacagttatgaccagtgctacatggcctcattcagttcatcgcctcgcacaatcttatttgaaagaaccaatgattgtctatgttggtacattggatctagttgctgtaagttcagtgaagcaaaatataattgtaaccaccgaggaagagaaatggagtcacatgcaaacttttctacagagtatgtcatccacagacaaagtcattgtcttcgtttctcgaaaagctgttgcggatcacttatcaagtgacctaatacttggaaatatatcagtagagtctctgcatggagatagagaacagagagatcgggagaaagcattagagaactttaaaacaggcaaagtgagaatactaattgcaactgatctagcctctagaggacttgatgtccatgacgttacacatgtctataattttgacttccgacggaatattgaagaatacgtacaccgaatagggcgcacgggaagagcagggaggactggtgtttccattacaactttgactagaaatgattggagggttgcctctgaattgattaatattctggaaagagcaaatcagagtattccagaggagcttgtatcaatggctgagaggtttgaggcacatcaacggaaaagggaaatggaaagaaaaatggaacgacctcaaggaaggcccaagaagtttcattaatgtcttctgtactagtggggtagagaattcaagattttttagaaatatagtaagacagaagtattggacatgttggcagtatgaagagaccggactgatttgactgattcttaaaataatagtgtttgaaaatatagaatccagtgttttatactttctttaataaaaatagaagtatttaaacttaaa

SEQ ID NO: 155180 - DNA, 1125 bp, Homo sapiens
ggactatgggacttatgcctgggagactccttccttcaacaactctagtgctggtggaggacctgagagatcatctacagaagttcaatcccttattttgttaaaaagagaccggataggtaggggagggaagagaagtgactcaagtttgacaaatccaaacctgggctcccctctcctgcgcctcgcccgctattctttccactcggccagcgtgactccaagacgcgccactacccttctactagccggctgcccggcctctcctccacttaccctggccactggggcgctcctctcatcagtgtcccaggcccagaagccccgcccacgccaggcataggccccgcccctgtatcccaagaccctgcctcctcttgcggtggggggaaagcggcctcttactcctaggcctttcggtttgcgcgagcgggcaggaaagcgtgcgtgcggctaagagagtgggcgctctcgcggccgctgacgatggaagaactggagcaaggccctgttgatgcagccatgggcgtggctacagcttgcagagaactccctcttggccaaggtttttatcaccaagcagggctatgccttgtgtggtttcagatcttcaacaggtgtggcatgaacaggtggacactagtgtggtcagccagcgaagccaaggagctgaacaaagcggctcactgcttcctcctgcagctttcctctgtcatttggataatctccttcgccccattgttgaaggacgctgcttcgccctagcgaagctaccttgctcctgtgattgttttggcaagatgcactgattctacgggtgcgaagtgagctctctggcctccccttctattggaatttccactgcatgctagctagtccttccctggtctcccaacatttgattcgtcctctgatgggcatgagtctggcattacagtgccaagtgagggagctagcaacgttacttcatatgaaagacctagagatccaagactaccaggagagtggggctacgctgattcgagatcgattgaagacagaaccatttgaagaaaattccttcttggaacaatttatgatagagaaactgccagaggcatgcagcattggtgatggaaagccctt

SEQ ID NO: 155181 - DNA, 994 bp, Homo sapiens
ttttagtactgttttaggtattggggatataccaaggaataaaacaagattcctggagggagaggggaacggacagcaaacaatagacacaatacgatcgtgaggtatatagttaatgttggtgatgagtgctcctcaaaggaaacaactaaaaccagacaagggaagtcggggtgtcagggagaatggtttgtagtattgatgacaatggttaaggaaggcctgagttctgcaaagacctcaaggatatgagggactagagtgccctctgctgtggaagagcctgcgcaaagatcctgaggtgggaggggtcagggagccaactcattttacggtaagtggaggtgggatccaggggaggattctgagcagaggagggacgtggcccaatttgggctttgaaaggatcctgcttgtctgtgtgccagcatcctggtggtggttgggggagtctgcatcaatcctgggtgctgttacctgaaaaaatagcaggtgttagacgaaagaacagatgtctggcccattgtttccagtctgttcctgtccacagcttccctttatgctgagcccctgccacatgcatcatcatcctggccatgtggcattgtcacagaccgtctctcctgctagcctcctaactcagggcctgggtcttccccagcattaagtaaatcagtctcaggcagacagccctttataggtgtttgggccaggtgcggtggctcacgcctgtaatcccagctctttgtggggccgaggtctttgagctcaggagttcaagaccagcctgggcagcatgacaaaaccctgtctctaccaaaaatacaaaaattagccacgcatggtggcacacacctgtggtcccagctactcgggaggctgaggtgggaggatcgctggagcctgggaagttgaggctgcagtgagccgtgatcatgccactgcattccagcctgtgtgatggagagagaccctgtctcaaaaaaaaaaaaaa

SEQ ID NO: 155182 - DNA, 304 bp, Homo sapiens
ttttttgcctggcaataaatattttaatttgtttcatttttatgatgacaaataattttcaagtttatttccttatttaaatacaaagctaaaccacaaacaggtataatcaagacattgtgtctcacatttacactcccatcggatcctcttccaatttgctgaccactgaccaggctagcggggggtgggagggaagactttcttaggtagcaccgtcgtgaggcccgagacaaggcctcgacagcaggtctggaactttcaaccccagcaggatgagggggaatgggggtggatgtcaggt

SEQ ID NO: 155183 - DNA, 844 bp, Homo sapiens
cctcgccgggatgtttccaagctcttgtttcccctaacgtctcaacaggcgctcactgaagtgtatgaatattttttaaaaaggtttttgcagtaagctagtcttcccctctgctttcttagaaagcttactagccgctgggccccaagcacgggcgcgggcatagatttcctcttccacaagctgccgcttttctgggcaccttgaagcatcagggcgtgaaatcaaactagatgtgggcagggagagtgttgcttacctgccctgctggggcagggtttcctgaaactgggttaattctctatagaaatgtgaacactgaatttattttaaaaaataataataagaatttaaaaaaattaaaaataaaaaaaaccacagaaaacaactttacatgtatataggtcttgaagtgagtgaagtggctgatttttttttttttttttttttgctttttttttgctttttgtacaaacagattgaaaatggtactctaatcaaaaatacagttttgcactgggaccagaaattacttacctgacatccacccccattccccctcatcctgctggggttgaaagttccaaaacctgctgtcgaggccttgtgtttgtcagacacccagtgtcctcctgcaaggacgcaactgtgagctgaggtgtgagctcaggagccatgacctggtgtctcctgcccaccctggtcccaggtaaatgtgaatggagacaggtatgagaggctgtcctcgtctttgattcccccccaaccccacctcgggcctcacgacggtgctacctaagaaagtcttccctcccaacccccgctagcctggtcagtggtcagc

SEQ ID NO: 155184 - DNA, 811 bp, Homo sapiens
ttttttgcttttttttgctttttgtagaagagattgagaatggtactctaatcaaaaataaagttttgtagtgggaccagaaattacttacctgacatccacccccattccccctcatcctgcgtggggttgaaagttccagacctgctgtcgaggccttgtgtttgtcagacacccagtgtcctcctgcaaggacgcaactgtgagctgaggtgtgagcctagggagcccagggacccctgaccccggccgctgctgccagcctcagaaaggcacccaggtgttgcaaggggagcacacagggcccggcagcccccagggaatcaaggataaggggctaagggttttcaccttaactgtgaaggcaggaggaataggttgactgcttcctcccggccctttcacagaactgattctcacacacttgtcccttcagtccagggggccggggctcaggagcccatgacctggtgtctcctgcccaccctggtcccaggtaaatgtgaatggagacaggcatgagagcctgtcctcatctttgatttcccccgcaacccccaccctcgggccttacgacggtgttacctaagaaagtcttccctcccacacccaccccccgctagcctggtcagtggtcagcaaattggaagaggatccgatgggagtgtaaatgtgagacacaatgtcttgattatacctgtttgtggtttagctttgtatttaaacaaggaaataaacttgaaaattatttgtcatcataaaaatgaaacaaattaaaatatttattgccaggcaaaaaaaaaaaaaaaaa

SEQ ID NO: 155185 - DNA, 730 bp, Homo sapiens
ttccccgagacaaagtctcactctgtcacaggctggagtgcaatggcaggattacggctcactgcagcctgaaactcttgaactcaagcgatcttcctgcctcagcctcccaagtagctgggaccacaggtgtgtgccaccatgcctggccactgctatttttcttaatgaaagaggaaatgtacagaattgacattaagactaaatgcaggaaaaattgattcagtagacattttaatggaatttccctcaggttttaacaaatcagtagtttatagtaaccaaatcttaacacacacttattattacaactatattaacataatttattttctattcgggaggtaccatatctgaattaaagtacaagtcccatcttaatggagaaaattgattgctgaagcaaaaaggtacagaacaaaccattcaatttcaatggtcacattgtgaagaagcttaccactcatttaatttgaccaaaaatgctattattgaagataattgatgacataatcctagtatatccctgagtaacggcagataaggatttaaggttgaggatattccccaaatgctctttcctcttgagttcttctatttcccatatgcatcccaaatgccagataaggctagcatggaaagttaaaccttttgcacccaacatagccaaagcaggcacccatatccacacaaaacttaccatcatactattgccctgttcctcacgaaa

SEQ ID NO: 155186 - DNA, 301 bp, Homo sapiens
cggcacgagggagaacccatgcaacttgccaccacagagccaggcccgcggcgactggctcctggtgggtattaaagacgagtcgggaaagaagagcagggttgcctgctgaggaagcttttcacagcatgagaccttccgcaggctcaatcaaaccttcaatggccccgaaagacatcttgattgaaacctcatgagagactctgagccagaaaacccagcaacttagaacccagatacctgaccatcagccactgtgtgaaataataaatgtttgttgttttaaaaaaaaaaaaaaaaa

SEQ ID NO: 155187 - DNA, 679 bp, Homo sapiens
aaaacaacaaacatttattatttcacacagtggctgatggtcaggtatctgggttctaagttgctgggttttctggctcaaagtctctcatgaggtttcaatcaagatgtctttcggggccattgaaggtttgattgagcctgctcttctttcccgactcgtctttaatacccaccaggcgccaaccgccgcgggcctggctctatggtggcaagttgcatgggttctcccatcaggacctcccgatgagcctacgaggtcggttataatactgtcgccacttcagagggaggaaacagagcccggagggttggggaacttcccgaggtcactgaactggtgtcaggcccagattggaatccaaacacatcccagcccatgcccggctccccagcgccggctcccaggcgtcttcccgggtgccagcggcacccgcatccattcaaatgctgcccagtccccgctcctcagtcgcttccctttaatacgcgcccgcatctccccccgacccctcagggtcaggcctctcggtgacttttcctttttctctggcagaaactgaggggtgagaccgatggttgtgtcccgaacgagggcagattgcctagagctcgtcagacagggacccaagggcgagtctggcagggcgtggtagctccgcgccgctcccacgcgtccg

SEQ ID NO: 155188 - DNA, 677 bp, Homo sapiens
atcaggacaaagagcctatgaatatatcactgatgtatataaaccctaaggcggttaataaaagctaactgtttagtgttatccatttaagggaacaggaggaattgcataacttttagattagtcatagtggtgctcctaagggatatgctgttgtatatttgtatagccagggcacttagccttccaaaccaatttatataccatgttcttcaactgtgggtgagatttagcctcaagatttgatttactatatgtaagtacattacttgatttctataaagaatctttagtggaagaggttattctgaattatttatcaatatgattaatacccagttagaaattattaatgatcttcctttatactatacataggataacttttaacttgtcgcgtacagttgttgctctgaggatcttaattttgttactttctaggctacatgaagctatctttttaaaaagtgtactcttcattttcactgttattgtgtacttagcataaaaaactcaaatctaggccaggtgcgagtggctcatgcctgtaatcccagcactttgggaggctgaagcatgcggatcacttgagcccaggagttcaagaccagcctgggcaacatggctaatgaatactaagcatagttttgatgtctttcatattaaagactttctca

SEQ ID NO: 155189 - DNA, 1522 bp, Homo sapiens
cgagtcggtacagggaccccagctggggctgagaccaagaccctgcccagcacggatgtggtccatcctacttcggacagcgacgcggtggggcccaggacggacttgacacctcagccaagcctgcccctttgcagggcaccagggcagttgggggagaagcagcttccatcttcaacctcggatgatcggagacggcttgagtgaagatgaaaatgacacgaagcaaaatgcccagtcttcggacgagtcctttgagccttacccagaaaggaaagtctctggtaagaagagtgaaagcaaagaagccaagaagtctgaagaaccaagaattcggaagaagccgggacccaagcccggatggaagaagaagcttcgttgtgagagggaggagcttcccaccatctacaagtgtccttaccagggctgcacggccgtgtaccgaggcgctgacggcatgaagaagcacatcaaggagcaccacgaggaggtccgggagcggccctgcccccaccctggctgcaacaaggttttcatgatcgaccgctacctgcagcgccacgtgaagctcatccacacagaggtgcggaactatatctgtgacgaatgtggacaaaccttcaagcagcggaagcaccttctcgtccaccaaatgcgacattcgggagccaagcctttgcagtgtgaggtctgtgggttccagtgcaggcagcgggcatccctcaagtaccacatgaccaaacacaaggctgagactgagctggactttgcctgtggccagtgtggccggcggtttgagaaggcccacaacctcaatgtacacatgtccatggtgcacccgctgacacagacccaggacaaggccctgcccctggaggcggaaccaccacctgggccaccgagcccctctgtgaccacagaaggcccagggcggtgtgaggtctgtgggttccagtgcaggcagcgggcatccctcaagtaccacatgaccaaacacaaggctgagactgagctggactttgcctgtgaccagtgtggccggcggtttgagaaggcccacaacctcaatgtacacatgtccatggtgcacccgctgacacagacccaggacaaggccctgcccctggaggcggaaccaccacctgggccaccgagcccctctgtgaccacagagggccaggcgcctccccgaccacccgatcgcgcagctcctgaggcggctgcagtgctccgtgtacagcgccctgtatcccgccgtgagcagagcagccgcgccagccccaggctgctgccccccgacccccaaccccggaagccgacggctgcggccctcgcagagcctccattgcatgctgtccccgcccgagcccagcgcagccccgcggccccaggacagtccccccacgcccccactccaacccggccccgtggggtctccctcacccctgggggacaccgcatctggattgccagacaaggacagctcgttcgaggacctggagcagttcctggggacgtctga

SEQ ID NO: 155190 - DNA, 917 bp, Homo sapiens
  misc_feature (1)...(917): n = a,t,c or g
tacgccctgcttggcacgagggcggcgtcatccaggtcgtgtggggctgcgaccagggccacgactacaccatggataccagctccagctgcaaggccttcttgctggacagtgcgctggcagtcaagtggccatgggacaaaaaaaagggcttcccggttgcccccaccacgaagggttaaaccctggggattccccctcagcccttccaagttagagggacagggaccccaagggggtttaagaccaaagaccctccccagccggaatgtggccaagcttctttcggacagcaacgcgttggggcccaggtcgggcttcccacctcagccaagcctgcccctttgcagggccccagggcagttgggtgagaagcagcttccattttcaacctcggatgatcgggtaaaagacgagttcagtgacctttctgagggagacgtcttgagtgaagatgaaaatgacaagaagcaaaatgcccagtcttcggacgagtcctttgagccttacccagaaaggaaagtctctggtaagaagagtgaaagcaaagaagccaagaagtctgaagaaccaagaattcggaagaagccgggacccaagcccggatggaagaagaagcttcgttgtgagaggtgatgcctgcaacgcgaggctcgccctgcctgtcggggccggggctccatgcatgctcttcattgcagggaggagcttcccaccatctacaagtgtccttaccaggggctncacggccgtgttaccgaggcgctgacggcatgaagaagcacatcaaggagcaccacgaggaggtccgggagcggccctgcccccaccctggctgcaacaaggttttcatgatcgaccgctacctgcagcgccacgtgaagctcatccacacagaggtgcggaactatatctgg

SEQ ID NO: 155191 - DNA, 5453 bp, Homo sapiens
agccgccgccggggctgtaggcgccaaggccatgtccgactcgtgggtcccgaactccgcctcgggccaggacccagggggccgccggagggcctgggccgagctgctggcgggaagggtcaagagggaaaaatataatcctgaaagggcacagaaattaaaggaatcagctgtgcgcctcctgcgaagccatcaggacctgaatgcccttttgcttgaggtagaaggtccactgtgtaaaaaattgtctctcagcaaagtgattgactgtgacagttctgaggcctatgctaatcattctagttcatttataggctctgctttgcaggatcaagcctcaaggctgggggttcccgtgggtattctctcagccgggatggttgcctctagcgtgggacagatctgcacggctccagcggagaccagtcaccctgtgctgctgactgtggagcagagaaagaagctgtcttccctgttagagtttgctcagtatttattggcacacagtatgttctcccgtctttccttctgtcaagaattatggaaaatacagagttctttgttgcttgaagcggtgtggcatcttcacgtacaaggcattgtgagcctgcaagagctgctggaaagccatcccgacatgcatgctgtgggatcgtggctcttcaggaatctgtgctgcctttgtgaacagatggaagcatcctgccagcatgctgacgtcgccagggccatgctttctgattttgttcaaatgtttgttttgaggggatttcagaaaaactcagatctgagaagaactgtggagcctgaaaaaatgccgcaggtcacggttgatgtactgcagagaatgctgatttttgcacttgacgctttggctgctggagtacaggaggagtcctccactcacaagatcgtgaggtgctggttcggagtgttcagtggacacacgcttggcagtgtaatttccacagatcctctgaagaggttcttcagtcataccctgactcagatactcactcacagccctgtgctgaaagcatctgatgctgttcagatgcagagagagtggagctttgcgcggacacaccctctgctcacctcactgtaccgcaggctctttgtgatgctgagtgcagaggagttggttggccatttgcaagaagttctggaaacgcaggaggttcactggcagagagtgctctcctttgtgtctgccctggttgtctgctttccagaagcgcagcagctgcttgaagactgggtggcgcgtttgatggcccaggcattcgagagctgccagctggacagcatggtcactgcgttcctggttgtgcgccaggcagcactggagggcccctctgcgttcctgtcatatgcagactggttcaaggcctcctttgggagcacacgaggctaccatggctgcagcaagaaggccctggtcttcctgtttacgttcttgtcagaactcgtgccttttgagtctccccggtacctgcaggtgcacattctccacccacccctggttcccagcaagtaccgctccctcctcacagactacatctcattggccaagacacggctggccgacctcaaggtttctatagaaaacatgggactctacgaggatttgtcatcagctggggacattactgagccccacagccaagctcttcaggatgttgaaaaggccatcatggtgtttgagcatacggggaacatcccagtcaccgtcatggaggccagcatattcaggaggccttactacgtgtcccacttcctccccgccctgctcacacctcgagtgctccccaaagtccctgactcccgtgtggcgtttatagagtctctgaagagagcagataaaatccccccatctctgtactccacctactgccaggcctgctctgctgctgaagagaagccagaagatgcagccctgggagtgagggcagaacccaactctgctgaggagcccctgggacagctcacagctgcactgggagagctgagagcctccatgacagaccccagccagcgtgatgttatatcggcacaggtggcagtgatttctgaaagactgagggctgtcctgggccacaatgaggatgacagcagcgttgagatatcaaagattcagctcagcatcaacacgccgagactggagccacgggaacacattgctgtggacctcctgctgacgtctttctgtcagaacctgatggctgcctccagtgtcgctcccccggagaggcagggtccctgggctgccctcttcgtgaggaccatgtgtggacgtgtgctccctgcagtgctcacccggctctgccagctgctccgtcaccagggcccgagcctgagtgccccacatgtgctggggttggctgccctggccgtgcacctgggtgagtccaggtctgcgctcccagaggtggatgtgggtcctcctgcacctggtgctggccttcctgtccctgcgctctttgacagcctcctgacctgtaggacgagggattccttgttcttctgcctgaaattttgtacagcagcaatttcttactctctctgcaagttttcttcccagtcacgagatactttgtgcagctgcttatctccaggccttattaaaaagtttcagttcctcatgttcagattgttctcagaggcccgacagcctctttctgaggaggacgtagccagcctttcctggagacccttgcaccttccttctgcagactggcagagagctgccctctctctctggacacacagaaccttccgagaggtgttgaaagaggaagatgttcacttaacttaccaagactggttacacctggagctggaaattcaacctgaagctgatgctctttcagatactgaacggcaggacttccaccagtgggcgatccatgagcactttctccctgagtcctcggcttcagggggctgtgacggagacctgcaggctgcgtgtaccattcttgtcaacgcactgatggatttccaccaaagctcaaggagttatgaccactcagaaaattctgatttggtctttggtggccgcacaggaaatgaggatattatttccagattgcaggagatggtagctgacctggagctgcagcaagacctcatagtgcctctcggccacaccccttcccaggagcacttcctctttgagattttccgcagacggctccaggctctgacaagcgggtggagcgtggctgccagccttcagagacagagggagctgctaatgtacaaacggatcctcctccgcctgccttcgtctgtcctctgcggcagcagcttccaggcagaacagcccatcactgccagatgcgagcagttcttccacttggtcaactctgagatgagaaacttctgctcccacggaggtgccctgacacaggacatcactgcccacttcttcaggggcctcctgaacgcctgtctgcggagcagagacccctccctgatggtcgacttcatactggccaagtgccagacgaaatgccccttaattttgacctctgctctggtgtggtggccgagcctggagcctgtgctgctctgccggtggaggagacactgccagagcccgctgccccgggaactgcagaagctacaagaaggccggcagtttgccagcgatttcctctcccctgaggctgcctccccagcacccaacccggactggctctcagctgctgcactgcactttgcgattcaacaagtcagggaagaaaacatcaggaagcagctaaagaagctggactgcgagagagaggagctattggttttccttttcttcttctccttgatgggcctgctgtcgtcacatctgacctcaaatagcaccacagacctgccaaaggctttccacgtttgtgcagcaatcctcgagtgtttagagaagaggaagatatcctggctggcactctttcagttgacagagagtgacctcaggctggggcggctcctcctccgtgtggccccggatcagcacaccaggctgctgcctttcgctttttacagtcttctctcctacttccatgaagacgcggccatcagggaagaggccttcctgcatgttgctgtggacatgtacttgaagctggtccagctcttcgtggctggggatacaagcacagtttcacctccagctggcaggagcctggagctcaagggtcagggcaaccccgtggaactgataacaaaagctcgtctttttctgctgcagttaatacctcggtgcccgaaaaagagcttctcacacgtggcagagctgctggctgatcgtggggactgcgacccagaggtgagcgccgccctccagagcagacagcaggctgcccctgacgctgacctgtcccaggagcctcatctcttctgacgggacctgccactgcacaccagcccagctcccgtgtaaataatttattacaagcataacatggagctcttgttgcactaaaaagtggattacaaatctcctcgactgctttagtggggaaaggaatcaattatttatgaactgtccggccccgagtcactcagcgtttgcgggaaaataaaccactggtcccagagcagaggaaggctacttgagccggacaccaagccccccttcaaacccaaaggggggggaggaccctccgaccttcccatgcgggtgcacacaaagggtgaggctgacacagccactgcggagtccaggctgttaaaggtgctcatcctcactgccgtcctaaggtgggttcgggcttcaccgcctggccctctgtggtcacagaggggctcggtggcccaggtggtggttccgcctccaggggcagggccttgtcctgggtctgtgtcagcgggtgcaccatggacatgtgtacattgaggttgtgggccttctcaaaccgccggccacactggtcacaggcaaagtccagctcagtctcaagccttgtgtttggtcatgggtaccttgagggatgcccgctgcctgcactggaaccaacagacctcacacctgggggacagaggcagataagaaggtgcgagggccacagccctgggagggggtcctgactcacacttactgcaaaggcttggctcccgaatgtcgcatttggtggacgagaaggtgcttccgctgcttgaaggtttgtccacattcgtcacagatatagttccgcacctctgagaggggagagtccagtgagtccaggcccctgatgctccaacctcccggggggacgacgatgacaatgtgaaaccatcacagctgggaagacatttctgcacatggttcaccatgcagtgggcccaagcaaggggcctatgagggcctcgtttattaagatctttaaactgctttatacactgtcacgtggcttcatcagctgtgtgcatttcaggatggtttttaaagaaacctcagaaagctatttccttaa

SEQ ID NO: 155192 - DNA, 2381 bp, Homo sapiens
  misc_feature (1)...(2381): n = a,t,c or g
ccactcccacataaaatgctcatagtttgggagaggaaagagggaagattctctcttcttttaacagagagatgattgctctgtatacccattgcttcctccctgaggctgtccccaaagtgaaccacttgnatggagtggtcaaaatcataaggttgtagcaagccaaagatacgtaattgtgacagaaagcacataagcaataagcagaaaaccacgaagtgcatgctgtgatgcctgtgactccttacatcccgctcagtgccatgtcctcttttgtgatcttccagaaagctccagggattcatttgagttccacatccaagtaacagatgaattatattcatgttgtaatgcattttgtgggagtttacaaaaccagtgtctgttaaaactttgggaaaatgtcttaagaaaacgttggtgcttgggtgatgctttatttgtttaattatcaagaacaaattatggcaatgctagtttctgcttaaccaaaatactctgtgtatatattatacatatataaatacatgggattgtgtatgtctatatgtgtttaaagcttactatgtcttcattttggcttccatgactatcttttatacatggaattccttaagattgagaatatgtcactgagtgaatgatacctgcagacagtcagttgatatatgtagagttcagaatgactggttttctcatgtgcctttggccatggattcctcaacactggattgtataacagaattttggggggggagcttttaaaaaataatgactgagtctcccaccagaaccgattacatcattctcttgtggcgggaccccaggtagaattgccttttcttttaaagttctccagatggagctaatatgcaacaaagttgaaaaccactgatcctgggggtgtcttgttaattttgaagtaaaagtgtacagaagacgtagtggtatgagaaaggtccatttttaagacagttacctgttgtgctgctgttacaatatataatgaaaccaagtcacgggagtgaactttatcaatcttttttgattgntanaaagtaaaaaacgtagttcaccactttcaggagagaacttcatagcacaatgtctttctataagatattcttaatgatttagtattttacaacatttgtttaccatattttgatatacccatttttttctatctgccccagttttattaaaaaaactatatattattttctaaagaaacaatcatatttttatacaaaattatgttttcaggtaacgaaatagatgtagggtacagtggaacataagcagtgttacccctgggctgggagtcagtattatacaacaaatggtgagctggaacatgccctgtctgtgctgtccctcctggtgctggggtcgcggatggtggtaggcaacattggccttaatccacgctaggttcacctggacactttaaaagggaaaaaagttcccatagagttctgtggtcaccaaattggtttgccttttaccaaatacctttaatagaaccaaagtttgaaaatttggaaaggatgggaagtatctcagtctctgcataagaggattaaagtatgaaaggatcatttaatgactgttttaccttataagtcattaagtaatccacccatttcttatggatgatgcttaagcctgggtgaggttttgtactctaaggagcccagatccataatgcagtgcatttccttagcccttagagtttcttgcaaacatttaaaaaaaaagacatatttaagaaagaaagataaagaaaaaacatatttaattactgtaaacaggtactgctttatgtttattttctctctacttcaaccaaaatcagatctttgaggttttgctgacattgttggtggttttgcacatgttctttctaattggatttatgaatagttctatgggttttcaaagatgaatcatgctaagaacacttctgctttttgatccactgtttgcagcagaattatatatatgtataggaaaaatccactttgaataatcccatgttttgtatttgggaaattgtttttaaaaataaaaaggaaaggaaatatataaagctgttatttattcctgcatttccttacatatctatcgccttgtcagtatacccgttttggtatatattgcctctgcacatctacatttgtatatgcaacagtgagctttatatctacataaactgtaaataatcctttctgtgaaaggatcatcatatcaagatgataccaaaagtatgtaaaaagaaacctgcattattttgtaattatttcttatagatatttcatggtaagattagcagtcaataaagttacttttttgcctttaaaaaaaaaaaaaaaaaa

SEQ ID NO: 155193 - DNA, 1603 bp, Homo sapiens
  misc_feature (1)...(1603): n = a,t,c or g
aaatctcggggtgcctttactgtaacaagttatgctcggctctcttttattttacaagaggatggtgagggagagaatggaagaacagagggggcggacgtataagacatttgacactgcctatgtctgatttctctttctttctttctttctttctttctttctttctttctttctttcctttctttctttcttgcaagctgtgatcggatgcaatctttgtgggacattttaaatggaagggttcattgatgtgtattgcttgccaagccaaaatgttgcctttggggaaaagggagagaggtgttcatgggagtgcagggaaaggaggttttggggcagagattttgacttaaaataaccagacttcttctgggctgctgaaaagagggcaaaagttttaaatttgttcaagttttaaaactatgttcagttattgatttggccacttctgaatattattttgggatttcccctttcatgcttattttgttcagaatcctaatgaatagaggttgctggactcagggtaaaagcaggatgaactggagatgggacatacaaggtacttttggaattgccatagattacacctataatcagagtaaatgtcatcaacaaataatcaaaatattttttacatttgctcttctaaaatcagagcctattttaaatataaaagaaagtagatgtgataataatataaactacagtcacattaagttgatattaaattcaaaatctaacatagatttgcactgttgggtgtgtgttccgaatcagtgggttttcccactgatggttgatttcgggagccaggcttcaatgtttaattctattgtaatgtggttatttagcctgaatggttttataaggtggaaaggcaaaaaatttaattcccgaagaaaactagtgttttactatgactgtggtaaacatttccaaagcccacctggtgggaaaatacaaagttttaatgctgtgtgttttttttgtttttgtattttgtctcatcgacaaaactgggcagaaaaaaacggctttcgtatatttttcctgctgggtgggtcagaaggaaaggccgtgaagctaaaggtctcccactgagacgctgttctgcaaggagccgacctcacgtgccgccgccgccagagaagagagcacctgttcatctcggctcactgtgaggcctgnagctccagcgcctggcaggcgaggggcccgcaagccatcccccccacagcccacccgagaggggccatccctgccagggaaatccatatcccgacatgccctgtgccccacagcagaccttaagacctgccctcctaaaatgtcccatgaagcccattgtcccagtagagctgttagtttttaacaccagtgaagtattaccttttggttaaaaggatgcatgtgtataggtgtatgtgtgtgcgtgtgtgtttgtgtttttggacttgtgtggagaatgaagaaagggttccatttaggcatttgcaaatattcgatggcatcatgaaaagacaaaaaaatcctataaaatatatcatattttgctatgattttgtgtgtacatgtaataaaattattaagtataaaa

SEQ ID NO: 155194 - DNA, 826 bp, Homo sapiens
aggaggaggagtaggaggaggaggcggcggccatttgggctaggacagtaaaggcaggtgagggtgggggccctggctggctggaggagattgtataaaagaaaacacgtgacacaaggaggggagcaggcaggtgttttaggaaaggtctggtccaggcaggaaggtgggatgtttattccagagcaaaatggccttcgtccgtctgttctaaccgccatgcccacttcttccacagaactacaattacaaccagcatgcgtatcccactgcctatggtgggaagtactcagtcaagacccctgcaaaggggggagtctcaccttcttcctcggcttcccgggtgcaacctggcctgctgcagtgggtgaagttttggtaggtgagtgtcagagtgagccgacccaggccacatcctggcagtggaggcacagtcacccggggcagggccaggatcttggtatatcctcagatctcagtgggcagcgacatgaagtcaggcaatttcttgcaaccaccaccgaggccccgaaaagcactggtcgtcagggagctcctccccttggcccccagcctgtgccagccctggcccggctgccacacctctgtttcataggctggggacccaggctggtttctcctggtttcttcccactgcactgtggtgcttcagtggccaccagcctcgtcacatacaccagcatctttctgtacctcctccctttggtgacctgaagtcactgtgacagttctccaggaaggaggagcttcctacttttgagtttctctgtggaaataaaacatgaatcttgtttccctaaaaaaa

SEQ ID NO: 155195 - DNA, 702 bp, Homo sapiens
cccacgcgtccgggggttcccacccccggtctgcggtgggcagcagctcaggttctccaaatcattgcgtagttccgaataccctcggccacacctggccttctccatgctcggaataacttcctgcagcgaccaacaggctaaagagggggaagggatccagcaccggctcctcctccggcaaccacggtgggagcggcggaggaaatggacataaaacccgggaactctgagacgtctcctgggatgtttaactttgacactttctggaaagaattttaaatccaagctgggtttcatcaactgggatgccatacacaagaaccaggtcccgccccccagcacccgagccctcctctacttcagccgactctgggaggatttcaaacagaacactcctttcctcaaacttggaaagcaattatttgagggtgcggacgcgtcatcactgcagaaacgtgcaggcagagccgatcagccgggtgcaggatggcaggaggtggcagctgtaacttccaagaactacaattacaaccagcatgcgtatcccactgcctatggtgggaagtactcagtcaagacccctgcaaaggggggagtctcaccttcttcctcggcttcccgggtgcaacctggcctgctgcagtgggtgaagttttggtaggcaatttattgcaaccacctccgagaccccgattgttt

SEQ ID NO: 155196 - DNA, 1406 bp, Homo sapiens
  misc_feature (1)...(1406): n = a,t,c or g
ccgggctccaggggttcccacccccggcctgcggtgggcagcagctcaggttctccaaatcattgcgtagttccgaataccctcggccacacctggccttctccatgctcggaataacttcctgcagcgaccaacaggctaaagagggggaaggtctggagggatccagcaccggctcctcctccggcaaccacggtgggagcggcggaggaaatggacataaacccgggtgtgaaaagccagggaatgaagcccgcgggagcggggaatctgggattcagggcttcagaggacagggagtttccagcaacatgagggaaataagcaaagagggcaatcgcctccttggaggctctggagacaattatagggggcaagggtcgagctggggcagtggaggaggtgacgctgttggtggagtcaatactgtgaactctgagacgtctcctgggatgtttaactttgacactttctggaagaattttaaatccaagctgggtttcatcaactgggatgccataaacaataaccaggtcccgccccccagcacccgagccctcctctacttcatccgactctgggaggattttctaacagaacactccttttcctcaacttggaagcaattatttgagggttccggacgcgtcatcactgcagaaacgtgcaggcagagccgattcagaactacaattacaaccagcatgcgtatcccactgcctatggtgggaaagtactcagtcaagaccccctgcaaaagggggggaagtctcaccttcttcctcgggcttcccnggggtgcaaacctgggcctgcttgcagttgggtgaaagttttggtaggcggagcaaaagtgaggggcaccacaggcgaacaggcaatttcttgcaacccaccaaccgaggcccccnaaaaaagcactgggttcgtccagggaagctcctcccccttggcccccaagccctgtgccaagccctggcccgggctgccacacctcttgtttcctaaggctgggggacccagctttgtctctccttgtttcttcccactgcactgtggtggtttcagtggccaccaacccttggcacatacaccaagcatctttctgtacctcctccctttggtgacctgaagtcactgtgacagttctccaggaaggaaggagcttccttacttttgagtttctctgtggaaataaaacatgaatcttgtttccctaaaaaaaaaaaaaaaaaaaaaaaagggggggccgttttaaagaaaccaatttataagccgcgggcgggcgaggtaatattttttttatggggccaccaaaattaaatccatgggccggggtttaacaacgggggaatgggaaaaaccggggggataccaaaaataatcccttggagacaaaccccctt

SEQ ID NO: 155197 - DNA, 1266 bp, Homo sapiens
atgactcgccagtgccaggcctcaaaccaacagctcgggccccagcccctggccacaacgccacctgacctgttcctgggttttcagcagctgtttgggacctttgctagctggggccgggagccccactgcgggggccccgatttcccccaacccatccagaccgttgaagatgcccttaggaagccttcaggacttcagctgattaattacattcacacttatcttccacttcctgcaaaggtactggatttccctcccaaacctcctcaaccaggaatggatgtgcagggatttgtgctttacctcatgagccctccagcatcccaaggacatcctgttcctaagtaccaaatacacagaacctttcgacctgcacctccaggaggtgtggcaggcgtgcttgtgggacacccgtttgacacggtcaaggtacggcttcaggtccagagcgtggagaagcctcagtaccgcgggacgttgcactgcttcaagtccatcatcaagcaagagagcgtgctgggcctgtacaagggcctgggctcgccgctcatggggctcaccttcatcaacgcgctggtgttcggggtgcagggcaacaccctccgggccctgggccacgactcgcccctcaaccagttcctggcaggtgcggcggcgggcgccatccagtgcgtcatctgctgccccatggagctggccaagacgcggctgcagctgcaggacgcgggcccagcgcgcacctacaagggctcgctggactgcctcgcgcagatctacgggcacgagggtctgcgtggcgtcaaccggggcatggtgtccacgttgctgcgtgagacgcccagcttcggcgtctacttcctcacctatgacgctctcacgcgggcgctgggctgcgagccgggcgaccgcctgctggtgcccaagctgctgttggcgggcggtacgtcaggcatcgtgtcctggctctctacctatcctgtggacgtggtcaagtcgcggctgcaggcggacggactgcggggcgccccgcgctaccgcggcatcctggactgcgtgcaccagagctaccgcgccgagggctggcgcgtcttcacacgggggctggcgtccacgctgctgcgcgccttccccgtcaacgctgccaccttcgccaccgtcacggtggtgctcacctacgcgcgcggcgaggaggccgggcccgagggcgaggctgtgcccgccgcccctgcggggcctgccctggcgcagccctccagcctgtga

SEQ ID NO: 155198 - DNA, 2383 bp, Homo sapiens
  misc_feature (1)...(2383): n = a,t,c or g
atgactcgccagtgccaggcctcaaaccaacagctcgggccccagcccctggccacaacgccacctgacctgttcctgggttttcagcagctgtttgggacctttgctagctggggccgggagccccactgcgggggccccgatttcccccaacccatccagaccgttgaagatgcccttaggaagccttcaggacttcagctgattaattacattcacacttatcttccacttcctgcaaagtaccaaatacacagaacctttcgacctgcacctccaggaggtgtggcaggcgtgcttgtgggacacccgtttgacacggtcaaggtacggcttcaggtccagagcgtggagaagcctcagtaccgcgggacgttgcactgcttcaagtccatcatcaagcaagagagcgtgctgggcctgtacaagggcctgggctcgccgctcatggggctcaccttcatcaacgcgctggtgttcggggtgcagggcaacaccctccgggccctgggccacgactcgcccctcaaccagttcctggcaggtgcggcggcgggcgccatccagtgcgtcatctgctgccccatggagctggccaagacgcggctgcagctgcaggacgcgggcccagcgcgcacctacaagggctcgctggactgcctcgcgcagatctacgggcacgagggtctgcgtggcgtcaaccggggcatggtgtccacgttgctgcgtgagacgcccagcttcggcgtctacttcctcacctatgacgctctcacgcgggcgctgggctgcgagccgggcgaccgcctgctggtgcccaagctgctgttggcgggcggtacgtcaggcatcgtgtcctggctctctacctatcctgtggacgtggtcaagtcgcggctgcaggcggacggactgcggggcgccccgcgctaccgcggcatcctggactgcgtgcaccagagctaccgcgccgagggctggcgcgtcttcacacgggggctggcgtccacgctgctgcgcgccttccccgtcaacgctgccaccttcgccaccgtcacggtggtgctcacctacgcgcgcggcgaggaggccgggcccgagggcgaggctgtgcccgaccgcctgcggggcctgccctggcgcagccctccagcctgtgacgctcaccccgccctccttccccagggctccttctcagaaacctgggacataaattggcccctgagtcgattgccctgcttcctgctgggatgctgcgagctgtggagtctatcagacgtgggctgaattttgctgatcagctgggtagttttggccgagaactgcacttgcctcagtgttctcatctatgaaataaggaccctcatgcccacactgtagagtcacgaagctcggagattattcccagcagcagccagcacctggcctggctgaggccattgcaccgttatcctggaaactgaggcagacactccagcccctttctgggatcctggccacgtcattgtgctcctgccctgcaggctgggctcccgggggtctctgatggccaaccaaggggccacccagggacctcttaacttccacacatcctccacccgggggggtggcggggccacccctcttggtcttgtgtttaggggacagaggaaaacttgggtgttgcctcctgggtgttcacagaactggatcctctgcataccccagcttctccacatgccactgctagggggtaccccagctgctgccactcctgctggagggtgaactggggaccctgcaccctccgggaagccatggagtctgctggaggcaccatatcagvcctgcgggactagggtggggagcaaacaggccagcgcgtggaggtctggacagttcaagtgtgatgcagctgtgcgcaaggagaaatcctytccgcctctgggcctcaggctgcctgtccataaaaatggggacatggccaagctgacggacaaactgagtctccggcccaacctaccaccgccagcccaggatcccccaatagtgtgccanaggggctcagcagagaacagtatgggacccccctcacccaggcctgggaacacctccagccacaaagaagccaaaggtcagtccctcttgctcccgcagcaaacggtgcctcccagggatttcttcagtgccaggggtttcattccctgttgaagggcacagggcttgttagtggggcacaggggtggctagttggggcctgtggcagaggagggctgcaccaggcgtcctggggaatgtgctcagtgaagacgacactgggctttgcacaagcctggggtcgctgtacagatacttgcaaggggattaaggcggtctttgttttttaaaaaaaaaaaaaaaaaaa

SEQ ID NO: 155199 - DNA, 903 bp, Homo sapiens
ataagtgaacatttatttatttttaaatttctctctaggcaaacaatggaatgtattggtggtttgctggtgaaccgtttatagagaattcaactccatccatggctggaagagggtctgctgccttccgcagaggtggtctggttctccccacaaatgccccgacagctgaagtgatgctgagatgcacttcttcaggcaggaggatttgctccatgtagcttttcctatacacagggagggcgtttacagctctgcttcatagcagcggatgctgcaggggtatgaggggctgacccttgctgggacaactgagcacagatgaatgtgtcactgagaaggaattccataacacatgtgactttcaaagtttttattgagtccaaatggactgtagatacagtgaggatgctgctgccttttgtgccaatgaattcaggctccaagatccccaggacacccccattctgtctccatctcttgcatctgctttcctttgcaggttgacctcattttcctaatcccattgcccccatgaaagctggaaacccatggcccagaggtaacccttgggaaagagaaaatctcatctcctaacctttgagtggaaaatgcctaaggaatggttctgaatggctcagctggaccccatgcctctccttggtctaatcatgggagccaaagggatgggtcacttacagccagcttggggcatttgccccgttgctgtggccacatgcccttaacagaagggcagaaatgttcatggggtcagcaaagagagcagcctcctcaaagttcagaggagtgtaggcacaggtcccacagagcagcgccacaccatccttgtgctctacatcctagtacaattgagttggggaaggtgttgattgttctcgtgcc

SEQ ID NO: 155200 - DNA, 552 bp, Homo sapiens
  misc_feature (1)...(552): n = a,t,c or g
ttggaagcacaagcttcttttattttaaacaaaacaaaaccaaaaaccaaaaaccaatgaggctaccaaacaggcatctttatttgtaaacagcttaacactgaaaataaaaataagactatgaaagaacaatacactctccattcttctagaatcagaacttagcatgtcattatgacttaagagtcacgagagatgcaccactgaagaagtgtattgtcaacctttcatgctcaatttagctagtcctcttgacaaattaaccttacagaataccacacaaaatggtgattcctcaactcatattagctcaaattccatacacaaacacacctcctcttcttcatcagtgctcttccctgatggcacattagaagcactttttgtctcctcccctaaagtagaagcatcaccattagaagcctgngttccttgttctgcttcccactcctgcaatacctcctctaagttaaaccgacgcctgtagtttacaaagaagttcttcacttggccaacagtcttgttgccaattacatctgcaatagcttgaaa

SEQ ID NO: 155201 - DNA, 3116 bp, Homo sapiens
  misc_feature (1)...(3116): n = a,t,c or g
caggcttctaatggtgatgcttctactttaggggaggagacaaaaagtgcttctaatgtgccatcagggaagagcactgatgaagaagaggaggcacagaccccacaggctcctcggacactgggtccatcacctcctgccccatcatccactccaacaccaacagcccctattgccactctgaaccagcctccaccacttcttcgtccaacactgcctgctgccccggctcttcaccggcagcctcctccactccagcagcaggctcggttcatccagccccggccaactttaaatcagcctccaccacctcttattcgccctgctaattccatggccaccccgtcttaaaaccaagaccggtgttgttcacgggttggtgggtcaacaagccaccatcacttattggaattcagacagattcacagtcctcactgcactaaaaattaaattggacacagctgcagtaacttttcaccccatcattataccagtgctcatctgactgatgaaaaagaggaaagaataatcatttctagatactgaggctgcgaactagttctgtgggaagtggactagcataagtggatgtctaagaaatttttcagttcactagactaaaatgttttacaacaaaaagcctccagttaagcctcctttctagagtatatgttcagcaatgttgatctcataaaaggaaaaacaaaagatttaagtattctatataccaagtttttgttttgtttttactgtatttattttattgagggtcctttatattcctgcctcttcatagtcaaggctcttagtacaggaatattgacttaggaattgtgaaaactccttaaggttcttaagttaagggatggtttggcttttttcctttaattttttaaaaaccattttcctatgttaggagtgcaagaatagccagcatttccgattttgacatatgttcattttatgcatatttaagaaattatagctgcatatcccttctttcaaaaaatgttgcttttttttttaaaggaattttaatatattcctttaaaagaaagcaatttaatcaatggcaagccaattatataaaacccccaaagaatgtactgaacctactaaccctttaacatacagtttagggtcctagcgcagagtccttgttttaaaggtcattgactcatcatctgtcagtaatgagaggattggaagaataattttgcatacaaatgaggacttaatttgttgaaatataatctctttaagttccttgaaaatggagttggttttttttgtttctaaatgctatctgcttttaactagtagttgcctacatctggggacttcagagaagaattatattttgttagttaagtagacacagtggttatggaagcatttctttacagtaccctttacgtgtttggtttctgaacttaaaattgccctcatacttaataatatggtctgcatttaatatgaaaggtgttttattgataaatctattgtactatttggatacatttgtgtattccttgcagccaacctgtattcgtgggattggtgtagggttaaatcatcaacattatttcataaaataagaatttgttctgtgttatctaaagatgtatcagtatattgtcacagttgtgctgttaactaaaaatgctgagacccctttttatagaaaaacaaaaagacatcaagtcttcttaattcaacccataatcattaagtacttaacaaagaatattttacaagtgatagtatttcaacaatgtgtaattaatatttttgatacagtgatttcatattggaatcattatttgtgcaaagggacagacagatcacttagattgctatactagtggacataggctaaatgtttgcacattcacattcttatcacgtgtagaatacttcacaaaatagtcaacatctaaggccctaatttatgttttgaaagatcatgtgttcccaaagtattccctattgttgggctccacagccttaaagtgctatagatttaaattcattgattagttttaatttttaattttaggactgtgtatttccataaataccctacggtactgggcatatttggaaactctttttccaggttaggtccttttctttctcattgaatcatcttaaatagttcttggccctgaatttagctgatttaaaattcttaatattcaagaatttatacttattttttccttaaaagccacaggggacagttaaatatcttaaaatatctaaaacattttttaaagcacttagattgtcttacgtatgtggcatactatacctttacagcgtttaattggtcttgtctcttgtcagtaggaccttcagtacacagtatgtggggatatggtcaagtccaaagttgggtcaagcaccccagcatctgtcccagctgttcaagtatattggtgattccattaaaaaaatcctcctcctatccccagacatgggcccaaagttgctgtatcctgagggggtgtgcccggtaattggatttacatgcattagagcacacagtagaaaaacgttagcttcaattagtaatatgacacatgtatatagtgagatgtctttattgtgtgctttgccatattttgtaaatattttgccacgtcattatttttcttttttgtttangccagtgtttggccctggaagagtgatatgcttgctgcttaatcaaaggattaaagatttaaagatgtctatgtcttctatttttatataatttcatgttctatgaggaatttagtacctcttcactgtgaaattcgaaataatggatttttataaaaggcaaaactagaaatcttttaatggacaattttcattaatttcagggttatcatttttggaggaaatctacaccaaagtgggtttttttaaaatttacctaactaaaaataaaccacactgtggatacatcttataaaactaatggaaacaatgtttttctatatgatttaattctagtgtaatatggatgaggtaagagtaagttatgatcaaactttttatgttcttaataagcttgcaattgagtaaaatagaatataaaataaaggtgaaataatataaaaaaa

SEQ ID NO: 155202 - DNA, 1944 bp, Homo sapiens
gtgactgaggcgagatcttccaccctcctgctccagggcctctaggtggcctccagagtgggctccacagcttgaaggcggcgtttttccgcgggtggtcgcagcgtccgcagagtcggagaaagctgcgtcagagactgcaacagtcagcacacattcctgtctgatcaggctccctccctcaagtcctctgcgatagctctggcgatgcttcaggactggtgcaggaggatgggtgtgaacgcagagcgctctctgctcatcctggatatccctgacgactgcgaggaacatgagttccaggaggccgtgcgggctgccctgtcgcccctgggcaggtaccgagtgctcatcaaggtcttcagaaaggagctcggggccagggcagccttggtggaattcgctgagggtttaaaccaaagcttgattccccgccaaatagcaggcaaagggggaccctggaaagtgatctccctgccccaggcccttgatgctgagtttcaggatatacccagtttccctgcacagccccaggggcaagcagtggccagaggtgcaggtgaagcaggagctgcaggtgaggcaggatctgtaggtgaggcaggaggtgtgaatgaggaaagatctgcaggtgaagatgaggcaggaggtataggtgaggcaggaggtgtaggtgaggcaggagcagcaggtgaggcaggagcagcaggtgaggcaggagcagcaggtgaggcaggaggtgcaggtgaggcaggaggtgcaggtgaggcaggaggtgcaggtgaggaaggaggtacaggtgaggaaggaggtgcaggtgaggcaggaggcgcaggtgaggaaggaggtgaagatgaggcaggagctgcaggtgaggcagtaggtgcaggtgtggtggaggcctggacccagtcatggcgccagaccctgcggcctctggtgaaaactatggcctaccgggaactgagacccttttccgggagggagcagccaggctgcgtggaagagtcctttgagagctggttggaggacgccaaggatatgctgcagctgtggtgccacgcgtcggaaagggagagaaggaggcggctgctggacagcttggatggcctggccctggatatcgtgagcggcctcctggaggaagatccagacttctctgcgcaggactgcctgacggcgctggggcaggtgtttaggagccgggatacatggatgacctcgcggatgaagttcctgacctgcacgcaggggccccaggaggggctgtttgccttcgtggtgcgcctggaaggcctgctgcagaaggccgtggagaagggggcggtccacccagccatggccaaccacctgcgactgcggcaggtgctgtctcgggcccgccccagcgaggcactccaggataccctgaggaggatgcagctggagaggaggccacctgacttcctgaggctgctgcggctcatccgggacatggaggcgtgggcagcctccctagcaaggagccagcagggtgtggcctgggcagcggccccagtggagagtgaagacccagctgctgcccaggcctccccggcccagggggacgccagcgaggctgatcccggagcagaagatgctgatgaggctgcttccaccaccaaagaggccgccagggttgcccctgccactggggaagatgaaaatgcccctgcaggccttgaaggcctaggtcagggaaggtcccccgacgcccctgggggcctcccagccaggatgggcagtgcagtcgacatggccccaggaggtcccagctgggagccagagggccttgtccaggttggaggccaggaggctgaggagcctccccaggaggggctcaagcccatcttagaggagtcagaaaacgaggatgaggatggggctggggaggcgggcaagcccaagtcccccccgggcaaatag

SEQ ID NO: 155203 - DNA, 2394 bp, Homo sapiens
acttggaaaagcaaggagtgtcgggaatggcgaccaagcggctcgcgcggcagcttggattaattaggagaaagtcaattgcgccagcaaatggaaatctcggaagaagcaaatccaagcagttgtttgactacttaattgtcattgattttgaatcgacatgctggaatgatgggaagcaccaccatagccaggaaataattgagtttccagcagtgttgctgaacacatcaactggacagattgactctgagttccaggcttatgttcaacctcaggaacatccaattctttcagaattttgcatggaattgacaggcataaagcaggctcaagttgatgaaggagtccctctgaagatttgcttatctcagttctgtaaatggattcataagattcagcaacagaagaacattatttttgctactgggatttcagagccttctgcttctgaagtaaaattatgtgcatttgttacttggtcagactgggacttgggggtttgcctggagtatgagtgtaaaagaaaacagctgttaaaacctgtgtttttaaattcttggattgatctcagagcaacttacaagcttttctataggagaaaaccaaaaggactaagtggtgcttgcaggaagtaggaatagaattctcaggacgagaacattctgggttggacgattctcggaatactgcccttcttgcttggaaaatgatcagagatggttgtgtaatgaaaattacaaggtcgttgaacaagttcccactaagaagaatttcagcattctggccagaaatttgaatacaattcaagttgaagaaatgtctgcctgtaacattagcatccagggtcccagcatatataataaggagcctaaaaatataataaatcctcatgaaaaagttcaaatgaagtcaatttgtgcaaattctcctataaaggcacaacaggatcaattacaagtaaaaaacaatataaaagcaagtcttcacaatgtcaaaagttccttacctctttttaatactaagtcctctacttctgtggggcagttgcagtctcctaccttgaattcacctatctatatgcaaaagcaaggaaaaaatgaacatcttgcatttaataccaaatctaaggcttcaacagttggttcagaattggtacttgtttctaccaccgttccaactgttcatcatgtttctgatttggaaatgagctctactctggactgtttacctgtgttggctgattgggaggatgtggttttactgccagcatctcagcctgaggaaaacgtagactgtacagttcccattagtgactcagacttagagatttcatttaattctggagaaagattaatggttttgaaagaattggaaatgtcaagtcatgaaaactttggagacatagaggaaactcctcaaaaatctgagacttctaagtctattgtgtacaagagtcctcacactactatttataatgtaaaagaagccaaagatccaggttcagatatttctgcctttaagttacctgaacacaaatcaagtaccttcaacagagttaatgccaatatgtctcatcctttagttttggggaaacatcctcttctttcaggtggtaccaaaaggaatccatgcagtccccaagctttcccaccagcaaaaaaacaacccttcactattcatgaagaaaagcctacatcatctgattgctccccagtaagaagttcttcctggaggcgtctcccatctatattaacttctacagttaacctacaagagccatggaagagtgggaaaatgacacctccattatgcaagtgtggtcggagatctaagagacttgttgtttctaataatggaccgaaccatggaaaagtcttctattgttgccctatcgggaaataccaagaaaacagaaaatgttgtggttatttcaaatgggaacaaacacttcaaaaggaaagagccaacagcatggttccatctcattccacagggggactcacttttagttctccagaaacaagccatatttgtgacagaaatttaagtatttccaccaaaaattctttgagactcaggccttcaatgaggaattgataacctttcatgtatgaatcctaattgttccttgaatttccaaacatgagtattctgataacatcttacactattttatttttattttatatattaatgcttactgcatttaccatactttcttcaggaaccacaagtgtaatcttttgtaaacagtatttattagattacatataataagcaacaatagtatatgatccttcttttatagttagaccttgaaacaagtctaaactatttttaaattatttgcacaaaatgtgactaaaaaaaaatccctagtctattttcagg

SEQ ID NO: 155204 - DNA, 386 bp, Homo sapiens
  misc_feature (1)...(386): n = a,t,c or g
cacactgttacaaatctggggggggtttctttcttctgataattctagagcctgttaccatagaaaggcatttcttcaatggctggttgtagttagttcatgtttttcaatcaaatttgcaaatgtatttgttgctgtatagtgattgttttgcaaaataaaattgcttgtcacctaactgcttnnnnnnnnnnnnnnnnnnnnnnnnnnnnnnnnnnnnnnnnnnnnnnnnnnnnnntnggggggggccccttttaaaaaatccctgggggggcccaaatttccccggggggaaaaaaattattttttttctttttgggggggtttttttaaaggggggcccggccccgttttttaccacccgggggggggaaaaattttttttg

SEQ ID NO: 155205 - DNA, 1745 bp, Homo sapiens
  misc_feature (1)...(1745): n = a,t,c or g
aggtgcaattccttaaatagtgattaaatttctctagaaagaagttaacagctcattagaaaagttttaacctgtgaaataagtatttttctcaacattcttttaagtttttatataaggtaacactaggtaaacattctgcatactagaagtcagtttattacaaatacatgtcaaaaataaagattatacaaggcaccaaactactagatttggcattaaaacaaatgtttatttctaatcacaacaaaattataatgaataaatgttcttgctttgtatggaaatacaattctttattaaagttaacagaaaggaactgatcgtttgtaccagtaaaagagagaaacacacaggttaaatatcttcttgtggggttaaggggtagaacctatcttgccttcactctcaagataacgactcaaattaagctttttgagcaccactcttgtggggacacacataccgctgatctaggaatgaaatcttcgtggtctcaattctaggatctactatgccagtttctctctggctttagcctttgagaacctgtataagaatacgtaagtaatccagagctgtgaagagtttaaaggccaacttctccagtgaactcaacctctgggtcacttgcaaccagaaattggatacctcataatgatgcaggaaagacccgagttcatgatgagtttcaaaggccacgttcatttaggaaccaactctctctggatttacctgctgagttccagcagcgtgatgggctgacatcccacctacaagtatgacacctgtgtaacaccagctaggtacgggctggagaaggctgaagagagaatgccattaaatggaagaatgtactgattgtggtgacccttctcccacacacacacacacacacacacacacaccctacagtaatacagcaagccgtggaataatccngcccaatatataacattcccatccagtattttattaaggaaattaaccctgaatggtggttgatttttgacatagctgcaattacagttttccttcctatttttcaagcccacaataaggaaaataaactactcatggtcctaaatactagygataaagtagattcatggccttggtaaggaaattttaagccattccttcaaagattgacgtgctaaaattaggcattgatgttttgagttttttttacacctaggatttttagccttgggtgtgtaggtgtaggccaagactctctgcagggataaagcttattttcaaactcagaaaataaaatgtcaatcataaaaatctacttcaactttagcaaaaagaaaaaaaaaatcaacataaaagtatactctggtatgctggggattccgagggttcccaacacactgttacaaatcttgtggggggtttctttcttctgataattctagagcctgttaccatagaaaggcatttcttcaatggctggttgtagttagttcatgtttttcaatcaaatttgcaaatgtatttgttgctgtatagtgattgttttgcaaaataaaattgcttgtcacctaactgctnnnnnnnnnnnnnnnnnnnnnnnnnnnnnnnnnnnnnnnnnnnnnnnnnnnnnnnnnngggggggccccttttaaaaaatccttgggggggccccattttacccggggaagaaaaaaannnnnnnnnnnnnnnnnggggggctttttaaaaagggggccggggcccgtttttaaaaaacgggggga

SEQ ID NO: 155206 - DNA, 1288 bp, Homo sapiens
  misc_feature (1)...(1288): n = a,t,c or g
atgcaccagtgtcatggctgataagacactaccaaggcaccctcattctaacatcaaggctgcgtgacagctcacctcaccttctgactaacccagtgcttctgtgctaagggcccccttaaacctctaccttcattatgtgcttggcacaaaggaatgatatatcttagatttggaaatggaatattcttccccaatcttactgtagtctaaggaccctttcacagaccttctattaacccatagcttactcagctttagttcctgggtaaatcaaatctgtgttttgcaaactacgatgtaagttcagttgcttctgattctagcagagctcagtgaaactctttgcttacagacatgctcatttttattaatgtcacacacggtattctccatgtgaaagacagaatttctttcatcctatttaccaatcccttcagatccttgtgaggaaccaacagaacagcttcaaaaaattaaaagggttttttctttcccttcacaaataggcacatgcttacttatatggcaaggttagaaaatccacaatgacaaaaccatgtggaaggacaaagagaaaaagacgcagaaggacttcctcttccagccaagatggacttgccctcccaccatgaccaacgagaaaactgaaactgggatagaatatttgagaaaactgttttcagagattggaacacaggcagaacaggactgtgatatttgagaacaggaaaacactgggagggcaaatctcatacacacttgtgttttcctgcccaatgggcgntttctcgaccacacagagagaggtagagacctcccagaaattgaggcaatgtcactgtcactaaagctgagagtcttacagtgctaacatgttgggagtttcacagaataaggtactggagaagagggaactacatacaggtgaggcctcaaaagagtacgcaaaagttctctgcaggtctgtggccaagggctgggggtgggggaagatgggggggctggggataagatacttggtgaaaaagaattggaaacaaatgtatgtaaaatgcctcctaatttacttcataagcatatgaagttatatacacaattttaaacaatggcctataaactgaaaaatattatacttatcaagttatttaacttgggatagagctggctttagaataagtcttcagtgaaatggttcatacttgaataatacccaaaaacaaatcttaaagttttaattattattataagtcaaaattaattcagatgcaaatatgcataatcacaa

SEQ ID NO: 155207 - DNA, 1002 bp, Homo sapiens
ccacagccggagcagctctgagagcgggggcttctgagcccagacagactcagcttggtgcccccctggcactgggagaggcgaggggcgggccccaggaccccagtggggagggggctatatctccttgcccccaaggcttacaaagaggtctcagggccagtgcacgggcagatgggaccggggaagactttgagggtgggcatccagtggacaaggagaagccagatgtgctgcttctacgggtgtcctctcccacctcctgtccacccactgtgcccggggaacaaagagccgttacgaacacaggaatctccccatcccccttcctgctgatgccaactcaccaggcttgggactgctgccggtggatggtaccagagtccatgatctgctctgtcaacttcaacttagctcagtgcagccagggacaaccttgcaaggtgccagccctgggagcccctcttccgcactacacagctccctccactcctctcttatcactgggcagacggaggaggtggtacagcacatggggtttgggagctagacagaaggaagaacagcctaacccttggtgtacccccatccaagctggggagctgcatccttttgagctggctgcaggaggacccctggcttagggctggtggctggccccacagcctcccccaagctcctccactgacccaggagtgcccagacgggtggcccccaaaatcccagcctggggagctaggcacctcactcttggtctgacctctccaggccaggctctcctcaccccatgccctgggccaaggtcctaccagccatgactactgcatgacaagaggtggggggtacagacctcaggtacatttgaccctgaggttaaaaggggttcaggtcaagaggtgggagaggaaaggggtagatgggaggtggaatctgtaggaaagagaaaaagcaaagtcgttcactgactgagaaccccccaggaagtggagacgggtccctggg

SEQ ID NO: 155208 - DNA, 1640 bp, Homo sapiens
aaaactttttttttttttttttttggagatgaaaactatcatttatttcaattgaatttagtttcattaaaaaattctatgataacattaaaacagaaacaggacgtttatatgactgtctttaacctcaaaagtccaaataaacatatagacattttgaatatagctatcattttaacaaacctcattatgatcactgttgcaatttcagtcacctaaaatacggaaccatgactattaataaacatttactgtgtgtgggtttgttgggactgaacattaaccatacgtgtatttctaaggtactagggagttggaacagctactacgggtcaatggtattttgggcagttggctgtgtgtggggtgtgtggctttttagggcttcactcaattaaaacatcgggttggctctctgcctgatggggcaaaaaacttggctataccgaaggacaaatatatgtataccaaaccaaatgcacacgtgtgcatggtctatatacatatatgcaatttccagggaggtgacaccttattctgagaggtccatgagactccacttcaaaccataatagtaaaacctttagtaaactgaactcaacatattacagccaccatcatcaggaaaaattaaagacatcatagttcaaataaagtacaaaaggtcccaggaagtattgtggtttgttgattcattcaacagaaagcccaaatgacaatgctattagtggtcaggagtaaactaacctggacaggctcatgaaaatgaacccctggatgcatcctgagaacgtactgcataattatagtcaatgcttgcaataattttcagtttgtctcatcacgttagcagagccctatccatgcaatttagaaaggatttcaaatacagccccaaaccaaaaaggcttacggtcaacagagggttagccttccattaatgagaaatccaaaaaagaataatgccacgtatttcaggaatgtcggttagaaggtttggccttcttgggaagtgtcacaatgctgagtctaaaactgccaaacagttaacccgtgtccccaagtccatgccaactcctaaaaggaggaagggacgggcccacatttgtgtcccttcaagtatccaaagcacccttttaagggcttcccattttggagaaagtagtattttctcttccttctcttttagaacatatgataaaatattgcccttctatcctttaaccatgtatccatttttttttttgatggggagtaagggggtacacactccgtactacaatgtcacaaactttttctttttgttgttcctattggttgtaactgtactattttgtaacaagaagccttcaggggaaataatggatcctagttatgtcaaagaaaacaatgagacaaaatggcaacttcacagtcttcaagtaaatagaatccctgatataaatggaaattaacatgtaattttgggggcaataaaaacaacaacaaaaacctgtgacaactctgtcctactcctttaaaaatgagccttgactctgtagtctcttaaggcacaaaacctgatagacggcatttaactggtggcctgcacctctgatttggattttaaaaaacaactattgacatttaaaaaaaaaaaa

SEQ ID NO: 155209 - DNA, 614 bp, Homo sapiens
aagataagatgcgagggcctcagtagattggataaaggcgagcgcggagggcaaggggcacgatggccttaccagggtctcagtacagccaccaaggacacctacgacgcctttcacatgcaggccctgccccctcgctaacagccaggggatttcaccactcaaaggccagacctgcagacgcccagattatgagacacaggatgaagcatttacaacccggttcactcttctcagccactgaagggccagaagatgaacagactgaccttgatgagctgtgcacaaagtggcataaaaaacatgtggttacacagtgtgaataaagtgctgcggagcaagaggaggccgttgattcacttcacgctttcagcgaatgacaaaatcatctttgtgaaggcctcgcaggaagacccaacacttgggacctataactgcccagcggacagtggcaggacaggaaaaacccgtcaatgtactaggatactgctgcgtcattacagggcacaggccatggatggaaaacgctctctgctctgctttttttctactgttttaatttatactggcatgctaaagccttcctattttgcataataaatgcttcagtgaaa

SEQ ID NO: 155210 - DNA, 465 bp, Homo sapiens
attgaaaaatcgatagccactcgagagtggcggaattccgaagctggtgcagccaaggctcctgcccgtggggccagggggattattcctgggcctctggaggctgggtgggtggtcacagggctgtgctgcagagacacctgttggcctctgggttggctcctgcccacacaggctactgacccactctttgttttctgatttgctttcacgccagggtctcagtacagccaccaaggacacctacgacgcccttcacatgcaggccctgccccctcgctaacagccaggggatttcaccactcaaaggccagacctgcagacgcccagattatgagacacaggatgaagcatttacaacccggttcactcttctcagccactgaagtattcccctttatgtacaggatgctttggttatatttagctccaaaccttcacacacagactgttgtccctgcactt

SEQ ID NO: 155211 - DNA, 1719 bp, Homo sapiens
gggggagtgcgaatttcttggcctgtcggcaggtgctttctcaaaggccccacagtcctccacttcctggggaggtagctgcagaataaaaccagcagagactccttttctcctaaccgtcccggccaccgctgcctcagcctctgcctcccagcctctttctgagggaaaggacaagatgaagtggaaggcgcttttcaccgcggccatcctgcaggcacagttgccgattacagaggcacagagctttggcctgctggatcccaaactctgctacctgctggatggaatcctcttcatctatggtgtcattctcactgccttgttcctgagagtgaagttcagcaggagcgcagacgcccccgcgtaccagcagggccagaaccagctctataacgagctcaatctaggacgaagagaggagtacgatgttttggacaagagacgtggccgggaccctgagatggggggaaagccgcatagaacgaagaaccctcacgaaggcctgtacaatgaactgcagaaagataagatggcggaggcctacagtgagattgggatgaaaggcgagcgccggaggggcaaggggcacgatggcctttaccagggtctcagtacagccaccaaggacacctacgacgcccttcacatgcaggccctgccccctcgctaacagccaggggatttcaccactcaaaggccagacctgcagacgcccagattatgagacacaggatgaagcatttacaacccggttcactcttctcagccactgaagtattcccctttatgtacaggatgctttggttatatttagctccaaaccttcacacacagactgttgtccctgcactctttaagggagtgtactcccagggcttacggccctggccttgggccctctggtttgccggtggtgcaggtagacctgtctcctggcggttcctcgttctccctgggaggcgggcgcactgcctctcacagctgagttgttgagtctgttttgtaaagtccccagagaaagcgcagatgctagcacatgccctaatgtctgtatcactctgtgtctgagtggcttcactcctgctgtaaatttggcttctgttgtcaccttcacctcctttcaaggtaactgtactgggccatgttgtgcctccctggtgagagggccgggcagaggggcagatggaaaggagcctatgccaggtgcaaccagggagctgcaggggcatgggaaggtgggcgggcaggggagggtcagccagggcctgcgagggcagcgggagcctccctgcctcaggcctctgtgccgcaccattgaactgtaccatgtgctacaggggccagaagatgaacagactgaccttgatgagctgtgcacaaagtggcataaaaaacagtgtggttacacagtgtgaataaagtgctgcggagcaagaggaggccgttgattcacttcacgctttcagcgaatgacaaaatcatctttgtgaaggcctcgcaggaagacgcaacacatgggacctataactgcccagcggacagtggcaggacaggaaaaacccgtcaatgtactagggtactgctgcgtcattacagggcacaggccatggatggaaaacgctctctgctctgcttttttttctactgttttaatttatactggcatgctaaagccttcctattttgcataataaatgcttcagtgaaaatgcaaaa

SEQ ID NO: 155212 - DNA, 1685 bp, Homo sapiens
tttcgtggcgtgcggcggaggcgaccataatgttgttaggggcatttgtgtctcgtccgcgggaagaccggcggagcccataaggccttggggtggaattctgagagctgattcctgccttgacttctccactgttcctggaggaatccgagaagagcagagcggagggagccccagacacgggccgcggcagagctcgcggagcttggcgagtgtttcctggcctctctggttggtcagcacccccagccagctggcccaggacccctctacagatgtccaggagagcaggcgttaccaagatgtccgaccccttcctgaagctagtcttcatcaaggacacgacattccgccccaagcgcaagttagagccaggcacccagcgcttggagctgcacaagaaggcgcaggcgtcgctgaacgccgggctggacctgcggctggccgtgcagttgcccccgggcgaggacctgaacgactgggtggctgttcacgtggtggacttctttaaccgcgtcaacctcatctacggcaccatcagcgacggctgcacggagcagtcctgccccgtcatgtcggggggccccaagtatgagtaccgctggcaggatgagcataagttccggaagcccacggcactctccgcgcccaggtacatggacctgctgatggactggatcgaggcgcagatcaacaacgaggacctcttccccaccaacgttggcactccgtttcccaagaacttcctgcagacggtgcggaagatcctgtcgcggctgttccgcgtgttcgtgcacgtctacatccaccactttgaccgcatcgcgcagatgggctccgaggcccacgtgaacacctgctacaagcacttctactatttcgtcaaggagttcggcctcatcgacaccaaggagctggagccactggtgcgcgggcttggggctgagggcgtgcggttacgctggcggccccggctggagttgggccccggggaccctgctgatgggacaagtggtgaggtagctgggagggatcctgcgttctcccacggaacaaatgccggcgacagatctgaaaatgctgactctctggcctcatggggtagcctgctgcccctggtctcagaaagaaatgaccgcccggatgtgccactgagacgccccgcgggtctcccggtgcccgaaccgccgctggggcctcggagacttggaggaggacgctctggaaccatcatcccgcttctctccggcctgagcatctcagggagaccaggggccgagccgctgagcaggtgttggtcctcaggagctccaacccgcggactgcagatgccttcctcagtctcgagcctcagtctcccgtctgggactaaaacgtgaactctgtaattctatgtgttactagcaaccggaaaagcccactgtgtttttaaaccacttccactttccaggaggctggatggcttccagggtcactccttgccctgggtggctcccaggctcctggaacttctgcctccacctcgctggggagcccccagggctgctgtggccacagccctgcctgggcctgtctctcaagggcacccagcttgctcggcctcctacatgtctcccgttggggaggcaagaggctgaggggcttccgagcccctgagagcggacatctcctcccgcaggccttta

SEQ ID NO: 155213 - DNA, 523 bp, Homo sapiens
ttggtggaacatgggggcttaatttggacacatatgggctgttcttgattcccttttggaaccaaattgctacatattatacacacatatattttgttaattctgcaggcctagggacgctgcagtctgagactgcatgactcactgcttgcagccctttagctggtgcatgccgttcaatgccacgcttctttttcagcactgtaaaacaatgtcagctaaccaagctcctccgtacagacatgtggtttttaaacataaaacaaccaaaaaggaaaaagaaaaaagggaaagaagaagcctaccccagaaccctttctccatgtgtctcgactctaagtgcacgggaatgcaattgctgccaagtgttaactcattcaaacctttggaaatggtggctctctgtgctcagtacccgggccaccaaggcattcatagggccggaccagctccaggatgctggctttcaaagcaaaaagataagtgcccctccttgtttgttaaggctgtggtctcagtcctg

SEQ ID NO: 155214 - DNA, 968 bp, Homo sapiens
atttatttatttatttatttttatttgagacggggtctcgctgtggtatgatcatggctcattgcagcttcaaccttccagccaagtttaatttttacaccaatgattcatttctgcttttacaggtgattactttatctcactagaaaaaaaaaatgtaaaaatctaaacaaaaagtgtccaaaacttacaataagccttaatctcgaataattaccatgacatgtgttacttgtgtgcttattgctgtacagccttctttggctttctgacaagagcaactgctgagcagaagcacttcagcctcgtctggcatttgatgaatttgattaatgtgtgctatggtaagtctattcccctgtataattttatgggagaggccatgtgcaagtctgaatttaaaaaaaaagaaaagaaaaagccttgtgcagaattattacctactcaatacattatatatatgccagagatggctaaagcagctatatgtcaaggtctgcaaaaacatgaagaagctggcatggaaattaacacgttggtggtctgcaatgtgttcaaagttggtgtttttaatgacacttaaaaatagttaaaatatgtaatggctgatttctgaccagactaaactctcagcctgtctaatgttaggcagcttgatctaatcaatctcatccttttcttttcctcagtccaatcttgcaattgctatgtcagtttcagttcacaataataccagtgcagacatggctccttaagattttctccttttccctcacgcgggtcccaattctaaattcccaagggctgacatgattgacatttgccatagcctgaggagggagcatttccttttgtggtctttccttggtttgttttattaggcagtgaatggcaagtctgtctgtgtttctttgcttcaccccaaacaccttggcaaaaatgaaagccttctaatttaactgtgtcct

SEQ ID NO: 155215 - DNA, 416 bp, Homo sapiens
  misc_feature (1)...(416): n = a,t,c or g
agctatgaggcacctcctacgtctgttttctggctgtggtgacttgggatttttaaccttatatatctttttcctttactcaaaacaaaacaatttttagcacactgnnnnnnnnnnnnngccaaaggtttggggcttttttaaggcggaactgtatcccagggtgctttttaggacttaatagggaaatcccaaagtcggagctcctttacctggagttcaattagcccttagggccaaggaaacaggaaaaaaggctttttgggactggaaaggggacatgcaggggcagggggtcgggagcccttttcccctgctgggaaacttcagggggggagaaaagcatttgcccctgggatcatttggggggttcccaacccacagcttaatataggggtgggcatgccctggcctcn

SEQ ID NO: 155216 - DNA, 782 bp, Homo sapiens
ctaagtttcccagcaggggaaagggtcttccaaccccgtgcacctggatgtccccttttcagttacagaaagcattttttcctgtttcctaggccctaagggcttattaaactcaaggtaaaggaggtccgcctctggtttttccatattaagtcctaaaaagcagcctgggattcagggctgccttaaaaaggcccaaaacatttggctttttttttttttttcagtgtgctaaaaattgttttgttttgagtaaaggaaaaagatatataaggttaaaaatccccaagtcacccacagccagaaaacagacgtaggaggtgccctcatagctgccatgcccctaccacatgtgtcagcaggaagtcaggcttttctttcaaggccaagacactaggaacagtgctggagcagggtaggtcaggaggcatttactctcatgggcattgcgttgcaggctcactcacccagacagcaggagaaacagggccatgggaaggacaacacgtgggtctacagacttcattaagtagttctctgcctctccagtttttaaggatgggccattaaggcatggccacccttcacccacaagaaggtcagaggtagggtagagaggagggagctgacactacaggcacccaggacaacctggcttcaagggctcagcatgggaggtggcacaaggcctgaggaggtggaaattggaacgcattgaggaatacttcccctcttggcccccgtctgttttagggggaggaaggagattctgggagagggaa

SEQ ID NO: 155217 - DNA, 486 bp, Homo sapiens
ctagtcgtttgtagttgataatgagaagaaggaagttcagcacgtacgtgacgatgcagatgatgcagaactccttcagcacaaagtacagaatgtaggccaggtacagggaccccacgaccgacatgatggaggacgtcatgagtatcaaaagcgccacagcgcttgctgtcatgccaagtaataactgtagtatataaaatataagtccagagacactgtttggctggtttaatacaccatcctttccaaaaatggaacccaaaagaccaaatcctcgaccccatctggaggcaagggcggcggagcacttcacccagggccccaggtcgcagagggcccggtgctcggggtcccgctccttctcccgctccacgtggttaggcgtagatggagagcaggattccggcagcgcaccccgcataccgggccgcccgctcccaccaaggcaaaaactctcttagcaggacgggagccgccacgaaa

SEQ ID NO: 155218 - DNA, 597 bp, Homo sapiens
  misc_feature (1)...(597): n = a,t,c or g
tttaaaaatcagtntgagattcttagggaaagtgtctgttgtgnnnnnnnnnnnnnnnnnnnnnnnnnnnaacctgctgcaaaataaactgaatggaaaggggcttgagactgttagggtggagtctgtcgggcgtcagtcctgcttgggttgcagctgccgcttccaggcctcgttcaagtaaactagtcgtttgtagttgataatgagaagaaggaagttcagcacgtacgtgacgatgcagatgatgcagaactccttcagcacaaagtacagaatgtaggccaggtacagggaccccacgcccgacatgatggaggacgtcatgaggatcaaagccgccacagcgcttgctgtcatgcctggaggcaagggcggcggagcacttcacccagggccccaggtcgcagagggcccggtgctcggggtcccgctccttctcccgctccacgtggtaggcgtagatggagagcaggattccggcagcgcacactgcataccgggccacccgctcccaccgcggcaccgacactcttagcaggacgggagccgccatcttcccgcggacgcgtgggcggacgcgtgggtcgaccctga

SEQ ID NO: 155219 - DNA, 734 bp, Homo sapiens
ctggcaaaattatgttagtaatataaacatcaaaaaattcttcataccagtgaatcacaagtcctcactgcaacagacataacaaatccaactcctaaaataaattatatgtagttttgaaggtagaggtgacataaaagtaggctgtatattcaaatcctacaataatattcaattttttccaattatcttttgaacagcaatttgcaaaatatatttacagtttcccttaagttatttaataagtagacttagaaaaattactagtaaactaacatttttggaaaattttcttaatttcttttgattaaattatctcgcctctgttttattagacaaatatcttatcagcccatgaatcacatgttgtgagtattttaaaatatctgtttccttccttagtccctaccaccaatgacaaaaaaacaaaatagtaacttgcctaataagtaatgacttaattcttcaaaaaacatcaacaaatttaaaagaaaggccaaacatggttgctcaagcctgtaatcccagcactttgggaggtcaaggtgggtagactgcttgagctcaagagttcgagaccagcctgggcaatgtcacgaaaccccatctctacaaaaaattacaaaaatcagctgggcatggtggcgcatgcctatagtcccagctacttgggaggttgaagtgggaggattgcttgagcccagaaggcagaggttgcagtgagccgagattgt

SEQ ID NO: 155220 - DNA, 876 bp, Homo sapiens
atggcaggagggctgggtgcaccagaagtaactgcagcacttctccacagtgtggagaaggcacactttgacgagctgttatttaaaaaacctcatccaccaaagcgagtgagaagtcgactcaatggagacaatgcaggaatctctgtcctaccaggatctacaagtgacaagatcttttttcatcatctagacaacttgaggccttctctaacacctgtaaaagaactcaaagaacctgtaggacaaatcgtatgtacagataaaggtattcttgcggtggaacagaataaggttcttatcccaccaacctggaataaaacttttgcttggggctatgcagacctcagttgcagactgggaacctatgagtcagacaaggccatgactgtttatgaatgcttgtctgagtggggccagattctctgtgcaatctgccccaaccccaagctggtcatcacgggtggaacaagcacggttgtgtgtgtgtgggagatgggcacctccaaagaaaaggccaagaccgtcaccctcaaacagtgtgagatacactggctgaacacatgcagtgatgatgaatcaatggagtatatgctggaccataaaatggactcttggtaccgagtgcacctatgtctaatcatgtgtgcatgtgaggaggtgctggctgactgcatcagtggaacccagtcaaagcataaaagagccacagtaactcaatgccactctgctattacagccttcgcaagatacttatcctgcacagctgttgctgtagttctctggggaagtgtattgtctgccctagtaggtggctcaacaccatatggaacctgccaaggcttggagcttccaccctctgaagccacagcctga

SEQ ID NO: 155221 - DNA, 2141 bp, Homo sapiens
tgtggtggaattcgccaggggaaaacattctgcttttaggtagtttcaaaattcaggggagggagcctgaaatttttgccatgattggtttgttagaaagagcaggcatcagactacttctgataaaattgtttggaaggtcacgacctcgcaaaaacttttcaagagcaacaaggaagaattctgctgtgaagaacacagtgtacggatcctccgcatattatctcaacagaggacagtagctcaggaggcagcttcaaacggtgacctgtggcctgggccatctcttcgtcatgtgcttcacttttccctgtttccctgtgaactggcttccatggttctgtagggtagtgagtcggagttgtggctgcagcagagcaggagatgcttgcccgagtgggagcaacccacccccgtgtccccaatgcctcactcctggcttctagtgcagccctttgtagactcacctcgcaagaaggaagatctgcctggagacctgatcccagtccagctttttgaccataggtcatctttgtccccttgctcctttgcatcatgtcataaaatttgaggatatcagctgattattttttcttccaagaatgaaaatcaagcagaattgattcctacacgaaaaaaaaagcacacgaatgccaaacctttcctttggtggactggacactaaccagatgagagtaaattttttatccgtggacgtatgtaagctactgctgctgtgtgctctccacagccatatttattgtattaaacaatcagcactaaaccttcaaaaattgcccagtgttcctagttaaatgttcagaggggagaaatagatatattttaaataatgttttgctaatgaaaagagtaaatatttttgtttaaatcagcaaaaactttccattattttatatttcccgtcctactatacctaaaacaaaagattgccggttatacctggggtccactggatgcagtccagccagcacctccctcacatgcacacatgattagacataggtgcactccgtacccagagtccattttatggtccagcatatactccattgattcatcatcactgcatgtgttcagccagagtatctcacactatccatacaaatctaaaattgatactggaaatgttattataggaggcagtgatcgcatttaaaatcaggccaccttacaagtttaattttcaacatctcatggtttttatttggtcccattacaggcctccaaatgttgggtcataaaaaaaatttaggctaccaaagtttaaagaataaaatggaaattttataagaaccttacattaaaaactccggtagtttgcatgagtaagaactccttgagatacacagatccccccacatttgtatttaaaataattggggaggcattgaaatccagaattataaggaaagcattactgaatatgtgtgttattaaaatcaatattattattaaacaaaatagggaggctaggaaatatttggggatcacagtaatagcttttctccaaatatacttttaggaattggaatgtacattatcctattatgtaaaaaagcaaattattaattttaatggagctctcgattgacctttttagcatacttttatagcatgtatattaaaatagaatatattttagcaaaagattgccataaaaccctgacttggctcattttgatatttgcactgtgaagagggcttaaattccaatgtagcaatgtggtggcagacaaatgaaaaactaggaagttctttcacagtaatgcctagttgttccaaatttgctatatttggaggtgctctactggtacttcctgcttgactctctgacctgtgggatgcacattcttcctcagcgctttttccttgttgtggtgacgtacattcactatctgagagtgaaagaccacacacacccctctttttaaaattattgtatctcttccttttcactttggtttgaacaaagatagtgtcaccttgttccgtgaaaaagaaaaagcataaacagtgtatatttagggtatatgggtgatagcttatgatgtgtgtcaatcagttctctgaatcttttactgaaactgagacaggaaaataaaactgaaacaaatcataaa

SEQ ID NO: 155222 - DNA, 557 bp, Homo sapiens
  misc_feature (1)...(557): n = a,t,c or g
ggacatacaaagtgtaggatgtcgaagaagctaagaaaaacggtcaagcacacgcgccgcccgcgagaacagtaaagcagaaggaagagaacgcagcgaaaccggagagagctgttaaaattatcgtggtaannnnnnnnnnnnnnnnnnnnnnnnnnnnnnnnnnnnnnnnnnnnnnnnnnnnnnnnnnnnnnnnnnnnnnnnnnnnnnnnnnnnnnnnnnnnngtcaatgggaggccccagcctgagccctgagcagctggccagccaggagctggcatgtgagtgagaggcatcctagtctcctgctgctccaaagacaatgcccgctgaacaggatggcaggccacatcagcagtccatacagaagtgaagctgtcgtttcttcccctggagcaccagtgaggacaggccccagctgggagccaggcaaggtgggtgagctctgtgctaaccacactgggagctcggataagcgtgagggcaaggctggagaggtccgggacccctgcgtgttgcttcccactcctgccaggctggcacgcccccattcttca

SEQ ID NO: 155223 - DNA, 731 bp, Homo sapiens
aaatcttttcatcaccattatttattatatatgaaccaggtttgcaggacaagtcacactcaacacccttacccaacaggaggggcgacggaggctcaaagagggagtgtagggggaaggatgtcaatgggaggccccagcctgagccctgagcagctggccagccagggaactggcattgttgagtgagaggcatcctagtctcctgctgctgcaaagacaatgcccgctgaacaggatggcaggccacatcagcagtccatacagaagtgaggctgtcgtttcttcccctgggagcaccagtgaggacaggccccagctgggagccagggcaaggtgggagagctctgtgctaaccactctgggagctcgggtaagcgagaggccaaggcttgaaaaggtccggaacccctgcgtgttgcttcccactcctgccaggctggcacgcccccattcttcaccatccctagcacagagcccagggccagggggcagagggcggggctggctcaggagcagggctggcccgtcccatagcgccactcacattgccccttcccctctctcatcccagctctggtcacttagatggtgccatgacaggctatgaaatcccccccctcggcagccaaaagtgcaattcagaccctttctttgctctccgttttgccttttcggacggggacaacctataaagcttctccagcaatttccagaagcccacgcgtccg

SEQ ID NO: 155224 - DNA, 1768 bp, Homo sapiens
ttgtaaatgaaccaaattattactgctaccactatcagggtgtaaatagaagactaatacttaattaaaggcaccttcctaccattagagcagaagacagctcctatagttttgtattttggcagctatgagatattttcatgggaatgtcaacatggtcaagcactttgtaccaagttattaagtaacataatttttaaaatttaaagaatgtgtcttcaactaaaaactttattctttagcatttatttatatttctctgtagggtgttatccctgtgacattgtctctttagtttgctctttcaagagatacttacagatgttgagatggctgccctgcatttccagctaatctcttctgctctaaatatttaaaaacagttcttctcaaacattttcattcagatagctttctgaaagttccctatccctctttaccataattttttaaatgtagccacattgtaatagtaaacttcatatataatgagtgcttcatatttttgttatgggaaagcaatatattatgcagcgcggggtgtagaaacattcagatccctcttcctttactcaaatacagtttcaaaaggaagactcatgagaaatttcataaaatacaagtttttagatgtttatgctttgcctttctttttaaaggtgttttcctgctttgtagtctccaactcccgaaatttaaaatatgggaaactaaagtggttttatttgtgcttaacccaatttaaactcaatgtaaaatgttatatatgcatcagtacaggcattttcaacatattggcaacatattttaaatgaaaacactaaaacaattcttaggtatgaggacaaaactgtaagggaaaaagagtgttaataccatgatggcattaacataaaatatcaaacacacaaagtcattaaaatggaaaatttacagttttacctgttcatatctagtgccccacagtgtgtgtcaaccaaagggtgcagtggctaccttcggcctgttggactggtacaggttacaatatgtcctcttccattgcaaattaaagtccaaatagagaaatacttaggttttagaacacatcagaggtatttctgctgtatttttcaccttaaaaattgacacagagtttactaatagaggagtagagattgttgaccatttttaaaaaaccgatagccactctttttcttttatgtttaaaactgaagttttgccaaatgggaaaattacctgttacctctaccatccttaatgtagtaactttagaatttaaatttttatattactattttcctttttgttgttcacatagtcttaaggcacctatacttttaaattgactttttcatttgatattatctatatgtatgtagttgtgaataatgaattattttaaattataattacctttaataccccctaatttaatttagaagtatttcctcctattgcctgaatacctaaagtagttttaaattttattaatggataaatcccccgggagggggattatttaggtgaaataatatgaagaactttatgaccttatgtttgcccttattgcattccccaaagagttgtaacattttacagtgttaccatttgagtaggggttttatatgttgttgctaatttagtaaacataggagagaaatcaaagtttttctgatttgcttttatgtgatttatctgtatactttgttcatttatataaataaatgtcttaatggtttctatacataaaaaaaaaaaaaaaaaa

SEQ ID NO: 155225 - DNA, 960 bp, Homo sapiens
atggaaaccagcagcccgcggcccccgcggcccagctccaacccggggctgagcctggacgcccggctgggcgtggacactcacctctgggccaaggtgctgttcaccgcgctctacgcactcatctgggcgctgggcgcggcgggcaatgcgctgtccgtgcacgtggtgctgaaggcgcgggccgggcgcgcggggcgcctgcgccaccacgtgctcagcctggcgctcgcgggcctgctgctgctgctggtcggcgtgccggtggaactctacagcttcgtgtggttccactacccctgggtcttccgcgacctgggctgccgcggctactacttcgtgcacgagctgtgcgcctacgccacggtgctgagcgtggcaggcctgagcgccgagcgctgcctagccgtgtgccagcccctgcgtgcccgcagcctgctgacgccacgccggacccggtggctggtggcgctctcgtgggccgcctcgctcggcctcgccctgcccatggccgtcatcatggggcagaagcacgaactcgagacggcggacggggagccggagcccgcctcgcgagtgtgcacggtgctggtgagccgcaccgcgctccaagtctttatccaggaagccatcgtggtcatgtatgtcatctgctggctgccgtaccatgcccgcaggctcatgtactgctacgtacctgatgacgcgtggactgacccactgtacaatttctaccactacttctacatggtgaccaacacacttttctacgtcagctcagctgtgactcctcttctctacaacgccgtgtcctcctccttcagaaaactcttcctggaagccgtcagctccctgtgtggagagcaccaccccatgaagcggttacccccgaagccccagagtcccaccctaatggatacagcttcaggctttggggatcccccagaaacccggacctga

SEQ ID NO: 155226 - DNA, 410 bp, Homo sapiens
  misc_feature (1)...(410): n = a,t,c or g
aggttggttggcccattttgtcccccccccaaagtaagggtcctttccaaaaattcccaggtaggtttttattcggccccctataaggaaaaaactttttccttgcctgcccgggttaactttggcccccccaagggtcctttaaaacggccgccccnnnnnnnnnnnnnnnnnnnnggttgagcacagggtactttattgatggtacatgacaaggtgcggctccctaggcccctcccctcttcaaggggtctacatggcaactgtgaggaggggagattcagtgtggtgggggactgagtgtggcagggactccccagcagtgagggtctctctcttcctcttgtgctcttgctggggctggtggtccaggggtcttactccttggaggccatgtgggccatgaggtc

SEQ ID NO: 155227 - DNA, 435 bp, Homo sapiens
  misc_feature (1)...(435): n = a,t,c or g
cccacgcgtccgcaactttaattttctgaagtataaattatttatgtaaattcattgtttttgcatatttcttaggacatgcatctttaagctttatcattgcccatatgtacagaaagagaataaagacatatgtttatggatggnnnnnnnnnnnnnngggggggccgttttaaaggatccttgggggggcccaagtttacccgggcttgcaaggtaaaatttttttccttatagggggccgaattaaaacctacttgggaatttttggaaaggacccttatttttggggggggacatattgggccaacctccctccagaaatttaaggctttagggnnnnnnnnnnnttttaaggggaaaaaggggtaaaacaacctccatatccttgctgttggaaagttttctttacggagtttgattaatgaaaatttt

SEQ ID NO: 155228 - DNA, 422 bp, Homo sapiens
  misc_feature (1)...(422): n = a,t,c or g
ttttccctaaagccttaaaattctgtagggaggttggcccaataagtcccccccccaaaataagggtcctttcccaaaattcccaggtaggttttaatacggccccccaaaaggaaaaaaatattaccttcccagcccccgtaaactttggcccccccaaggatcctttaaaacggccccccccnnnnnnnnnnnnnnnnnnnnnnnnnnnaacaactggtcatcaatttattaaaatagttgacttaagcatctgcaatggtgacttccacctcaactcctggctcaatactgatggaagtaatctgcttaacaatctcagaaggactgtgcaagtcaatgagtcgcttgtgaattctcatctggaaacgatcccacgtcttagaaccttcaccacaaggagtttttcttgtagtgattct

SEQ ID NO: 155229 - DNA, 400 bp, Homo sapiens; identical to SEQ ID NO: 151425
  misc_feature (1)...(400): n = a,t,c or g

SEQ ID NO: 155230 - DNA, 378 bp, Homo sapiens
  misc_feature (1)...(378): n = a,t,c or g
aagcgcaggacaggctgcattggggccaaacacagaatcagcaaagaggaggccatgcgctggttccagcagaagtatgatgggatcatccttcctggcaaataaattcccgtttctatccaaaagagcaataaaaagttttcagtgnnnnnnnnnnnnnnnnnnnngggggggccgttttaaagaacccttgggggggccaaagtttacgggggctggcaaggaaaaacctttttccttatagggggccgaataaaaacctacctgggaattttgggaaagaaaccttactttgggggggggacaaattgggccaacctccctccagaaatttaaggctttagggnnnnnnnnnnnttttaaagggaaaaaggggag

SEQ ID NO: 155231 - DNA, 1871 bp, Homo sapiens
  misc_feature (1)...(1871): n = a,t,c or g
gagtgagagggagggagcgccggccgcgggagcgggatggaaaccagcagcccgcggcccccgcggcccagctccaacccggggctgagcctggacgcccggctgggcgtggacactcgcctctgggccaaggtgctgttcaccgcgctctacgcactcatctgggcgctgggcgcggcgggcaatgcgctgtccgtgcacgtggtgctgaaggcgcgggccgggcgcgcggggcgcctgcgccaccacgtgctcagcctggcgctcgcgggcctgctgctgctgctggtcggcgtgccggtggagctctacagcttcgtgtggttccactacccctgggtcttcggcgacctgggctgccgcggctactacttcgtgcacgagctgtgcgcctacgccacggtgctgagcgtggcaggcctgagcgccgagcgctgcctagccgtgtgccagcccctgcgtgcccgcagcctgctgacgccacgccggacccggtggctggtggcgctctcgtgggccgcctcgctcggcctcgccctgcccatggccgtcatcatggggcagaagcacgaactcgagacggcggacggggagccggagcccgcctcgcgagtgtgcacggtgctggtgagccgcaccgcgctccaagtctttatccaggtgaatgtgctggtgtccttcgtgctccccttggcactaactgctttcctgaatggggtcacagtgagccacctgctggccctctgctcccaagtgccgtccacttctaccccgggcagctccacccccagccgcctggagctgctgagtgaggagggtctcctcagcttcatcgtatggaagaagacctttatccagggaggccaggtcagcctggtgagacataaagacgtgcgccggatccgcagcctccagcgcagcgtccaggttctcagagccatcgtggtcatgtatgtcatctgctggctgccgtaccatgcccgcaggctcatgtactgctacgtacctgatgacgcgtggactgacccactgtacaatttctaccactacttctacatggtgaccaacacacttttctacgtcagctcagctgtgactcctcttctctacaacgccgtgtcctcctccttcagaaaactcttcctggaagccgtcagctccctgtgtggagagcaccaccccatgaagcggttacccccgaagccccagagtcccaccctaatggatacagcttcaggctttggggatcccccagaaacccggacctgaatgtaatgcaagaatgaacagaacaagcaaaatgaccagctgcttagtcacctggcaaagcaggtgagcaacctcatcactaatcattcaagcttcgcagccagggcgacttctatcaacccctgctctgctgagaaccatcaagcgcagggaagccacgtgacccctcctagcctcaggctccctcgtctgtgtagtggagataaagaacagcacccatctcttagtgttgcctgagactaaagtgcttagcacagaacctggtgcgtagtagatgctcaataaatttttgctggcacgnnnnnnnnnnnnnnnnnnnngggggggggccgttttaaagaacccctgggggggccaaagtttaccggggcaggcaagagaatagttttttccttatagggggccgtattataacctacctgggaattttgggaaagaacccttacttctggggggggacttattgtgccaacctccctccggaaatttaaggcctttgggaaaaataaaatttttaagggtataaggggtaaaacaacctccatacgctcgctgtttgaaaagttggnncnnncnnccacacannnnnnnnnnncccgggg

SEQ ID NO: 155232 - DNA, 639 bp, Homo sapiens
  misc_feature (1)...(639): n = a,t,c or g
catcaantnnnncnttcccnnnnnnnnnnnaaaacccaagtccccggggataaaattttcataaatcaaaccccgggagccaaactttccagccgccaggctatgccggttggtttaccccttttaccctttaaaattttttattttccctaaagcctttaatttttgtagggaggttggcccaatatgttccccccccaaaggaagggttctttcccaaaattcccaggtagcagattttcccgttccggcgtttttaaaacacgggccgggcctaggttttaattcggccccccataaggaaaaaaattttaccttgcaagcccgggtaaaatttgggcccccccaggggtcctttaaaacgggcccccccnnnnnnnnnnnnnncagtggaaaataacttttgaagtaggtcttattaacaaaagtaatggtcaactaaatattaagaatcaacatttgttgggagtgatgtaaatacaaagtcatttggagactatgagtgaatgaagatggacacaaggatacaagaacaggtctcatctaagagctccttatactcttgtttcctttctcaaccacacactaacagggaaaacacactttgtctttgcgttctgtggatgacacttttcgcgg

SEQ ID NO: 155233 - DNA, 1595 bp, Homo sapiens
atgctgcccctgctcgccgcgctcctggccgccgcctgcccgctgccgcccgtccgcggcggggccgcggacgcgcccggcctcctcggggtgccctccaatgcttcagtcaacgcgtcctccgcggacgagcccatcgccccgcggctgctggcctcggcggcccccgggccccccgagcgcccgggcccggaggaggcggcggcggcggcggcgcctgtgcaacatcagcgtgcagcggcagatgctgagctcgctgctcgtgcgctggggccgcccgcggggcttccagtgcgacctactgctcttctccaccaacgcgcacggccgcgctttcttcgccgccgccttccaccgcgtcgggccgccgctgctcatcgagcacctggggctggcggcgggcggcgcgcagcaggacctgcgcctctgcgtgggctgcggctgggtgcgcggtcgccgcaccggccgcctccggcccgccgccgcccccagcgccgccgccgccaccgccggggcgcccaccgcgctgccagcctaccccgcggccgagccgcccgggccgctgtggctgcagggcgagccgctgcatttctgctgcctagacttcagcctggaggagctgcagggcgagccgggctggcggctgaaccgtaagcccattgagtccacgctggtggcctgcttcatgaccctggtcatcgtggtgtggagcgtggccgccctcatctggccggtgcccatcatcgccggcttcctgcccaacggcatggaacagcgccggaccaccgccagcaccaccgcagccaccccgccgcaagtgcccgcagggaccaccgcagccgccgccgccgccgccgctgccgccgccgccgcggccgtcacttcgggggtggcgaccaagtgacccgctccgctcctccctgtgtccgtcctgtgtccgcgcgcgcgggtgcctttcccgccggggactcggccggtgtgcttcgtgctgtagttatcgttagttcctcttcccgagatggggccgccgagagaccccagcgsctttgaaaagcaaggtttgtgctgcgcttccagttccgaaaagcagatgtttaagcccttggactgagggtgggatcgcagactccgcaagacggagaggagggaaatggggcccttttcccctctattgcatcccccctgcccgactccttccccgcacccacggtgccctagattcatggcagaaaatgacccaaatccctgtgtatttgttttatatatttaataaactgttttaaaatgaaagttttagttaaaaaaaatacaaaacaaaaagattaaattgctattgctgtagtaagagaagctctttgtatctgaacatagttgmtatttgaaatttgtggttttttaatttatttaaaattggggggagggcatgggaaggatttaacaccgatatattgttaccgctggaaaatggaactttatggaaccttttccaagttgatctatccagtgacgtggcctggtgggcgtttcttcttgtacttatgtggttttttggcttttaatacagacattttcctccaaaaaaaaaaaaaaaaagg

SEQ ID NO: 155234 - DNA, 2414 bp, Homo sapiens
cggcgggactcagcgggccagagagcgcggcgggccacccccggctcagcccgtggatgctgaccgccccctcggagagtccccgcagacatggcggagagctggctgcgcctctcgggagccgggccggcggaggaggccgggccggagggcggcctggaggagcccgacgccctggatgacagcctgaccagcctgcagtggctgcaggaattctccattctcaacgccaaggcccccgccctgcccccgggggcgaccgacccccacggctaccaccaggtgccaggttcagcggcgcccgggtcccccctggcggccgaccccgcctgcctggggcagccacacacgccgggcaagcccacgtcgtcgtgcacgtcgcggagcgcgcccccggggctgcaggccccaccccccgacgacgtggactacgccaccaatccgcacgtgaagcctccctactcgtatgccacgctcatctgcatggccatgcaggccagcaaggccaccaagatcaccctgtcggccatctacaagtggatcacggacaacttctgctacttccgccacgcagatcccacctggcagaattcaatccgccacaacctgtctctgaacaagtgcttcatcaaagtgcctcgggagaaggacgaaccaggcaaggggggcttctggcgcattgacccccagtacgcggagcggctactgagcggcgctttcaagaagcggcgactgccccctgtccacatccacccagcctttgcccgccaggccgcgcaggagcccagcgctgtcccccgggccgggccgctgacggtgaataccgaggcccagcagctgctgcgggagttcgaggaggccaccggggaggcgggctggggtgcaggcgagggcaggctggggcataagcgcaaacagccgctgcccaagcgggtggccaaggtcccgcggccccccagcaccctgctgcccaccccggaggagcagggtgagctggaacccctcaaaggcaactttgactgggaggccatcttcgacgccggcactctgggcggggagctgggtgcactggaggccctggagctgagcccgcctctgagccccgcctcacacgtggacgtggacctcaccatccacggccgccacatcgactgccctgccacctgggggccttcggtggagcaggctgccgacagcctggacttcgatgagaccttcctggccacatccttcctgcagcacccctgggacgagagcggcagtggctgcctgcccccggagcccctctttgaggctggggatgccaccctggcctccgacctgcaggactgggccagcgtgggggccttcttgtaagaggccaggccctgccccacctctggacagtgcccaagtcagggtccaaaactgccccccaacacaggtccacagacaccccaccacctatgcaggggctgggccagggctccaaggcttgccccaaaggccacatggccaccagccccagctgccatcagattcaagcccaggaggctgaaaacgagggcccaggaccagaatcgctgcctcctttccccagccccaccttgtacacacagtgtttcattgttccgtgttttcccagccccagaaaccggctaaaggaccctgcaccatgagagccgaggcctggaggagcccgggtcaggctggggaggaacagaactgggccctcccagagcacctccgcttcccccctgcttccccaggtctctatccagagagagtccccaggtacaacaaatgctaattagatgacagcaaattaaccccctggaggcttctcctggcagagcctccctggggccggggcaggctgtggatggggcggagcagggcagaagatggactgggggagggggcaaagagaggagaccaaaatgaggtggtggccacagggtggggcaaaggagatcctctctaaaggccctctggggtctttgcctggccccatccccttagggggcgggggaggggacgtaaaatccctaaatctttaaagcccgacttgaggcttgagagcaagctggaagtttgggtttggtggtttgggggccggggcagcccaagctgtatggggccaggacagacagactaatgtaagtgaagtgtagctgtaagctgaaggcttaaactgggagggatgccgagcttgctggaactactgggaccaagaagcggctgtaccccacgcccctgcctgcactcctcgggggcgtggggcgtgccttgctccacccggactccctgggctgcgtcccacatcccaccctcctgccccgtggggcaatttaacctttttcatgaaagttatttacaactcaaaagtttttaaaaataaaatttttaaaaatctaaaaaaaaaaaaaaaaaaa

SEQ ID NO: 155235 - DNA, 470 bp, Homo sapiens
ggcccagaaggaatcgagatcagccgtccagaggagctggaagctgaagccactcatcgtgttatcaccattgcaaacaggactcactgtccaatctacctggtcaacgtgtccagtatctcggctggtgacgttatcgcagctgctaggagtccacagtaggtctctgtcaagccgatgtcgtgatgagggcttttctgatactgacccagaagccacagaaccacaaggaaacccaaaccccctccagctgctgaggcgcaggcacagcctggggtcggatggagcctccagcaccccagcacccaggtgacttccccactcccctgtaaatgtcatggtgctaagactgtgtcaaccccaagacgacacatggtcctgtgctttggccaccgtttgaggcaaaaactaaacagcccgacacgttgtgttctggtgcaggtttgtattaaactgtagctacttctaaa

SEQ ID NO: 155236 - DNA, 1890 bp, Homo sapiens
tcacaggccagccaagtaggtccctctccaagtgcctggcccttcctgcagcttcacactcatccctctgcctagcgtcttcttcccaaatccagtccaacactcatcagtgaagatctctgctgcatccagtgtctccatttctgctttcaccttgggtgcccaccaggtgatccccacgtggagggcgtaatcacagcagaccttggggtcggccagacctcggcacttctcataagcgtccacaagggaggtctccttgtcgggcaggacgtggccgatgatcatggtggtgcctccgacgagtgctgcctgggggatgtcgctgttgtcgtgcacccctctgtgcttccttccctgcaggctctcagatcgatgaccatgttccaaagcgagcttcagctcggatcctcgctcctcccggaggcaggtcgagtggcatttggtaaaggcattgccaagccccccgagtgaggacgcaccgccgccaccagcccgcaactctccagccgaagcttccccagtcatgccgcagaacttcctaatatccgccaaacccaaccctctggcctcgttgtaaggccaagcaatacggtctgcctggaactcctggtgcccccttggccagcgtctccttgcgcccgccaaccaccccggggggtcacatgccccagaagggtagctgggcgggctcgaagctggtgccaggcgcgtgtaaatcgttttgttttgcacgtctggttgcgccagtagtctggtttgacttgttcgtgcatccttctctctctggaccagcttcttgtagacagtgtctgggaaggacctcaggggacagaacttgccggtgccctcggcgcacatgaagacgccgttctcatacacgacgcgcccccggctgatggtgaccagtggcacgccgtggcagcgcatgttctcatacaggttgaagtctcctccctggacctgcgtgctggctgagatggtctttgtggcttctgggtcccacaccaccacatcagcatcggctccgggaataatgcggcccttgcggggatacaggttcagaagcttagctgcgttggaactggtaacggccacaaaacggttctcatccatctttcctccaaccactcctctctcccagatgacgctcatgcggtcctgcacgccactcactccatgtgggatcttggtgaagtcttccttgcccatagctttctgctttgtggtgaaaggccggtgatctgatgccacgatgttcagagtgtcattggccagcaggctcatgaggtaggttgaggtgttggtgtccagtctcaggggaggcaccgtgacataggcagccgcgtgggaccagtcctggtggtagtagtgtaagcctgtcagcgtggcatgtgcagtggtggtctccgccagcacaaccttcccagagcactggtgtgtgcagggtgctgttggcagatggagcttgacggtgggtgaacaggcatgcagggccacgaatgccacgctaaagagcagtctagactgttttctggacaggcagttgctgtgagcagcttcaagagaacggttgtggtaggacagggagggccgtagcagggcttgcatcttagcagctgcgataacgtcaccagccgagatactggacacgttgaccaggtagattggacagtgagtcctcaaggtgacagtccttaagcggagaatgcagggctggcagtcagggcaaggttgcaggaactgcatgatacggggaggcagagaacagcctccagcaccagagcccaccgggaagcccagccctgtttgcaatggtgataacacgatgagtggcttcagcttccagctgttagaaacaaaggacaggaggaaaccaaacttcaccat

SEQ ID NO: 155237 - DNA, 450 bp, Homo sapiens
ttcccaggcctgggtcctcacccctgttccaatggctgccacttgccatgagccccttcgccacctctgctccccggctgaccacctctgtcctctcagcccctgagtgaggaaagggggagtgaagggagaagtgagggtgtggacgcagctcacactgcacggttagcccccaatgggtgactagtcttggctcaaacacagaatgtgcatgaggttgtttataagaaagatgagaaaaaaaatctatcttcctgtgcaaaacaaagcaggctgcctaccaggaaagtaagtcttctcattggttaaactctcaggtgggatctacaatagatgtcaccccagacctcctctccacaggtggggtagatagccaaggttgggagggtcatcacagacacttctggggtcacctcgtgccaagcttggcgtaatgagtggttacgataa

SEQ ID NO: 155238 - DNA, 1365 bp, Homo sapiens
ggcgaggctggtgccaggcgcgtgtaaatggttttgttttgcacgtttggtttgcgcagtagtttggtttgacttgtttgtgcatcctgtgaaaaataacgggtgcttgtgtcactagcatagaatagcgacaggaatagattttttttctcatctttcttataaacaacctcatgcacattctgtgtttgagccaagactagtcacccattgggggctaaccgtgcagtgtgagctgcgtccacaccctcacttctcccttcactccccctttcctcactcaggggctgagaggacagaggtggtcaacccggggagcagaggtggcgaaggggctcatggcaagtggcagccattggaacaggggtgaggacccaggcctggggaaagccaccaggggatggggggaaaccattgacgccgcctcctgggtggcagtgcacaccatctctaaccctgtcaaccctcaactgggtcaatgggccttgggcaaaatgtcaaagagcccagcagcagcgggtggtggcccagctgggcaagagcatcccttgcttgggctaggaaagctttacctttctctgagtgcctccgcctgagagattgtgtgacccggtggcaccaggggaaccacgtcttggagtggtccacttgtaggccatgcgcttcaaatccaccccccagtcccctcataggcccctacccttgcccgggagcttcctagatagaaatcagaaagagattcaaggagccaaatgagcggtcagcccccaccatgcactccttgccccgtgcagagcatccagccagcttcagtcaccagccccacttggctcctggttggaacagaaagggtctcatggttgcactgaatgcagctcctcaaaactgggccttgtacttgctgaaataaaatactgttgtttttgccttaagctgctctcctaggtttgtggggttaaagttgccaagaaaattgtgctactgtgtgtgcgtgtgcgtgcgtgtgtgtagtgctaggagtccacaagtaggtctctgtcaagccgatgtcgtgatgagggcttttctgatactgacccagaagccaaaagaaccacaaggaaacccaaaccccctccagctgctgagggcgcaggcacagcctggggtcggatggagcctccagcacccaagcacccaggtgacttccccccctcccctgtaaaatgtcatggtgctaagactgtgtcaaccccaagacgacacatgggtcctgtgctttggccaccgtttttaggcaaaaactaaaacagcccgacaagttgtgtttctggtgcaggtttgtatttaaactgtagctacttctcaaaaaaacccacgcgtccg

SEQ ID NO: 155239 - DNA, 1892 bp, Homo sapiens
agaaaccaatctgactcccaaccaatggtttgcgatattaacaaaggccacaaacagtacacctgggccagcaaacagtgtgaaactgacaaaactccaagggggaaacatctagcaaataaatcaaaaagccaaagatcaatgctggtgaatattagccatactagaaaccccttaaatatgctggctactatgatttgttttaaaattattgtttagtccatatattaaagagcccagctggatgctcttacagttaaaaaaactgtgtagcccacattactgttttcaacgtcctgtgtggaaagttgctatcactgtacaattttgcttgagcctttattttacaccagggctttccctctaactcagaattgcacgtaagaaggctatttaaaaagtccgataaaaatttgcacaaatcagacttaagaattgagtcagtatgctgtacactttctcccatagtatgttgattaaggaaagggacaaatagaagtgctgccactaaactttcagttgaggaataattgactggaattttttatttctttaaagtagttatcccaggtcaagttaagaccaagagcttaggcattaagccttaaagactgatcttctcttctccttgaagaaatgtcaatatctatagagtcttttccaactattaacctcaagcgcttagctggaggaagaggaataaaatcgtcttcaaagtcatcatcatagtcatcctcctcttcatcgccctcagaagaggaggaatcatctgtactttcttcctcatactgactatagtcatccacctccattcgagactccaagagagaaagaggatcactgcagcacaccccattttcatgaagcccctctgtataagaccccctattttcctcatccccgttttagctggatttttaattttgtagaactactgcctgatcctgagttaaatccattattaagctttgctacatagagattgttatcgttgtcatggtctttggcttaaacttgatgcttatttgggaagagttcattccaatcattctcttggtccatttgttttgctgctgctatcatgacgcctacgaagagtcaatttgggaatcccagagttattttctaggattaactgtgcatcataccttgtgattcgcctcttctttttactttttgcagttctaaagctgtcttttgttttgaaagctatctgatgtcacaactgaacaaccgacggggtgaaggagcacagtctgtgtagctcacaggcacgcccacagtgccactgtgctcaccctggtcagaatggggacccatcaaatctggtaccgcgtcgtcttttccaggaaactccggccctggagttaggttcctgtacgttttgcaaactgtttcacaagttttccttgtcgtgacttctttttggacatgcctgtgtcactcttatgacactttgcctcccctttttgtgcagtctcatgagccagttcttcctcctgcagcacaggagctggctgcagctgttcaccactgtcggggcaaggttccgtcacactgcttttatagccattcaacgtatttggttcaagcttgatgtcagaggcctccttcagatttgttcttgtcctcactgaccgccgagttatgtaggtgcagggcgagctctccccctgcgaatgagcacctctcacaggattctgtctgtgttctctcgccgcgtgtctagtcaagcacccgctggcaactgcggcttgggctggtccctctggctccttatcttttttaatgggcaaatttttatacagaactactttaggctctttcagtactaagtttcccatttcgagttttcaagaagcattcttttgctccagccgcttgcaatgatt

SEQ ID NO: 155240 - DNA, 1987 bp, Homo sapiens
atgagtaagccagaatggttgatagtgggggaggatgatgacgacgctgcctttgcccctgtcttgtgtgaaacaactgcctgtgggtttcctgcagcgcagtggggagtgagaggagaaacgtcctgccgtgccacacccacgccctcccctgcgaacgcgcacgtgaacgggagcgcggacgcgcccgagaatgcgcttcacctcgcagaagcggcacctcggctgctgcccggcagcggcagcagctgcgtcggcggcccacacagcagcgagaggcgagaggaggctgcctcgaggaggctgcctcgaggatgaagtgcaaacccaaccagacgcggacctacgaccccgaggggttcaagaagcgggcggcgtgcctgtgcttccggagcgaacgcgaggacgaggtcctgttagtgagtagcagccggtacccggaccgctggatcgtgccgggcgggggcatggagcccgaggaggagccgggcggtgcggcggtccgagaggtgtacgaagaagcgggagtcaaggggaagttaggccggctcctgggcgtcttcgaacagaaccaggatcgcaagcacagaacgtacgtgtatgtactgactgtcacggagctgctggaggattgggaagattcggttagcattgggaggaagcgagagtggttcaaagtcgaaggaatgcaatccaaggtcctcaagtgcaacaagccggtgaaggcggattatctgaagaacttaaacctgggcggtttccccaccaattggaaattcatgggcccattcttggcagatagcgattcctaatggacagccaagatgttcagtattgtgctgaaagaaacattgatgtgaacccagtgatcagtggaattgtcaagtacaggtgagcacttctgtgttcccaagaagacagctcatctggtttcttcctgcatcttgggacactccttccctgtctataccactgactcttgctctggttgttgtactcttatacgtgaatagactcttaattcagcacctatagccttttgttgtgcttttttgatgtgtctgccttcattagactatgatgtctttgagagcaaagactatttttccttactctttgcatattctgcatctgagacactacttgaaatatggttggcatcactgaaggttctttgattcaattaatattttgtaatcaccgtgtggcaaaacattccccttccaatctggtgctagtagagtatatgctatctaggcaccatgtgtgtggcttttgtgtatcaggtgtttcagaaatatttcaagaccagtgtaagatgtttgaggacaagaattattactcctatttctatgtcataccacacagtagctgcacagttttaagattatgccatcacctagggtaatgttttgtagaatcagtccttcgtgtaacaactctagtgtttttgtactgttgatgatttgcttaaattttattcaaaaactatcacttgctataaaggtaattgtaaaaataaatacagtggacgcaaaataatgttgtgagtttttataaaaataaattttaaaatgatatataagacatttttttgcaatgccctgccctaaccacttcttacatgtcatcttaacatctctttgaggaaacactgtttcctcattttacagatttaacatactgtattatttgatgccagagccaacaggtaatatcataggcagtttccaaacttaattatgccatttagtttgtctagatttcttttgcctctctcactgatccatttggctgtagttttcatcccttttccagtacacacagctagctcctcatcctacctggggttctgcatatgaggaatgcagaggggctgaggggggggcaaaattgttgttcatttaggaaaagggcctttagggaaagagggctgctattagaggggaacacaaagtgaaggtttttttaaaaaagaggacttgca

SEQ ID NO: 155241 - DNA, 411 bp, Homo sapiens
tttttttttagatgaactcatttatttgacatattaaattagccaaagaaatatatatgtaaccagataaaaccaatcacattctcatactacttgaacacatagcagtggtcaaaaataatggattgtaaaatggaccccaggatttaatgcaaaacccaccccatacgagaaaagtttcaggcttctaacttcactgaatccagtactaaacgtgcttctttatattcctcagtttctggatcatcgcagttcggttgtctataaatcagccctgggccatgtggggctgagtggcagccccagagctgagcaagacaaaggagcaggacgagggacttcatggctgccccagagaggccctgccaggcgtccaggtggttggaggcttcgggaccaacccaggtgctc

SEQ ID NO: 155242 - DNA, 458 bp, Homo sapiens
  misc_feature (1)...(458): n = a,t,c or g
agatgaactcatttatttgacatattaaattagacaaagaaatatatatgtaaccagataaaaacaatcacattctcatactacttgaacacatagcagtggtcaaaaataatggattgtaaaatggaccccaggatttaatgcaaaaaccaccccatacgagaaaagtttcaggcttctaacttcactgaatccagtactaaacgtgcttctttatattcctcagcttcttccaagtctttttcattttcctgctttttaatgtcataattttcaccgtcttcagctctcattttttcaatcttttcttcttgttgttttgcctctttttcatacatcactttttctttgaccaaccgcttcaccacgccggtcttgatcttgatctgtctcacgcgaggatcggccatggtccctcgagacgccgcagaaggaggggcggagagngcctcgtggcc

SEQ ID NO: 155243 - DNA, 670 bp, Homo sapiens
aaaatcaaacaaaatttcctgtgtactttagataatattatttccatttgtcctgttatcattacaatatattagtaaaagttgccctgtatatcagtattatggaaaaactcaatctttaaatatcagaaaatgaaagatgtattttgtttcctttagtgtagggtatgtaatacccattagcaagcaggcaattcatttgtttaattcaaagattatatttaactctgttgtgacatcaggaaggccttctttgtcattgtggaataggtcagtgggattattttgggcctggaatgctgtcatatatgtaacatgttaggtaaatcttcctttttacttttctcttttgtatgatgatgatgggtcaacaaaatgagaataaactttttctgaggtttttatttaattaatgctggtagctttagaagactgttattcacttattttatgagaatatatacagtgaaacaaaaccaccagttatttcttcctttccttgtaaagaaggaacagaatgtgggaaacctgtggaattacaatatatttagatgaggcttgggattttttacttttaattttttagttattaacattaatggtttgtaatatttgagtaaataacaaagtactgaaacttgaaaaggataaacttaatttttattgtatt

SEQ ID NO: 155244 - DNA, 764 bp, Homo sapiens
tacactactaaattgcggccgcgcgaccgactcactatacgccacacctttatttttttttttacagtataaaatacacaattttattagatgaactcattttatttgacatattaaattagacaaagaaatatatatgtaaccagataaaaaacaatcaccattctcatactacttgaacacatagcacatggtcaaaaataatggattgtaaaatgggcccccggggttttaatgcaaaaaccaccccatacgagaaaagtttcaggcttctaacttcactgaatccagtactaaacgtgcttctttatattcctcagcttctttccaaggtctttttcattttctagtatccgttgaagatccaaatatgcggcttccaaacctgcgctggcaatctgggatcatcatcctgggaatcttgtaaggatctctgccgtgcatgtcgtgtcgttgtgcactgagccggtcagtttatacacgcgtctgtgactaggcgagaagaccctagggcgattacccgatgcattaaatcgagctctgacagtaggtggcgaccagtgcactgacggcatacgtggtttaagctgctttttaatgtcataattttcaccgtcttcagctctcattttttcaatcttttcttcttgttgttttgcctctttttcatacatcactttttctttgaccaacctggacattgtcacctgtgtgtgacacctgccacttgtgtcagacaccttgggatcatgaggaaatcctgc

SEQ ID NO: 155245 - DNA, 429 bp, Homo sapiens
aaattttactccaaccatgtgtacaatgttggaatcagatgaaatttatagtgaatgaatgtatgtgggtttggggtttccactcctcttcagcctttcctcccgttagaacaaggaaggttttttttttttttaagggagggcccttttaaaatatgtaagccccccttcaagcctttggaattcggttccccccgacccaaattccccccaaccctgccctttaaaaaaaaaaaacccaggcggacttgggaccccctaagaaacaagaaaaaattttccccaaacttttcttttaaaaaaagaattggggatttggacccaccccacccagggtaaaaagggaccccggccggaaaagcccccttttttggggtggggaagccccccctgccccaatttgggttcctggaatccccccactggaaa

SEQ ID NO: 155246 - DNA, 1264 bp, Homo sapiens
gagtaaccttgtgttaagagtgccatgtggcatgagaaatgggccggttttggctcatgttgtgatattctagattcaggtatttccctgagcagagaggctgaaatgctgaaaatttttcatttgatgaccctgatggttcctttccctgacattgtaaaaaacaaaatggctcctttgctttggcaagaaatactgaaggtggtggcttttttctgtttgttttgaaatgaagtcttgctatgttgctcaagccagtcttgaattcctgaacttctggtctcaagtgatcctcctgactcagcctccagagtagctgggactacaggcacatgttactgcaccagccttcaacgtgattttttttatttcattcaggtgacaaactcatgctgaggttcccaattttttgtctcagagctaggatattccttggggttttgagccgcagtgtctgcctctgttcaagtatccaggctcaggtacagacctttcagtgcaggcggcgggaggcgcgaacacggaggaccccactcaggcatactgccgcccgggcggcgcctgacagattgcctccttgggatcggcggacatgccctgggcgctccagctccgcgcgccccagacacaggctatgattggcctggctgaacgtcaatcagggctcggcgccgtggaggcgggaggaacgctgtaggcagaggccgcttaactccctacggggttattctccgcctcttctagggtaggcaggtgttcccgagtcccttagggggggtccccgcggcggcctgaaatgctcggcgccaggttgtcgcgcccttgagctggctgaagtagacattgactctggagagtttgcgtttttcctggtcccagaaccgtggtcccgatactgcgcttcccgctcctccagtcccagctcccaggctccgtcttctcccgcttggcgctggagaaacaccggaagagagagtcgcagagtgactgctgtggccctgcgacctgactgccaccttccaggactctagccctggctccttctaaccttcccgcccctcagtgccccagagaggctggtttgcggacaattattcatcagccggaagaaaaggaggtgccagtgttaggcgcagaagagggttggaccagaaaagctggagaggggcaagaggggaaagagggggaagggggaaggcggaaggcggaagaagtcgggagggcgattttcgtgcctcagcctcccgaggagctggatctacag

SEQ ID NO: 155247 - DNA, 3255 bp, Homo sapiens; identical to SEQ ID NO: 153572

SEQ ID NO: 155248 - DNA, 1444 bp, Homo sapiens
ttagctgcttgcctctgtgcgtaaccgcacgcccacggccgtgatgagggcggcccccttgccgctgccatcctcagacaggaggaaggacacgttacattttggtgacagttccttcaccgtctggtgcatgattctggagaagtgtggatgaagcttgtagagtgtcccgtccactcccacagtcacattcagacggtccagtcctctgttctcgcggatcttatccacaaccgcagccatgcctgcgccacacagctgtgcggccctcctggacaccaccccgcacactgtcttgacgaggatactgtcatcgcaggtgctattcagacctagctgctggaggatagcccggacctggagcagtgctaatcggtcactctcgatctgagagagaaacttggtctcaaagatgccccgggtcttcagcgtctcagagatctgccctcggaagaggaatcccttcttggtgaagtcgattaagatgttgcggacgatttcacccaggtacataccactgatcatcttctcatacctgggctccagccaggaaagcactaacccgtagcccctggaaagccgcaggctggccaggagctctggtggctgggctggaatcacaggcactcccatgaacattttcacagggccagatcctgggccatctgagaggtctgcacaacccagggtgtgggacagcacctgctgccttaagagcaactgctggttccggaaggtcaaggccaccacgccaccaatgagctccatgatgaggcagatcccaaggatgtacatgaatgcttggagaaggtacaggttgtcacggagggacgccagcacaccaatgaaggagaccatgaacatgacgacgcccaggaggatgaggatgatggctggagccaggaaggcactttcaagggttttatatttctgccgctcaacctctgcatagatgcccacagacaggaccagggccccaatcagacctgtaatcccagcactttgggaggccgaggcgggcggatcacgaggaccctcagctgcaggtctgttggagtttgctagaggtccactccagaccctgtttgcctgggtatccgcagcagtggctgcagaacagcggattttcgtgaaccgtgaatgctgctgtctgatcgttcctctggaagttttgtctcagaggagtacccggccgtgtgaagtgtcagtctgcccctactgggagaatgccttccagttaggctgctcagggacggtcacagttggtagcacgacagtgactctagctgagtgtttaaaatggctgacaactttccagctggtttccatcggcttggccgcagtggcgatggacgtgctgaacacaggcgatgttgtctggcttctcaacgttgctgctgagtggaacagttttgtgaatatcccaaatgacagtctctcatga

SEQ ID NO: 155249 - DNA, 5406 bp, Homo sapiens
tgtttttctcacaatttcatggattatgggtttgggacaggaagaccacaaagataaagggccattttcattatatcatattaaaggtacatgtgatcaacatgacatcactgtttatgttaaccttgatgatgaccttgttttcatctggtttctccactataagttactcctctcctcacttcccatttccagactctgctctctggaaggaagtcactgtgtgtagcccatatttaagtgatagaaagtaatgttctacctccttgaaccaggggtattatccacataaattatttggaattcttctgcacaaaaaacttacctcttctcctctacatattaatttattcaatcacttacatatatcagtgtagactcatagatacttattttgtactttagcttataatttggcttttctttctttctttttttttttttttttgctctatttgttacaactttagctgtgggagctctttcaggtggctcttgtgtcccttttactccctcagtgtgtgtgtgtctgtgtgtgtgtgtgtgttgagcattttcttactttctggcactgaaagatatatctggtataaaagacaaacgatacacctatctacatggggcacttactgtgaatagaacttgcaggactggaagttgctttcggtgagtcattgagtgagtggtgggtgaatgtgaaggctcagttcattactgtacactactgtagactttataaatactaaggatacacacgaaatttattttaaaaaactatcttcaataattaaccttggcttattgtaacttttcattttataaactttttaattttttgaaactttttactcttttgtaatcacacttagcttaatcacaaacatgtatagctgtacaaatttttttctttttttctttttttttttttttgagacagggtcttgctctgtcatccaggctggagtacagtgacgcgatcatgggtcactgcagccttgacctctctagctccagtgatcctcccacctcagcctcttgagtagctgggaccacaggtgcacgccaccacacccagctaatttttgtattttttgtagagacaagttcttcctgcgctggccaggccagtttcacacgcctgggctcaaacagtcctcctgcctcaatctccccaagtgctaggattgcaggtgtgagctgccacatctggctttttactttgtatccttattctataagctcttttcttttcttttttcttttttttttttgagacggagtctcgctctgttgcccaggctggagtgcagtggcgcgatctcggctcactgcaagctccgccttccgggttcacgccgttctcctgcctcagcatcccgagtagctgggactacaggtgcccgtcaccgaattttttttgtatttttagtagagatggggtttcaccgtgatctcgatttcccgacttcatgatctgcccgagggattacaggcgtgagccactgcacccggcccttttctttttttttttttttttttttttttgagacggagtctcactctattgcccaggctggagtgcaatggcgctatcttggctcgctgcaacctctacctcctgggttcaagcaattcgcctgcctcagcctctcgagtagctgggattgcaggcatgcaccaccacgcccggctaattttttgtagttttagtagagacggggtttcaccgtgttagccaggatggtctcgatctcctgaccttgtgatccgcccgcctcggcctcccaaagtgctgggattacaggcgtgagccaccgcgcctggcctatacgcttttttctgttaaaaaatatttttaagtttttaaacttttgttaaaaattgagacagaagcaaacacattacttactaggcctacacagagccaggattatcagtatcaatcccttccgcctccacatcatgtcccactggaaggtcttcggggcagtaacggacatggagctgttatctcctaacatgccttcttctggaatacctcctgaaagacctgcctgaggctatttaacagttaactttttttttatatgtaagtaggagtactctaaaataacaatataaaatgtagtacaataaaataaataagccagtaacgtagttgtttattatcaagtatgtactgtacataattgtatatgctagacttttatacagctggcagcacagtaggtttatttataccagcacctccacaaacatgtgagtaatgctttgcacttgaccttctgtcagctatgacatccctaggttgcaggatttttcagcttcattataatcttatgggaccatcttcatatgtgagtggtctcttgacccaaacattgttatgtagcacatgactgtaaattttggaatcaccttgtcagtatttacaaaatagctttctgagatttagtggcaggatctcagctcactcctacctgcacctcccaggttcaagcgattcttatgcctcagcctcccaagtaactgggattatagacgtgcaccaccaagcatggctaatttttgtatttttagtagagacagggttttgccacattggccaggctggtctcaaactcctggcctcatgtgatctgcccgcctcagcctcccccagagtgctgggattacaggtatgagccactgcgcctggccaaaattgcctaaatttttaaaatcctaaattggtgttgaattttgtcaaatgctttcctgcattgattttgatgatcacttgatttttctccattcttttgttaatgtgctaaattatgttgcttaatttttgaatgaaaaaataatcttacattcctgaaataatttcggtttggttgtgatgttttattcattctatttcgtgctgaattcagtttgctaatattttgtttaggaattttgcatctatgttcatgagacagatcggcctgtaattttacttttttgtaatgtccttgtcaggtttaggcctcaaagttatgttgactttataaaatgaactgtgaagtatttcctcttttttatgctttagtttgagtaagattgattttttttaaaacttatgtcgtccttaaatatttattagaattcactagggaagttatcttggcctgttactttctttcttgagtaaattttgttttcattctttttttatagttaagtatattgagttagaatgcatacacaaacaaatgcacacaacttaaagtccagttctatgaattttgactaatgtataaacctgtttaacttccactgtaagcaaaatatagtgaattttcgtcaactaaaaagtccccttgtacccatttaccttcagtacctatccctaccccagccacaggcaacaaatgattttcatgtgcttatttgccatctgtatacctctttggttagttttctgtttatatcttttgcccatttatttttttttttttttgagacagagtcttgctatgttgcccaggcaggtcttgagctcctgggcttaggggatcctcccgcctcagcctcccaagtagttgggactacaggcacacactactactcttggtttgcctatttttaaatcaggttgtttgttttcttattattgtgttctctacactgtaggatattctacctttcctagaatttcatgtaaatggactcagacatactgttgtgtctggcctcttttgttcagtgtaatgtttttgagcttcatccttgcatgttatgtgtatcagtgattgattcaatttttattgctgcatagtattggattgtatagctataccacaatttgtttattcattctcctgttgatggaatattggttgtttccagtatttagctattattattattattttttttttttgagacggagtcttgctctgtcaccaggctggagtgcagtggtgcaatctcggctcactgcaacctccgcttcccaggttcaaacgattctcctgcctcagcctcctgagtagctgggactacaggtttgtgccaccacgcccagctaattttttgtatttttagtagagacggggtttcaccatgttagccaggatggtctcgatctcctgacctcgtgatccccccccctcggcctcccaaagtgctgggattacaggcgtgagccaccgcgcctggtcttttttgtttgttttgttctttttttagacagagtctcactctgtagcccaggctggagtgcagtggcatgatctcggctcactacaagcctgcgcccctcaggttcaagagattcttgtgccccagcctcctgagtagctggggttacaggcgtgtgccaccatgcctggctaatttttgtacttgtagtagagactgggttttgccatgttggccaggctggtcttgaactcttgacctcaagtgatcttcctgccttggcctcccaaagtgttgggattacaagcgtgagccaccacacccggccagggatgtcattttttataactagccataaactttagctttgaagtaaaactatttctagcaagtgattcttacctgatattttttgttgttcttgcccatattttaattgggttgtgttattatggttctctatgtattctagatttaagtttttgtatatggtgtgaggcaagtgtcaagtttaattttttttctacaaacatcctgttgttccagtaccttttgatgataagactgtcttttcccccattgaattatcttaacgccctcatgaaaagcaattggccatatgtatgtggatctacttttggactctcaattctgttccagtgatttatatgtccacccttatgtcaataccacattattttgattattgctgctttatagtaagtgacatcatgttgcctgaaatcacgttttccacctttattcttctgttgatggttgctttggcaattaggggtcctttgcattttcgtagacattttagaatcaacttatctattgctactaaaaatgcttgattgggattgtggtaaatctagaaactaatttaggaagaatggtcatattaacagtttcaagtttcagatccatgagcatattttcactctccattaggtcttttaaaatttatcctagcagtgttttatggtttttactgtagaggtcttacacattttgttacatttgttgctatgtgtttgaccttttttgatactagtgtaaatggaaattttttcttttatgttctagttgttcattattacactaaatcatctttgggtgactactaaacattctattgaaaatttgtgaatggcgtgaacccgggaggtggagcttgcagtgagccaagatcgcgccactgcactccagcctgggcgacagagcaagctccgtctc

SEQ ID NO: 155250 - DNA, 1493 bp, Homo sapiens
gacagagtgagactctgttcaaaaaaaataaataagaattatgaatattacttttataatattctcaccactgggaaaaatgcactattctgtgtctaagtagctgcttaccttaaccaagtgatatttgggcaaggggatcgttgccttttgctactggttgagacgaagcatggcaccccctagtagagaaggatcccaattacttccaatttgtgatgtacacattttagaaagatacaggctattgccacagagatagaccaaaacatctcattttctttctttgtaaacctagatctgatttcccaactaagtctgtttcctttgtgaatgctgtgggtatgatccacagaaaggctacataatgaaatgatagctttacaattaatttggctgtagagttgtagactagttagcatatcattgcatatttgtttatttaaaaatgatggccaagtgtggaacctcactgggtgcctgcttggcttggtactaatcctagcattcaaagaatcaaaaggaatgatgaatgatggtaagtataaaatgcacttaataattatagatcagttaaaacatggacattggaaaacaaaaaagcttcttgaaaatgtggctcttttttagtaaaagggacactgtcagatgataaaggttcacatttcttgatggatacaacttaaatcttctttgctaaaaattgcaaaactactactgtaaaaactgtagggtgtcacgaatcacactccagtcatatggctcccagcaaagagaaattaccactttttgtgaaatgtttttcagattccgtgtctggtgactgtaactttaagatgccttttataaggcacataaataatctggcacaaatctttatcattttgacagagtttcttttatgcttgtgttggtgattttgttgcatttaaccccatgggggacttacatctctgcttttccaatcaggagcttggttctaaccttttgggagatgattaaagagagaggttgagagagagagagagagagagagagagagagagagagagagagatgtttcgtcctcagcttttgcttccattttttttttaagaactctgggctaataacttctaatctttatagaatatttcaaagaaatatatttgttcttaaagatacataggtttgagatattgagtgctacaagcatttattttggttttaccttaacatattatgattcctcagttttgttggcatttagtaattatgtttatgtttttatcttatcaaaaaatgtcttcttacctttgatatttataatcactcctcggtcatgtaaatagtttgctttatattttactgttttaaagtctgtgaccttacctgccctcttctgtagcaaagtgcagcatttaactcaggaagctatattccccccaagtgtcattaatatttgcataagattaaaaacactccaccgcgcccagccaagtaaaattaaatat

SEQ ID NO: 155251 - DNA, 1127 bp, Homo sapiens
  misc_feature (1)...(1127): n = a,t,c or g
ggaaccgccggangatggcagactgctctacttcccatcttccagtgggggttaaaaaaaaaaaaaggccacaataacaacagaaatttaactgaaagtgatgtccaaactcaaagtagagtataataccacctggtaattaatgtcatacctgacagagatatataaaaagaatgaatgactacagtcaaattcaacttaaagtttaagcagaatcccaaatttaagtaagtctcttttcattacatagatatttgatctgatcagagcaatttgctttgagaccaaagagatctggcattttacttattcattaggaattgaaaaaagaagacctttggctttctaaccagccatttcattcatggcatcaacagccgatggcagccacatggaaatgtatgctggatatttggatagtttaaatattatgtacaaggaatagcttataaccagtgaaaataataagaacataattcagcataagtgtccaagataagatacaaaaaagcagagaaagtgcttgagtctacaggtcttccctgaaagtttcaaaaatgtttaattcttaagcaggtaggccttttaatagaatttgcatagcagcatacaaggtaatttgcattaaaatatatgaacagagattcttccatggcttggaaaccaaatatatcccacatgcatataagttaagcaagaagacctggaatttctcacaaaattaaaaaaaagaatctattatgaccttttctcacactttcgcccatcaaaaccatttacagcaaaacctgtttctaggagaaacatagccttgtccagattccacacagcttaaatttttttttaagcataatttctggggccaggtgcagtggctcacatctgtaatcccagcactttgggaggctgaggcagaaggactgcttgagtgccaagagttcaagaccagcacagtgaaagatttagcttaaagggtggaggcgggcagattgctacaattggtttttaaagacagtatgtggaaagtcagaataattttagattaccaagcaattagggggcacagagaaagaacagcaggagatggcagactgctctacttccatcttcagtggggttaaaaaaaa

SEQ ID NO: 155252 - DNA, 384 bp, Homo sapiens
atgtagacaaaaatccctgccctggagcagcttacattctagcatggcaaacaggcagtaaacagcccattctggctgctgtattgagaagagaatgtggtggacagatatagaagcatggaaacctgataggactattgcaatcactcagaaaagaggcgatggcagcttggacctgttggaagcagtagagtggttaccagaaaatttaaagttacgccagtcactcccattctattgctgagagaaaatacagagcggtgaagagcttacagtcggcttgttgaagatgcatatagactaccggaaagaaatgacttcttcttgcactttatgaatcaattttatttttaaaataaaaaaattaaacatcaaaaaaaaaaa

SEQ ID NO: 155253 - DNA, 565 bp, Homo sapiens
aagacaaaacttcacccttctggtgtctgtgggaacaagtcctgtcttctgcgacctagccagagttgatcctaagatatccgcccgaccccaaagtctccctttgcaatgtcactatgtgtactgctcaccaacactccaggaagagccggccatggcaggcggggactgtgtggcaagcctggttctgggcgccggcggaccggggctccggcgcggacatggcaaggtggccatgagggggacaaaatggggcgggaaggcgcagagtctcaggcgcaggtccagcttcttactgcgtcgccgccagcttgtcctgcagcctccttttcctccagtccaagtagcgcctccgcagtcggttcgcctgccagcccagggagtactccacaagcgaaggctactagcacggacaactgcagtgtcctctctgacacatccgccatggctggctcttcctggagtggtgcttgttgaagatgcatatagactaccggaaagaaatgacttcttcttgcactttatgaatcaattctatttttaaaataaaaaaattaaacatctg

SEQ ID NO: 155254 - DNA, 2799 bp, Homo sapiens
ttccgctccaggaaggcgaggtcggatctgagatatctcccagggaggttcatcttccccggaactctgccttttcccagaaggaggaggggaaaaatgaccaagttccaggaggcagtgacattcaaggatgtggctgtggccttcactgaggaggagctggggctgctggactctgcccagaggaagctgtaccgagatgtgatgctggagaactttaggaacctggtttcagtgggacatcagtccttcaaaccagatatgatatcccagttggagagggaagaaaagctttggatgaaggagcttcaaacccaaagaggtaagcattcaggagacaggaatcaaaatgagatggcaactcttcacaaagcaggattaaggtgcttttcactgggagagctttcatgctggcaaatcaagagacacattgcgagcaaattagccagaagtcaagactccacgataaatattgaaggaaagagctctcagttccccaagcaccatgattccccctgtcaagtgggagcaggagaatctattcaagcttctgtggatgacaactgtctagtgaatcacataggggatcattccagtatcattgaaaatcaagaatttccaactgggaaagttccgaattcttggagtaaaatatatctgaatgagacacagaattatcagagaagttgtaagcagactcagatgaaaaacaaactatgtatatttgctccatatgttgacattttcagttgtatttcacaccaccatgatgataatatagtgcacaaaagagataaagttcatagcaatagtgattgtggtaaagataccctaaaggtatcacctcttacccagcgtagtattcacacaggacagaaaacctaccagggtaatgaatgtgaagaagccttcaatgatagctccagtcttgaacttcataaacaggtacacttgggaaagaagtctccagcgtgtagtacacatgagaaggacaccagttatagctcaggtattcctgttcaacaaagtgttcgtactgggaaaaaacgctattggtgtcatgaatgtggtaaaggtttcagtcagagctcaaatctgcaaactcatcagagagtccacacaggggagaaaccctatacatgccacgagtgtggtaagagctttaatcagagctcacatctttatgctcatttgcctattcacacaggagagaaaccctatagatgtgacagttgtgggaagggcttcagtcgtagcacagatcttaacattcattgcagagttcacactggagagaaaccttataaatgtgaggtgtgtgggaagggcttcactcagagatcacatcttcaggcccatgaaagaattcacactggagagaaaccatataaatgtggggattgtggtaaacgctttagttgtagctcaaatcttcatacccatcagagagtccacactgaagaaaaaccatacaaatgtgatgagtgtggtaagtgctttagtttgagctttaatcttcatagtcatcaacgagtccacacaggagaaaaaccatataaatgtgaagagtgtggtaagggttttagttcagcctcaagtttccagagccatcagtcagccagaggtcaaatcttcaagtccatcagataattcacactggagagaaaccatttaaatgtgaggaatgtgggaaagaattcagttggagtgctggtctcagtgcccatcagagggtccacacaggagagaaacccctatacgtgtcagcagtgtgggaagggcttcagtcaggcctcacattttcacacacaccagagagtccacactggagagaggccttacatatgtgatgtctgttgtaagggcttcagtcagaggtcacatctcatctaccatcagagagtccacactggagggaatctgtagaaatgagaggtgtggttcagccttcagttagagctcacatctttgtctccgttgggaagtccatgctgatgattgtgaaaagttcctttaaaactagaagcttcaaagaatcttgacaggaaagaagtctctccaaatgctgtgttttagacttggttaggacatgaattctttacaaacgtcatatttcacagatgcgagaaaactttggttctgtaaatatgatcagtgtttatatcagagtaccaggtgtcccggttctcaagatgtaacacagcagaaaagtcttgtcggagtctgcacaggagagaggccttcctttaacaaaagtatgattgacagaaaaaatggatgtcaactaaaatgtaacctctatgtaaggaggtgtttttcacccactctatctctaccatgtagaaattgtgcttggctcataatagggcccagcaattactgaagaaagtgaagaaaatacctataattaggacaaatacttgaaaattctagtctgttttctactctaaatttatattaatttatattcaaaaggaatcctgcaagtagccttaataacgttagtttcagtaagtactgaaaagtatataatactgccatccatactaacacaaatttggaaaaaagacatgaatggctcccatccttcagccttagttctttgtacagtgtatcatcagttgtgtacagtatgatttttagtgtcagtttatagactgaacaatactgtttttatctaatgtgaccctgcaatttacatgattagaatttttggacactaagctgtactgtaactctgaaagtgttaaaagtagttactgatgacaaaaagtttcttagtaaacttgaattgttaaa

SEQ ID NO: 155255 - DNA, 2878 bp, Homo sapiens
atgcacagcagcgtctacagctcacctgccgccgccggactccggttccccgggatcagggtgagcattacagaggagggtgttttcaagacaatgtcatcagaacccctcctgaataatggaagtcgggattcagaagatgaagagacttccctacatgggaccagacaggtcccgctgcagcttctcctggaggtaattggcgctgagttccctggcggtagtccagctggggcggcagcccagcggggacagaaccccagctcggacccctgccacgctgctttgcgcccttacaggagccacttccctcacggccaaggccagattttcatgaataggaaagctctcctgcagagagatgtcaaacatgcccagctagacaatggccatgagcaacaaaagatctcggtagcagcagcagaagccgcagcttcagaggcagccggagagacctcggagcagagaaggcgccgccgaccctcgcggctgcctggcccgcggctcctacaaaggcgggctagccgcccgccctctcccttgccttcctccccttcttttctgactttccctctttcccttaatcgcctgcttcttcctccgggtggacttacggccaccttgctcctccgcgcttcacctcatcgccccctctttctttcttctgcctctctctctgcgcccccttctctccgtgtcacgctccctcctggttctgcgcgtctacaaacttttgagcagaacacgagcctcggcaaacgagtcccgcagctcctcctgctgctcccgctggttcctgcggcttctgctcagacaccaacgccagacggcgatgcctctcgggtggtgactccagcgcaggaacttgaagaagcgctttgcccgccgtcctacctggcagctctcctggcagcgggaggagttgaaggaatgaccatgtgtagcggagcgaggctggccctgctggtctatgggataatcatgcacagcagcgtctacagctcacctgccgccgccggactccggttccccgggatcaggccagaggaagaggcgtacggcgaggacggaaacccgctgccagacttcggtggctcggagccgccgggcgcagggagccccgcctccgcgccgcgcgccgccgccgcctggtaccgcccggccgggagaagagatgtcgcccacgggatccttaacgaggcctaccgcaaagtgctggaccagctgtccgccgggaagcacctgcagtcgctcgtggcccggggcgtgggtgggagcctcggcggcggcgcgggggacgacgcggagccgctctccaagcgccactcggacgggatcttcacggacagctacagccgctaccggaaacaaatggctgtcaagaagtacttggcggccgtcctagggaagaggtataaacaaagggttaaaaacaaaggacgccgaatagcttatttgtagcgatgggttaccagctaccctgtgtatacagccctgacgcaatgaaaagtcgttttccaaactgactcaacagtcatcgctcgtgtgttctatccaaacatgtatttatgtaatgaagtaaagccattaaatgaatattttgataataatattgtttttctttctacaaagcactagagaatgcacagatatactttgtggaccaattattgatatatattataaatatatataaagaatatatatatatatatatatataaagtatagagagaagttcatacaaagcgtgcacaaggattgaaaattcgcccgagctgtttatgtttttataaaaataaatagaaaagtagacaatcattgttttgaatattactcctatttttgtaaactggaattaaaaggatagtatttttatccatgacaggcctgaagatattactacttaccatttgctactgtacataaacaatgatgccctgctccagggagattttgaggtaaagatatggagaattgctgaagggcattctttcccagtgagtctctggggcaggctgcttcaatcccagcctaactcaactgggctctgtccccctggttgggtggcaattccaatatttctgctttctttgattctccttttatgtgtagttgtctctcttcagactctcagcccagaagaaaattctcctgataaaacaacagctcgatccaaattgtgcttctccccagaattcacgcctctccctaggagaagagttgaggaactgtacagaaaagggcggcttcgttagaccgctctcttttctgtacttcctgagtggccagggaatctaatatccccaaattagggcaattggaacaaagtgaaggacatagaggtatatttggaagaggcagagccttgaggtggtaggaggaggaccctggaaatggactggtttgagattgccccaggtctgggaagcctgagggcaaatccagtcccaatggtcctgactttgggcgctgggtattggaaatggatgcaaagtacaatgtgtttttctccagtgctgtccatgcttctcatcttgtgaaatggccaggatcctctcctttgaaacctgctctgtaggagctacccttttcctttgtggttttatggagacctctccttcctaccctcctgcactgtttaagtactgtttaccatttttcattcacttctcttaaacttgtgaatgcttctcactttttttttttgtttgatgcaggcacttattgtaaattttagaaacccctctgtagccacctagtaagtaattatgcactaaatatgaaccctttgtttcttgtttattgagtttgtaggtaaaatgtatttttctacattattgcttattgcttagtaaaatttatttcataaaaccaaa

SEQ ID NO: 155256 - DNA, 826 bp, Homo sapiens
ggtcccattcggctgtttcccccaccagaccccagggaagccggggcccactccgatccgcctgggctcagctaagcacggaagccaagggggctgtgccgtgaagctgggctcgcgccggggctctgggtgtgtgcgcttggcgtgcagggtggacgcgtggggttccgtgtccccagcagtgagggccctagaggacgccttctcccatgggtactgatctccacgggttttcacatctttgtactgggcctgcctcaacttcccctaacagatatgcatattccttccagatgcctcagtgctacaccacagtgggcctggtcccaggacaggaatgcggttcaaacccaggggcttgaaactttctgagaaactgtatcatatccagccccctaaaaatgttacaaatgttaacttgttcaagtcccaaacaaaaaaacaggttcccttaatgtttcctgccctttctccaacccagggtcgctcccatcaccccaaacaaaagaacaaggtttgcccaggatgtcccgaagtgcccccctggcccctggctctcgtgtgcatggacgtgccctgaggggtcccgggcacggccatacgcaggacccctgtgcccggggaggcgctgcagggattccccatccggtcgtccttggggccagcccgtcttatggactctgccttgctttgcttatgtttagctgtttctctgctacctttcgagcagacttctttactacactgcactggattggtatatttttaaccagaaataaaccaaagattagagcatgttccagttaataagaaaaaaaaaaaaaaa

SEQ ID NO: 155257 - DNA, 791 bp, Homo sapiens
ctcaggcagggcaggagagtcaggttgagactgggtgcattcgtaccggggggacgaggatgggcagaaagtgggacacgaatgagtgacaaagacaaaactactctggtgacaggaagaaggtaggagattcacaggcagaggctccccagagtgtttttccacagtgtgaaagaaaggatgagaaaagaatcaggaaggtttaggggagtcagggttgtggggccctggaaaggactcatagcctgggccactgggacgtgagcttggacagcagagcgtgtggattcagtgcagtacgtgtgacacagagaggactgcatctggtggagcagtgggtgcggggccaggtcaagaagggaggacacacctgagaacacgaattaggccagtggcagaatcgcaggtggtgctgagagaacgcagcatggtgcaggtgggacagtaccgtgctatgcagtagaggaggaaagcaggagaaacgaccaacctgggcccaggagctgggagctgggagagcagagggtgagtttgcagcatatgggagagcaggacagaggagaggtgttccccaatgggcaagaagaatgagttggagcaggttatggaggccagcagcttacagaggtgagcttgttgagaggatcagggaatgtactgcagcaagggaggcatgccaagagcaagagtgtgggtgtgaacgtagagaatcctcctttttgcccaaaaggggcgaagtgtttgatgcaggtcatggaggagaaagcatggtgtgggtaagacacggaagg

SEQ ID NO: 155258 - DNA, 870 bp, Homo sapiens
tttttttttcaaacaaagaaatacagcaactcagtttattacatgcagattcttctgcattgttgctaacagttcactggtccaaaattactaaaatacttaaaaaactatacattatgtaaacaaaacataaataagacagcatagttccttgtaacatatatttagtacaggttgttagggattctggaatatgtacaatttttacatccatggactgcatttttccacaatgcataaatatatatatgtattttttttttttacagaaacaaaaataagatttcacctaatgacactgaatccccatatcatagatatggctgcaacagtcccaaattcaaagaagaaacatgtcaatgtaaatgtgcaaaaggctagcttactctaaactattcaaactttgttcactttatgttctacagacaggtaaatcctgactttaaacacagaaccttgaaaccctcctcagaacagtaagtgaaatggaacagatctttccctccccaagaaaacaaagccttgttgcaagctaatgaaaagatacattaaaacacacacacacacacacacacacacacacacacacacacacacacacacaatgtatagtatgctttcaacagtataataaacattgcaaaatttttatgggagtcaaaacaatgccccattatttaaaaactggctcttttagtctaaattcaagatgcagctctgtcaggcttctctaagcccgacgactgaaaagcagggaagacagacgcaggacttcgactggcagatacaacaatctgagagagagatggagagagtgaagaaaccttagatgctggagtatttatggtattcaaaatggctccttctggg

SEQ ID NO: 155259 - DNA, 346 bp, Homo sapiens
ctgaagattctggattttggactggctcggcacacagatgatgaaatgacaggctacgtggccactaggtggtacagggctcctgagatcatgctgaactggatgcattacaaccagacagttgatatttggtcagtgggatgcataatggccgagctgttgactggaagaacattgtttcctggtacagaccatattgatcagttgaagctcattttaagactcgttggaaccccaggggctgagcttttgaagaaaatctcctcagagtctgcaagaaactatattcagtctttgactcagatgccgaagatgaactttgcgaatgtatttattggtgccaatc

SEQ ID NO: 155260 - DNA, 399 bp, Homo sapiens
tttcgtgtgagcgggctcggttttgggccgcggcggtagcgggagtcgccgccactcgagtgcgcaggcgcctggcgattaccggtctcaccatggagcggaaagtgcttgcgctccatgcccgaaagaaaaggaccaaggccaagaaggacaaagcccaaaggaagtgagtcttgtaccccaacatcccattctttggattttcctccggcaccttctctgctctggtttcacgtcttgaacgtgcaccgggtttgggcaccctgtggctgcagccacatggcctcggggcagctcggagggtcgctctccagcaaccatgtggaagagagctgctgttgctgaacgccaggcctgggtcttaacagccccgggcctgctggaaagggctgtcggagg

SEQ ID NO: 155261 - DNA, 1017 bp, Homo sapiens
tcaggcccctcttccatagggctgctgcagtttgctgggggtccactccagactctttgcctgggtccctcctgtacctggaggtgtcaccagtggagactgcagaacagcaaagatggctgcctgttccttcctctgggagctccgtcccagaggggcaccaacctgatgccagtgggaatgctcttgcataaggtgtctggcgacccctgtctggttgtaatgcatccagttcagcatgatctcaggagccctgtaccacctagtggccacgtagcctgtcatttcatcatctgtgtgccgagccagtccaaaatccagaatcttcagctcacagtcttcattcacagctagattactaggttttaggtcctgtgattttatgtgtttgaattttccattagaaaagttgtttacttgtttgtttaagccctttagacctcggagaatttggtagataaggaactgaacatggtcatctgtaagcttctgacatttcacaatgttgttcagatctgcccccatgagatgggtcaccagatactgttgtttattgttatctgcttgtacaatgttcgtggaggacagggttattttttgttccctgtagtatctaaagtaccgagaacagtgtacatcattgaattcctccagagaccttgcaggtgtaaaaacgtccaacagaccaatcacattttcatgtttcatatgtttaagtaaccgcagttctctgtaggttcttttcgcatgaatgatggactgaaatggtctggagagcttcttcactgccacacgtaaccccgtttttgtgtcaaaagcagcactttttgttatgttgccatgggaatctatgtttgcaggaaaacttattttctgcaacctgatgatagagcagtaaaagagggggagctccatgtccaaccagtgtcctatatcaccttcttcaggtttttgctcaattgttactttatcaatgatgcttaccgtattcacctttcttaaaagtgcaacagccat

SEQ ID NO: 155262 - DNA, 1281 bp, Homo sapiens
atgggatttcgacagagttttgaaaaaaaaaaaaaaaaaaaaaggcccggagagagctcccttcctggtcagttttgttcagatgaccgcagtcttcgggttgggctgtgcccttctgcttctcccggcagttccccgagcttgtctgctcagaggacccagggtccggagccccagcgtgggcgcatcacgggagagggtccttctgctccaggtaggcagggagacccccaaggaagcggcccttcccccggtgcctgttgccgagcagcaaccctccgagaggggaaggcgcagggtgctagccagaaccgagctccagcaccaccacctacctctcgcagcggacctgagtgctgcacacggtggaccgcatacctgcgacacgaggcctggcaccaaataggccctcgatcaagaatagcaaaacctcggagagagaaggagccttggtatacaggtttaccaaataccaaggggatcccacgactcaggtatgaggagggcgacccaggccacaacggctcgggaaccgccgccggtatccgcgtccgcagcgccgccagccaggcgagagccgtgtgggatcccagcgcccgcactcccgcccccgccaaggagccaggaatggcacaactagagaggagcgccatctctggcttcagctctaagtccaggcgaaactcattcgcatatgatgttaagcgtgaagtatacaatgaggagacctttcaacaggaacacaaaaggaaggcctcctcttctgggaacatgaacatcaacatcaccaccttcagacaccacgtccagtgccgctgctcatggcacaggttcctacgatgcgtgcttacaatctttcccttcctagaatggatgtgtatgtatcgattaaaggattggcttctgggagacttacttgctggtataagtgttggccttgtgcaagttccccaaggcctgacacttagtttgctggcaaggcaactgattcctcctctcaacatcgcttatgcagctttctgttcttcggtaatctatgtaatttttggatcgtgtcatcaaatgtccattggttccttcttcctggtgagtgctctgctgatcaacgttctgaaagtgagcccattcaacaacggtcaactggtcatgggatctttcgtcaagaatgagttttcggccccctcctaccttatgggctataataaatccttgagtgtggtggcaaccacaacttttctgactgggattattcagaaatcatctaccactgatttaggatga

SEQ ID NO: 155263 - DNA, 3758 bp, Homo sapiens
aaatttgaaaaataggctttattttaaccagtggtattgtctgacatcctatacggcataactgattacagccaagttcatgaatacaaataaaatagcaatttccctcattctctcttttgttttctgttcagagaaatcaggagatgggagcattatgctcagaaaccgaagagctcttccaagagctccagcttagagtccaggcttccagagcatgcagcctcctaacacgtatgtggtcacatgtgcaaagacctttattacaaaatattcagagcagtatttctgtaggaaatcacacgagcatttacaaccaaacatggctgataaaattcatcttgctgtggatggtgaggatttgaactgcaataaaggagatgaggcctttactttaaaggttcactttccttgaaagggggagagtcccgggtgagagggaatcgccatcagtctgcctccttccttcttgctccagttgactcagggggtccaccctgtccctctggagtacatgtatcactgcactgattgagaaatggaaacaccttggcccaaatacaagattctgtcacacagccaacactggaagtgactttatactttcttattacacaaaaggcttaaatatatgagtcctcatgtagaacaaaatgcctgaaattcagcaagttatgaaaacgacacttctccacccctgaggatattttatctttataaagttgaaaatacaaaatattaaaataatttgccctttctccccatcaaaaggaatcacattctcaaagggattcctacaatatacaaaattctgaaacaaaatttatttctccccaaaccaagaagtcaatgttaagctgccaagaagacccttttccataggagtggaaaagacaccttgttacttttttattttaaagtaatcatatttagagaaagacagcaaaaggagtttctggccttatgggctttaattttttactttgattttcagcatttcttagcattagttattgggagtgaagagaataacttgtttccgaagtttgggatattcctgggaaaagccctggtcttttcccatgataattcctcaaaaatagttggttgaaaacagatggcatgaataaaaatgctatacatccacctgttcctcttttcatgattttcacatcaaaagcacctgaagtatcaattgtgttcaacacagaatagcactaggggctgaagagaggtgatatcacttgccataatatcagctgaggtgacatgggatctaaactacccaagaagtcttcactggcaaacctgcctgacaccagggcctcctgaagagagcaggacaagcagctgtgcatgctcaaatagcaagacgtgcaaaacacatcctcactctgctagaaataaagagtacacaggaagtacatgacatcaagaacctgcttctgactactggggcagatattcaagaaacctctgcaccaaaggtgaagggtaagcagagaaatggcaacacctgggggtgagggagaaagagagacgcacatatacgcatgtgctcacatgcacacatgaccgcctatgaaggctgcctgattactccgggcccacaagcagctgtccaacagccctctcgacttgcccggctcagaacttcagcagctgcagtcttttaactatctacactttcttctctccttttaaggcacaaacatatttacagtttcaaatatactgtcaagatctgagaaccatactaagcaagttaatcacaggctagtgcacagaagccagttggtcctttttggctgtacgtatcactgagggacggtgtcaggtctgaagcaaccagaaggtatgggccttctctccgtgccactgtgggatgttgtcaagtctacgccccaccgtcaaggtggggtcacaggagaagccaaagtggcaaaagcatgaccgggattggggacaattcatatttttttactttgcattgaacatattcctaaaaggacagcagctcttgtctgcctgagccaactctcagaaagaagagcaaggtggaggctgccctggagcatccacaacctcctgtaaagtcactgtgatcatagtttgttcatattgtcttaccctcccacaaagacagacacacacatgcacacacactaacacgcacgcacacgcacgcacacccccttccaccatggaggaaatctctgcaacaagaggcacttgaataatatttggagagttcccgtgaaaaggccttcccctcacagtgaagtgggatcaacagaacagaaaccaggtgctcaggactccatctcttcttggtcaaggggtggtggcacaaagctgatgacttcatcataggtcaggcttttccactcatctataaggaggtccctgctttcaaaggactgatcataaggatcggccactggttcatcatcaggatcgtggtactgagcaaagtaggcatgtgcaagggcttgggccgctgtaattctcttatctgagtccaatacaagcatcttctccagcaagtcgacagccaggggattggcaccaataaatacattcgcaaagttcatcttcggcatctgagtcaaagactgaatatagtttcttgcctcatggcttggcatcctgttaatgagataagcggggggtgttcctgtcagacgcataatctgctgaagctggttaatatggtctgtaccaggaaacaatgttcttccagtcaacagctcggccattatgcatcccactgaccaaatatcaactgtctggttgtaatgcatccagttcagcatgatctcaggagccctgtaccacctagtggccacgtagcctgtcatttcatcatctgtgtgccgagccagtccaaaatccagaatcttcagctcacagtcttcattcacagctagattactaggttttaggtccctgtgaattatgtcagctgaatgtatatactttagacctcggagaatttggtagataaggaactgaacatggtcatctgtaagcttctgacattttcacaatgttgttcagatctgcccccatgagatgggtcaccagatacacatcattgaattcctccagagaccttgcaggtgtaaaaacgtccaacagaccaatcacattttcatgtttcatatgtttaagtaaccgcagttctctgtaggttcttttcgcatgaatgatggactgaaatggtctggagagcttcttcactgccacacgtaaccccgtttttgtgtcaaaagcagcacacacagagccataggcgccagagcccactggagacaggttctggtaacgctcgggcacctcccagattgtcttgttcagctcctgccggtagaacgtgggcctctcctgagacattttccagcggcagccgccgggcaagaaggtggccctgtggggcccccgcctgcacccgcaccctctccccggcccttgctgcccgcccagccgggcggggaccttgcgctggtcgcccgcgcaggtgcggctgccgcgaccccgcagactcccgcgcgcgcggctgctgtcagccgcagcggctggatgtgcccctgcgactggggcaagccccgctaagggcagggacgcgctccggcgctcaagactgcgcccgccgcgatctccctgcaccttcgcccctacaaggccgactccgggctgcgtcgcagtactcccgttccagctgctgcgcccgctaaggctccagtggtcgcggttcc

SEQ ID NO: 155264 - DNA, 4074 bp, Homo sapiens
gtgattggtctgttggacgtttttacacctgcaaggtctctggaggaattcaatgatgtacactgttctcggtactttagatactacagggaacaaaaaataaccctgtcctccacgaacattgtacaagcagataacaataaacaacagtatctggtgacccatctcatgggggcagatctgaacaacattgtgaaatgtcagaagcttacagatgaccatgttcagttccttatctaccaaattctccgaggtctaaagggcttaaacaaacaagtaaacaacttttctaatggaaaattcaaacacataaaatcacaggacctaaaacctagtaatctagctgtgaatgaagactgtgagctgaagattctggattttggactggctcggcacacagatgatgaaatgacaggctacgtggccactaggtggtacagggctcctgagatcatgctgaactggatgcattacaaccagacaggaatggcacaactagagaggagcgccatctctggcttcagctctaagtccaggcgaaactcattcgcatatgatgttaagcgtgaagtatacaatgaggagacctttcaacaggaacacaaaaggaaggcctcctcttctgggaacatgaacatcaacatcaccaccttcagacaccacgtccagtgccgctgctcatggcacaggttcctacgatgcatgcttacaatctttcccttcctagaatggatgtgtatgtatcgattaaaggattggcttctgggagacttacttgctggtataagtgttggccttgtgcaagttccccaaggcctgacacttagtttgctggcaaggcaactgattcctcctctcaacatcgcttatgcagctttctgttcttcggtaatctatgtaatttttggatcgtgtcatcaaatgtccattggttccttcttcctggtgagtgctctgctgatcaacgttctgaaagtgagcccattcaacaacggtcaactggtcatgggatctttcgtcaagaatgagttttcggccccctcctaccttatgggctataataaatccttgagtgtggtggcaaccacaacttttctgactgggattattcagctaataatgggcgtattgggtttgggcttcattgccacttaccttccggagtctgcaatgagtgcttacctggctgctgtggcacttcatatcatgctgtcccagctgactttcatctttgggattatgattagtttccatgccggtcccatctccttcttctatgacataattaattactgtgtagctctcccaaaagcgaattccaccagcattctagtatttctaactgttgttgttgctctgcgaatcaacaaatgtatcagaatttctttcaatcagtatcccattgagtttcccatggaattatttctgtgcttgcgctccaggcccgaaagaaaaggaccaaggccaagaaggacaaagcccaaaggaaccacatggcctcggggcagctcggagggtcgctctccagcaaccatgtggaagagagctgctgttgctgaacgccaggcctgggtcttagcagccccgggcctgctggaaagggctgtcggaggaggaccagagcccgcccgctttctgcttcctgtaacaccagatttcagccttcttcccaagataattttacaagccttctccttatctttggtgagctcctttctgctcatatttctgggcaagaagattgccagtcttcacaattacagtgtcaattccaaccaggatttaatagccatcggcctttgcaatgtcgtcagttcatttttcagatcttgtgtgtttactggtgctattgctaggactattatccaggataaatctggaggaagacaacagataaaattacaacaggctaacctgagaggtgtcccatctcaactatgcagagtgacaaaatgtcagagagctatcggaattgaaactggggttgcccggggaatgagtcagcattcagacgccagagaaacagtggcagaggtcaaagacaagcttctgctgcagaaacatagtaaaagaaaaattgacatgcttctcaccaagcagaaggcctcagttgcagacagggaccaatacgttcctgatggtttctctccaactggctctgtctcctcagtttgcatctctggtaggcgcaggtgtgatgctgctcctgatggtgaagatgggacactttttctacacactgccaaatgcagaataactgctggagcacactcctctctggagcacaaaaccggaggtcagaaaggggaaacagcaagaaataaaaggtggaggatagaatgtgatgagaggaggacccaggagaggcaaagaaatatgaaaggggataacttttggagccagatccctgaggagctaagaggggacggagctaagattcttctcctgggtcaaatccctaacaccaacatttatagaagcatcaatgattatcgggaggttgatatggtaaaggtgcctcttaaagaagaagaaattttcagcttgtttaattcaagtgacaccaatctacaaggaggaaagatttgcaggtgtttctgcaactgtgatgatctggagccgctgcccaggattctttacacagagcgatttgaaaataaactggatcccgaagcatcctccattaacctgattcactgctcacattttgagagcatgaacacaagccaaactgcatccgaagaccaagtgccatacacagtatcgtccgtgtctcagaaaaatcaagggcaacagtatgaggaggtggaggaagtttggcttcctaataactcatcaagaaacagcttcaccagggactgcctggatgtgggcggaaagcaggggggagggagatcactcatcccttactcagatgcgtctctacttgcccagtgtccacaccatcatcctgggtttctccatggtacattacgtggatttcacgggggttagtcgtattaagacagatatgcaatgcctttcaaaacgccaacattttgatactcattgcagggtgtcactcttccatagtcagggcatttgagaggaatgatttctttgacgctggcatcaccaagacccagctgttcctcagcgttcacgacgccgtgctgtttgccttgtcaaggaaggtcataggctcctctgagttaagcatcgatgaatccgagacagtgatacgggaaacctactcagaaacagacaagaatgacaattcaagatataaaatgagcagcagttttctaggaagccaaaaaaatgtaagtccaggcttcatcaagatccaacagcctgtagaagaggagtcggagttggatttggagctggaatcagaacaagaggctgggctgggtctggacctagacctggatcgggagctggagccttgaaatggagcccaaggctgagaccgagaccaagacccagaccgagatggagccccagcctgagactgagcctgagatggagcccaaccccaaatctaagccaagagctcacacttttcctcagcagcgttactggcctaatgatcatccgactatggctgccacccagtctcagactcatactcggacatggtcagtggagaggagacgccatcctatggattcatactcaccagagggctacagcaatgaagatgtctatgagacgaactataaatagggggtcagaataatgctggcaaatcctccctacccaaaaaggggtcaattgtcccagagacctagactggatacgaactagcagtacttccttcctgactgtgactcctactacctgccagccttcttccattgctctgcggctgggatcatactcccaaatcacattactaaatgccaacaattatctctgaattccctatccaggctcccctcatttcaccttcagcatatattctagtcatgaatttccttcttcacacaccccacatctctgggctttgtgccagaccatctctaacttaatcctctcatccctgttcccctttctccaaagagatgaagctcaaataaaatgtataactct

SEQ ID NO: 155265 - DNA, 701 bp, Homo sapiens
caggagtgagaggcaagactacccccttgctctggcacctcctggaaggtgagtgctccgacctgggccctggaccacagccacatgcagggggcggagggcctgtgcacaggggcagcagctttggctgctgcacttatttagccttgggccagctgccttttcagaaacgtgccacctcattccccatccgaccaggcccatgtccgtcttcaactgtgggagatccctgcctgtgacctgctcctgaggggcccagccccacaaaggccttagacttctagtggcttgggagtaaaggagaaggacacaggggcatcctgccctgccttcccttccccctaacaaagctgaaagacacgtatttgtatgtagtctcccatttgtgacagatacatgtgagctgaaatggctttaaaagcacagctgtgcagaccaaaccacgcccatcccaccgagggctcaggttaggcacccaaaagatgcaaacaacccaaatgtctgtcaactaatgaacaggtaaacaaaacatggcctgtccacacaacagaatattattcctccaaaaaaaactagttctgatatgtgccacaacactgaacacattacactaagtgaaagaaaccacttgcaagactacattgtctgattctatttacatgaaatgtccaggattgcaagatgaatagatacagaaagga

SEQ ID NO: 155266 - DNA, 398 bp, Homo sapiens
tccatatcaaaacgagggctgatggaggaaaaaggctctctgtatgaagagatgggaccgtcatcagcacattccctagtgagcctactggctcctggcagcggcttttgtggaagactcactagccagaagagaggagtgggacagtcctctccaccaagatctaaatccaaacaaaagcaggctagagccagaagagaggacaaatctttgttcttcctcttctttacatacgcaaaccacctgtgacagctggcaattttataaatcaggtaactggaaggaggttaaacacagaaaaaagaagacctcagtcaattctctactttttttttttttccaaatcagataatagcccagcaaatagtgataacaaataaaaccttagctattcaaaa

SEQ ID NO: 155267 - DNA, 7763 bp, Homo sapiens
tatatgttcatgattttatttaactgattaataaataagagtgccacaggatgttttaacgggttcaaaggagaatacaaagagcagagaatatataggcagacattcatgctgaaatgaatttgcttaataaaggcaaaactagccaatatccatagggtcgatggtcaaatatatctacactggataatttgcattttcatggacaggaattattggcaatttacacagttgtgaaataggtaaaacaaacaaaaagtgaaaggttcagaaaccccatacaatcagctaaactaacatttagttttccattgaaaatatttagcaattttttgagaccatttcaaagtttttcttaatttttctctgctctaaacaaggataaatttgagtttattttaggaaaaaaaagagctttttctttgttgaattagtattttgaaaaatttatggaaggagacagaacataaaagcagttgccaagtttatcaattaagttggtacgattacaaatcccaattaagaaatatttttaagtatattatatgaagatggtatacaaaatacattcatcatgactagaaatataggaccaaaccatgtctgtcttatatctgtagcatatattcttggtttgtataaaagtaactttaaaattccagtttccttaaatagttatgcacaaaacacacatacacccacacccacacacacacacacacacacacacacacacacacacacacagttacaccactgtcggcccaaagatgccactccctcctttaaatcaatttaaatgagggctaggcgaggtatctgtttgatgtttgcattcttgtgggggctagggaaacaagggcacggggtccctaaaattaacatctgcggtgtmcacytcytggatctgacaagagcacagacttgcacatggtttcagascccattccacccagactgttcccacgtacattatctcagaaactctgaaaggaagtgctcgttctttgttagtgccaaccatttttgtcataaatggcaaatgattggaatattatcagttaattcatgtttcaattttcagtgctattttaatgaacaagcactttgtaactagctcattattacaagtctccatttttctttctacattaagactccagatggaaccattctttgactgatggatggactcatgtatgctacaaacctgagtttgaaggagctgagtaacaattctaatggttttgcttttctcttgaaaaggagtatttattatggtctcttaatgattaagaattaattattgaaatcaagacatgaacagctaaggttttatttgttatcactatttgctgggctattatctgatttggaaaaaaaaaaaaaaaagtagagaattgactgaggtcttcttttttctgagtttaacctccttccagttacctgatttataaaattgccagctgtcacaggtggtttgcgtatgtgtaaagaagaggaacaacaaagatttgtcctctcttctggctctagcctgcttttgtttggatttagatcttggtggagaggactgtcccactcctctcttctggctagtgagtcttccacaaaagccgctgccaggagccagtaggctcactagggaatgtgctgatgacggtcccatctcttcatacagagagcctttaaacaaggatgtggcacataagaacagaggcatacattcttcggttacttagagctcaggttctacagttaaattacatggataaaaggaagcatactcttctccccaagaagcagcaatccactgttgcctctccagcttctgactggctgcagaaggtgcagacatcctaaatacatagaccctaacttgcataaatagcatcaaacagagccagcttagcgatccaaggcccacttgatctttagaccctgaagagtaggcgcatcctaaatacatagaccctaacttgcataaatagcatcaaacagagccagcttagcgatccaaggcccacttgatctttagaccctgaagagtaggcgccctttcctaccctgtctccctattcccatcatgctcagaccccaggcaagtttcaaagcagttgaaaatgggcttttcttctagtgatggctcattaactaatatcctgagtcccaactggagaaataccttgcataaattacataccacctttttactcaaggagcttaaagtgcttaatatgcgccagctaatgctcttccacatcctttcagattagtgtgagatagtggaatccccattaaatgaaaaggaaacgtgactgacttcctgtgttttgggtcccaactgtgttggtgaattggtttggttggtatagagacggggtcttcccttgaccttattgacctttttcctccatcagccctcgttttgatatggagaaaactctcctcaggactgcattttcattcttctcagctttctttcacaactaactgtgcaaaacagaataataccaagaaattgagttaagtgtctggactatatattaatacccaaaatagaatgtgacattttcagtgtaaggccatcatggcctggagacaacctaactctggctaagttttcagtgcatcttactagaggagccaaaagtatgggctcagagttgagtgccaccctcagtgctacaaatcaaaacatgccacgaatgagaatggacatagaaccacttccataggtaaaggtctaaaatttgctttagttccaaaaaagatatttgtccttttcttgcctcccagaatccagaaaatgtcccctcatcgctgtccatctgctcctggctgggccctcaaatgtagaagggtcagagctgggaagccactgaaatggcattgctgagccccgtccccctccgtgcccacatggtgcgtctcaaattctttctcatgccttctcccggtttctcttttctcccttgctttttgctttttttccttttcctcctcacatgtcttaggcctgctagaggactcccgagatgttgctcaggccagccagtgatcccctggggctaacgggcttgttgccctgggttttgggctgcagggctggcccagtggggtacgtgatgcattgggtgatcagtgcagctcctcaatcaaactggtcctgcgtgccctgaggtggcgggggttggagcagggaagtcattgggtttaggaaggatttctctaacactgagtaacatgaggatttagcagtagtgttcttcacttgtcactatttctctatctggagttacattcttgttagtcaaaaaaaaaaaagcactattaaaaaaatcacaaaaagcagctggctcccatggaaagataaaggtgtacaacttatgatatgcataatactggctgacgctagtttcctgggggtataaatacacatgtgcttcatagaaataaaggcttcgttaaaaacctctaagatgggtggggtggacttacaggcaccaccggagttgtagtctggggggcggggagcagcacgcgattttcctttccagctcagcgtggtcgtagggtgaacctgcgcttgccttcgctgacgtgcccacagctggaatggcagaaactgggcctgcttgacatcagacagccccgacttccttacttttactggttactcttcaagtcaatctttgagcgaggccttggggttttgcttgttcagtccaggggtgaagcgctttcagcatgggggagaggcccaacagagtgctgctgtcgccctggtagtcatcaaacatggaggtggcattcggtaaaagttcttcaaaggttttgattctttccaggctcatgaacttgaaagcatttacatatctgacatcatcagagcttcctgaattaaacttcggagctgaaatactttccttgaagaagtcctcagagaaggcaggagttgagtatgtaaacccactatttcctgtcagtatggcattgattgggatgtagtctttaccatcctgttgtacatttgcttgaagcaaatcacctagtttttccacaagttctgcaaatcttggcctttcttttgggtctctgtgccagcagtccagcatgatctgatagatttcaggagtagagtactcaggagctctcatcctcatgccttccctcaggcgactgcaaaagtcctcatccatttgtactcctgggtatggagacccacctaaggagaagatttcccacagcaatactccgtaagaccacacgtcgctcttggtgctgtagattttgtcaaagatagattcaggagccatccatttcagaggaagtcgagtatctccttttctcacataatcggggttcttataaatatcccgggcaaggccaaaatcacaaatcttcaccacgttgttctcagataaaagaatgtttctcgctgccaggtcccgatgaatgcactttctggaagacaggaactccatgcctctggccacttgaaaactgtaagaaatcagatcttccatagtgatgggctccttgtagaaaccgtcagaatcctcctcttcctcaacatcactcagacttttatcttcctgaaagccggagctcgcaaagctttcgctgctggtgacgctatctagtcttggtttcttgccttgttccaggcctggctccattttttctttcttaggctccatgtgtagtgctgcatccttgttgagaaaaaataagtcacgtttgctcttgaggtagttggagagatttccatatttgcagtattcaacaatcaccatcagaggccctccttgcttggtgcaggctcccagcaggttaaccacgttcagatggtggccaatgtgggtcaagatttttagctcagtcatcagagctttgtactcgctggccgtggccccctctttcagcattttcacagccacagtccggcacgtaggtgatttcttaatgccaaatgctgatgcttgaaccacttttccaaaagcccctcttccaagtgatttgcccagtttaagtctctcccgggcaaactcccacttgctggcatcataagggagccgctcacactgctcatccaaaggaacttcatctgggtccattataattgataggtagtcagtctttatttcagaagaagaccttttcatttttcggataaggagggttaataggagccagaagagagtcgcagccacacaggtgcatgttagagtgatcagctccagattagacttgtccgaggttccttgaacagtgaggtatgctgaactttccacagagcccttctggttggtggctttgcagtgatagacaccttcatcctcttctgtgactctttcaataaacagcgtgctgcttcctggtcctaaaataattccaggctcttgttgtattttgtggttgtttttaaaccaagtgatctgaggctcggggacaccattagcatgacagtctaaagtggtggaactgctgatggccactgtgtgatcactgaggtttcgcaggaggtatggtgcttcctgatctctgattgtaatttctttcttctggaggatttcttcccctgtgtatacattcctggctctgcaggcataggtgcctgaatcttgcagggaaacattcatgatggtaagattaagagtgatggagtgctccttagtgatggccattttttgcttgctaatactgtagtgcattgttctgttattaactgtccgcagtaaaatccaagtaacgtctctgtataagaacttgttaactgtgcaagacagtttcaggtcctctccttccgtcggcattttttccaagttaacatgaaacccatttggcacatctgtgatataaaagcttatgtttcttcccacagtcccaactttattggaagctatgcaaatgtagattccagaaattctagagtcagccacaaccaaggtgctagccatcttattctttccttctattattgccatgcgctgagtgatgctctcaattctgtttcccatgttgctgtcagcatccaggataaaggactcttcattattggaacaaaagtcacaccttgcttcggaatgattatggttacaggggtgccagaaccacttgattgtaggttgagggataccatatgcggtacaagtcaggatttgtctgctgcccagtgggtagagagccgggtctggaaacgatgacacggccttttcgtaaatctggggtttcacattgacaattagagtggcagtgaggtttttaaacacatttgactgttttatgctcagcaagattgtataattccctgcatcctcttcagttacgtccttgataattaacgagtagccacgagtcaaatagcgagcagatttctcagtcgcaggtaacccatcttttaaccatacaacttccggcgagggaaatgccttcactttcatagagagccggtaagaccgcttgccagctacggtttcaagcacctgctgttttcgatgtttcacagtgatgaatgctttatcatatatatgcactgaggtgttaacagatttgaatgatggtccactccttacacgacaagtataaagtcctttgtctttgttctgcattttgtcaatagtaagaacactgtagaatatgttggcatgggaattgctttggtcaattcgtcgccttacggaagctctcttatttttttcatcagggtaactccaggtcatttgaactctcgtgttcaagggagtggtagcagtacaattgaggacaagagtatggcctctaagtaatttgactgggcgtggtgtgcttatttggacatctatgattgtattggtttgtcgatgtgtgagatagtttgtcttatacaaatgcccattgactgttgcttcacaggtcagaagccctatttctttgtacgttgcatttgatatgatgaagccctttctactgtcccagattatgcgttttccatcagggatcaaagtgtcaagtggaaacttttttaaagtaacagtgatgttaggtgacgtaacccggcagggaatgacgagctcccttccttcagtcatgtgtataatttcggggatttcactgtacatctctacgaaaggtctacctgtatcactaataaatatatagattgcagattctgtttccttcttctttgaagtaggtacagctagatatttgcagctgtagaagccagtgtggtttgcttgagctgtgttcaaggttaaagtactgcagaattgtttgccatttcttccacaggcagatttagttatgctcagcctttcgctttccttactcaccatttcaggcaaagaccatttatgggctgcttcccccctgcattggagatgcagtgtctggcctgcttgcatgatgtgctgggtgccttttaaactcagttcaggatcttttaattttgaacctgaactagatcctgtgagaagcagacagctgagcagcgcgcacagcaggaccccggtgtcccagtagctgaccatggtgagcgcgacgcggcctgctcgcccggtgcccgcgctcccccggccaacgacccggccgccagagtccgtcctctcgttcgccgccgccggccccgcgccctgagcgcccgtctcgcggctccagccaggagacaaccacttccccgggtaatcctcgccgccaggcccgctggccgctgcacccgagccccggagcccgctccgagccgccgccgctgccggggaggagccgagaggagtgtccgc

SEQ ID NO: 155268 - DNA, 892 bp, Homo sapiens
caccctctttaacgctgttccccaggagctggggaaagggatgcttttgcccactcccatggcccctggaactggtggaaaccttttcctctaaacccagaaagcctcggatatcctttaattcacccaagggatccttggcgtggagtcttcctccctttcttcccaaagtctttctccggtgaacttttccttcctggacttttgttaaagcagaaccttcccagctctttgcctgtctccggttgtctcttccctgtattcatggcaacatcagctgacagccccaagttcacccctcggggcggaggatctcctgagtgattcatcagaaccccctgggctcaaccaagtgtcgtctgaagtgacctcccagctctatgcttctttgcgcctcagccggcaggcggaggccacggcccgagcccagctgtatttaccctccacctccccgcctcatgaagggttagacggcttcgcccaagaattgagtcgaagcttgtcagtcggattggaaaagaacttgaagaaaaaggatggttctaagcatatctttgagatggaaagtgttcggggtcagctccagaccatgctccaaacctcacgtgatacagcctatcgtgagggatcctctcattcctggcgctggctcagagagacgggaagaggactcctttgacagtgatagcacagccaccttgctcaacacccggcccctgcaagacttgtctccatctagctcagcccaagccctggaggagctgtttccccgctacaccagccttcggccagggcctccactcaatcccccctaccctctctcctctttgttctctcattgttgttattttaataaatgctcattagtctgtaaaaaaaaaaaaaaaacaaa

SEQ ID NO: 155269 - DNA, 2707 bp, Homo sapiens
cggacgcgtaggggccgagatcccgggcacgctggttctggtgagcgcggcctccgcggctccttggccccaggatgccctctctcgtggggaaaggagggtcgggaaaggccgagcgtaagtccaccttctccaatccctgcctgctgggagaggacgatctcttgagaaaggaaagacttctgtgctcccgagaacttcctatcaggtcctggctgcagggaaacaagctgggctttttataattaaggttggaagaagtcaccacaggcagcagaactccatcttgagatgaaataacatctacctggacctctgtcagaatttcaaggcacacactgggctgactctggcgccatgatgttgccttatccttcagcactgggagatcaatactgggaagagattttgcttcccaagaatggggaaaatgtagagactatgaagaaattgacccaaaatcataaagcgaaaggcttgccttctaatgatactgacctcccccaaaaaaagggagggaagggcccaaatagtggtaccagttacattcagggatgtgactgtgatcttcacagaagcagaatggaagagactgagtccagagcagaggaatctatacaaagaagtgatgctggagaattacaggaatcttctctcattggaaaactttcattcttcagcagaaccaaagccagaaatctacacttgttcctcctgccttctggccttctcctgtcagcagttcctcagtcaacatgtacttcagatcttcctgggcttatgtgcagaaaatcacttccatccagggaattctagcccagggcattggaaacagcaggggcagcagtattcccatgtaagctgttggtttgaaaatgcagaaggtcaggagagaggaggtggctccaaaccctggtctgcaaggacagaggagagagaaacctcaagggcattccccagcccactccaaagacagtcagcaagtcctagaaaaggcaacatggtggtagaaacagagcccagctcagcccaaagaccaaaccctgtgcagctagacaaaggcttgaaggaattagaaaccttgagatttggagcaatcaactgtagagagtatgaaccggaccataacctggaatcaaactttattacaaacccgaggaccctcttagggaagaagccctacatttgcagtgattgtgggcgaagctttaaagatagatcaaccctcatcagacaccatcgtatacactcgatggagaagccttatgtgtgcagtgagtgcgggcgaggttttagccagaagtccaacctcagcagacaccagagaacacattcagaagagaagccttatttgtgcagggagtgtgggcaaagctttagaagtaagtccatcctcaatagacatcagtggactcactcagaggagaagccctatgtttgcagcgagtgtgggcgaggctttagcgagaagtcatccttcatcagacaccagaggacacactccggtgagaaaccctatgtgtgcctggagtgtggacgaagcttttgtgataagtcaaccctcagaaaacaccagaggatacactcaggggagaagccttatgtttgcagggagtgtgggcgaggctttagccagaactcagatctcatcaaacaccagaggacacacttggatgagaagccttatgtttgcagggagtgtgggcgaggcttttgtgacaagtcaaccctcatcatacacgagcggacgcactctggagagaagccttatgtgtgtggtgagtgtggccgaggctttagtcggaaatcactcctccttgtccaccagaggacacactcaggggagaagcattatgtctgcagggagtgtaggcgaggttttagccagaagtcaaatctcatcagacaccagaggacgcactcaaatgagaagccttatatttgcagggaatgtgggcgaggcttttgtgacaagtcaaccctcattgtacatgagaggacacactcaggagagaagccttacgtgtgcagatgtatgggcaaagcttttgtgatcacacaccacagggagaatctgcatgtggggacactgtggagctctgcccagatgaccttttcaggggtaacaccccagctgcttgagagaacagtgttgctgctggcagagatgcattccagagatgcactccgctctggaactcactctcagccacagggagctgcatgcaccacaggggcaatgcacctttgcaggggtaccttctggccccaacccttgactcaacggggacaactccagaaggtcattccagatccagagatccccatcgaactgaaggatcactgggttgcagacacattgcaggtcccacccataaatctcatcataatggcaattgaatttcaacatgaattttggaggagacattcacaccatagcatcaattacgcagtggctcctcagtcaggtctgatgagggaaaaggatgtgcatgtctgggagtgtgggcccccaccctttgccagaactgcccctataacaccaacttctgatcagaattggaggccactgagggaaaagaagggtcactatcaggacctttccactccatcccagaaggaaacagaattgaaacgtactagagtttctctcagaagaaagagagatgcaaattctccactccaggactatggctttggtgcctaa

SEQ ID NO: 155270 - DNA, 1131 bp, Homo sapiens
atggctggggaggtctcaggaaacttacaatcatggcagaaggaaaacgagaaacagacatcttctgcacagggcagcaaagtggaggtagtacaagcaagggaaataccagacacttataaaaccatcagatctcgtgaaactcactcattatctcaagaacagcatgggggaaactgccctcatgatccaattacctccacctggtcccgcccttggcacatggggattatgggatttacaattcaagatgtttacagccagtgtttacatgtgtttaccagtgtttacgtgtcttccatcaaccaagcactgaccttggctttggaatatgatgctaaatggcatacagtccagctcccaaggtactcagaagcctgggacagggaatctacttcaccctcaaatttcttaccctatggaggaatccttgtatttaacagagaccagccaacaaacagtgccccatactggaatgtcagaatgggaaggagagagaagatcacaagcgtcttgtgttgtgaacctcaaaccctgaaatctggcagcaccagggaagagtcctcagaaagaatggctctgtggttcccaaactctcccaaatccctattccctaagtgtaaccaatggggagcacaaagggctgtttttgtttcatgtgaagacgatgagcatgctatgaaccccgaagagctgttgtataggcaagtagaatgtgtttggctgtggtgtggtaaagctgactgtgttacacagagagtggtggaggaaggaggagaagcaagtgaagacaatgaagaggcaggattttgccacattgccaaggctggtcttgaaatctgctcagctaaacctcctaaactgctggggctacagagtgtaaaagactggatccttccaacaatattagtcacagtgtataaaccttggaaagcattattttatcatcttttggaagaatggagttctcacagcaggcttaaagcagtagagacttccaaagggggtcatggtggaaaaaaggaagagagtcgactatcatcctccaataatgccggcaaaaaaacttgtcagatcctcacacgaaagggaccttctaagaacaagatgcaagtagaatcatcagagtga

SEQ ID NO: 155271 - DNA, 2885 bp, Homo sapiens
atgggggaaactgccctcatgatccaattacctccacctggtcccgcccttggcacatggggattatgggatttacaattcaagactaacaccacatctacagacactgaccctagatcacacctccaggagacaggagacaacatcttaacacttttcaccatgcatcctcctcttgaatcagagtggactatttgtaactttcgccagatatggctcttgtcttcatggtccaccttggagactagagctcagccattacactcctatttcagaaagctgaaaggaaggggcactgcaattgcgggcattgtttttggaatagtatttatcatgggggtcattgctgggattgccatatgcatctgcatgtgcatgaagaaccacagggcgacccgcgtgggcatcctcaggacgactcacatcaacaccgtctcctcctatcctggaccaccaccctacggtcacgaccacgagatggaatactgtgcagacttgcctcctccatactcccccaccccacagggtccagcacagcgttctccaccccctccttatcctggaaacgcaaggaaataatctatctcccagaacagaacatgtgccaatgggcgatcttgcctggaataaaatgcctctactcagaaacaggcaggaaagaattgctccaaggaatactttttggggtcagataatgtgtcaggtggaatatccctgctaggagatataggatttctactctgctcaaagctgaccccatctggagtattaatgtttggttctatgttaaccacattttaagagatctgctgatccacctaagcacattcagggaagagtaatgtaattgacaaaatatctgataatcatgttgtttaagggctaggtgaagaaagtttcagtattgatcctggaaaaaaagaagatctaagtaggatgggagaatgatttggcccacacaaggaagcaactttattctatatagctttaaaagtcagaactagaattgttcattctttcattcatcaataaatgtattttgagtgcctaagagtttactatgtgcctagcactgtttgaggtcctgatggaagttacaggatgggtactctggttttagtacaagaaagagcaatgactagattgctttgtgaagctcttggtagagacacgctccagaagggataacaaaatcaaatagtagatgggttcattgggcctcaaaagttctgctcgtattttaggggggtgtgaagtgaatttctatatgtccaggagtgaatacaacagaaagagttggatcttatttatttaattagggagttaaaacaagaccaaaaagactcaacagccgctttgaagccaaggaactctttccatgccagctactgccacctaaaaatcatctggctttatagtggatcagaataaaggttattctaactgtggggagaaaaaaaaaattgtatcaagttccacaggtagcagacacttcacttccaagtaaaagatgagaaatcaattattcccacaggattttaggtcagggagcaaaaatctcagaacttgaccatgaagatacacaacagactcggcaaaaataaagtgggaaatgaagttcagattcccttctgtagatttcccttaaaactattatttttttccttcttcgtaaaattttggataatctgttctcttaaaaaagttaatgacacaattaagatactgacatcaaattgttgccttttaccaaaatgcaaattttatgaagtgcctacctttatatgtataaagcatttaataaataattctaatgtgccatattttgctgtgagtgaccttaacatttatatttttatatgaattgtttcatgtatttataaaaattgtatattgaacattggaaatagatgattagatttttgtgtcattttacaattaaatctaaaatgcttaatccaatatcatcatcaaaattcagtgaaatcccaaaacagtgccaagaattttgctgaatgaaacaatcaaacaaagcattttaaggtgtaagttatagtacctgtacttgcagataagaagcttactatatcattattataagtagcatatattactttcaaatacctatattagaaagatattggatctgactgaaatataacctacctgccagtaaggtccaaaggctgaatttgttttgaatgagttccatgatctttaagcactgatgattttcttatatatgaggatgcaaagcattcaagagtttcagcctgttctggtgaggggctccctgtctttcataaagttttcagtgcaattttaatagtacatatgctttaatttatttttcttctgcgtgtggtcagacccaattacactgtggctaagactctcaaagtgccagggtttctgtgatgattctgagaatgctgaatacaaatataccttatattctttaaggaaaacggaaaggaaagatcagcagaaaatagggttttctcatcttcaccatcaataaacatttattgcgtacctcctatattctgcaaattttccccaaatagaagccagttcagtccacaccatctcttctttgagttgtttatggcctcccttaaggcattttacaaacccataagcctacaatagatgagtatttttactatttgtattaagtgtcataatagcatcaatgtgcacattaccagtatagactgttggagttcactgattgttttcatagatgatgcttcttggggaaaaatagtataggatgtgaaagttttgaattacggttatttaaaaactaacatttgctatggccaaagtgtttacaataagcaataaagtgaaagaacctattataacccaaaaaaaaaaaa

SEQ ID NO: 155272 - DNA, 411 bp, Homo sapiens
tcacctggaaggcagatctatttgagaatctggactgtctcctatcatgattcccgggaaatatcgctctgtttctggccgggctgcgaacaacgtgaactgcgggcttcatctggttattcaaacatcatcgcttcctgaaaaaaacaaaacaaaagctgaccgtatgtcctatcatcaatggggaagaccaccttcgtttgttgaactttcaacacaattttataactcggatacaaaatatttctaatctacagaagttaatatcgttggatttatatgataaccagattgaagaaattagtgggctttcgactctgagatgtcttcgtgtccttctggtggggaaaaaccgaatccagaaaaaccttcatctggagaatttaaaaaagcctaaaaggccttggatct

SEQ ID NO: 155273 - DNA, 851 bp, Homo sapiens
  misc_feature (1)...(851): n = a,t,c or g
tttggaaggcagatctaacagagaacctggactgtctcctatcatgattcccgggaaatatcgctctgtttctggccgggctgcgaacaacgtgaactgcgggcttcatctggttattcaaacatcatcgcttcctgaaaaaaacaaagttgaattcaagctaaataaagacacatcgtcattccccggtagacttttacaacatgaccttgaaagaaactactcatgtaggcaaggtgatcatattaatttggtgagctcatcattgccatcatttcctattcttcaacgttcttctgaagagaaaattctttactcagacaggctgagcctagaaagacaaaagctgaccgtatgtcctatcatcaatggggaagaccaccttcgtttgttgaactttcaacacaattttataactcggatacaaaatatttctaatctacagaagttaatatcgttggatttatatgataaccagattgaagaaattagtgggctttcgactctgagatgtcttcgtgtccttctgttggggaaaaacagaatcaagaaaatctcaaatctgggagaatctaaaaagcttaggatgtcttgggatcttcatgggaaatcaggattacccaaaattggaaaatattaaatcatttgtgtgagttgagagttttaaatcttgccgggaactttttaagtcatgttggataatcttaatggggctgggattcacttaactgaacttancttgcgacacantcaantcactttcgtgagagatgtggggtaatttgccctgcctgccaacatctctttcntcgcnttaacattttntccgttttgacgtgtttcccgcctgc

SEQ ID NO: 155274 - DNA, 1173 bp, Homo sapiens; identical to SEQ ID NO: 145744

SEQ ID NO: 155275 - DNA, 538 bp, Homo sapiens
ggaattcctgtcccgctgcgtgttttcctcttgatcgggaactcctgcttctccttgcctcgaaatggaccccaactgctcctgctcgcctgttggctcctgtgcctgtgccggctcctgcaaatgcaaagagtgcaaatgcacctcctgcaagaagagtgagtgcagggccttccctgcgaatctgggggatgggccaagttagagcagggaacccagagctctgcaggcaggggcaggccaatgaccagcttccccaaacccctccttcaacacctgattcagaatcagacctcaaattgccttaaaaatgggctgctgctcctgctgccctgtggggctgtggccaagtgtgcccagggctgcatctgcaaagggacgtcagacaagtgcagctgctgtgcctgatgccaagacagctgtgctctcaaatgtaaatagaggcaacctatataaacctggattttttttcaatacgatactgagccatttgctgcatttctttttatgttaaatatgtgaatggcaataaattcat

SEQ ID NO: 155276 - DNA, 1721 bp, Homo sapiens
ggggacgcgctgggctgtgccctccgcccccgccgcccacgcactcgtcttcgagggcgggcccggcggccccggagcaaaccgccgtctccccgcggccccaccggtccctggcagcctcggggaatgtctgtagctgaattcgggctctgaaagaaggtggcgctgggtttttaaagatttggggcacaaaaaacgagagcggacccggcgccggctacggcccttcccgagggccacgcccagcccggcgccccgcgcgccccgttccccgcgccgcctccctccacccggctgagcgcttgtgcccgcaggtgcggcgccccccacccgcgtcgccgccatggaggtgctgcggcgctcctcggtcttcgccgccgagatcatggacgcctttgaccgctcgcccacagacaaggagctggtggcccaggccaaggcgctgggccgggagtacgtgcacgcgcggctgctgcgcgccggcctctcctggagcgcgcccgagcgtgccgcgccggtcccgggacgcctggctgaggtgtgcgcggtgctgctgcgcctgggcgatgagctggagatgatccggcccagcgtctaccgcaacgtggcgcgtcagctgcacatctccctgcagtctgagcctgtggtgaccgatgcgttcctggccgtggctggccacatcttctctgcaggcatcacgtggggcaaggtggtgtccctgtatgcggtggccgcggggctggccgtggactgtgtgaggcaggcccagcctgccatggtccacgccctcgtggactgcctgggggagttcgtgcgcaagaccctggcaacctggctgcggagacgcggcggatggactgatgtcctcaagtgtgtggtcagcacagaccctggcctccgctcccactggctggtggctgcactctgcagcttcggccgcttcctgaaggctgccttcttcgtgctgctgccagagagatgagctgcccacctggcagtggccgcagcctggccctctgggcccaacgcaggaggccctcagcacccgaacacatcttcctcctccccacccgagcctggagcactctaaccctcggagaccccctaagccccgttcctccgcagacccaggccctccggaaggggtgagtggggaggggctttcctgagcctggagctgggctttggggcagcctgcgaccctccccgcttgtgttccctttctcctgtgatctctgtgtttttccttttctttcttgggggccaaggaagtcagggtcaactcccgggcctcagatgcaggggcccagaacacctgctctcacctgagccccaggtgaaggggcccgggaacacctgctctcacctgagccccaggtgaaggggcccgggaacacctgctctcacctgaaccccaggtgaaggggcccggaacacctgctctcacctgagccccaggtgaaggggctccggaacacctgctctcacctgagccccaggtgaaggggctccgggaacactttgcttcttcacctgaggccccaggtgaaggggcccgggaacacctgctctcacctgaaccccaggagaaggggcccggaacacctgctctcacctgagccccaggtgaaggggcccggaacacctgctctcacctgagccccaggtgaaggggcccggaaacacctgctctcacctgagcccctggagaaggggcccgg

SEQ ID NO: 155277 - DNA, 799 bp, Homo sapiens
  misc_feature (1)...(799): n = a,t,c or g
cgctgtttcacgccaggctctgggattgaatgatatccctggatcaggttcactggcgtcccctgctggcacagagcagcacaaagacttcgaaactggatacgctgataaatttatgaaatctccacaaactagagaacacgggctagnagatcccccaaacttgtatctggattttgatggtgatgttacaaaacttgaaacttttggagtaaccaccaccaaagcatcaaagccaagaagtccagcaagtacttccacagtaactaacgtgacagatgctcctacagcccccaaagcaggaactacacctgtggcaccaagtgcaccagacatttctgctaattctagaagtttatctcagattctcattgaacagtcgcaaaaggagaaacaactggtcactggtatggatggtggccctaaagagtgcaaaaataaagatgaccagggatttgaatcatgtggcaaaaaggtatcaaatactgacaagtcttcgaggcaagatagtgacttgaaaacatctgatgccttacagttagaaaattctcaggaaattgaaactgctaataaatatgatatgactatagatatggtacatgttgatgctgaaagacccaatgttctggaaaacctagacaactcaaaggaaaagactgtgacatcagaagcagctaaaactgaagatacagttctctgcagcagtgatacagataaggagtgtttaattattgatacagagtgtaaaaataatagtgacggaaagacagctgtcatgggttccaacttaaattcttga

SEQ ID NO: 155278 - DNA, 349 bp, Homo sapiens
ggcacgagcctgttattaccatatcatatccatcatggaagaataccttgtacttttccaccgaaatcactggataccacaacacaacaaaaggtaagatcttttttgaaattaaaggttcattaggttgtttattattcgtctatttcactgactttaccgtatttcaccctgatgttctcattgtcatattaatcacagcaccattctaaaagctatatccataggaagggtaaagttgtatgccatggtgagtccagtcttcgtggtagtggaacttttttatttttgcaagatttataagtcaactaaagaaaactctcttaggcttgcacagtagggtgtatgg

SEQ ID NO: 155279 - DNA, 2908 bp, Homo sapiens
tccaaatgcagagaagcttgtttccagatatcaccctcagatagctctaactagtcagtcattatttaccttattaaataatcatggaccaacgtacaaggaacagtgggaaattccagtgtgtattcaagtaatacctgttgcaggttcaaaaccagttaaagtaatatatattaattcaccacttccccaaaagaaaatgactatgagagagagaaatcaaatctttcatgaagttccattaaaatttatgatgtccaaaaacacatctgttccagtctctgcagtctttatggacaaacctgaagagtttatatctgaaatggacatgtcctgtgaagtcaacgagtgccgaaaaattgagagtcttgaaaacttgtatttggattttgatgatgatgtcacagaacttgaaacttttggagtaaccaccaccaaagtatcaaaatcaccaagtccagcaagtacttccacagtacctaacatgacagatgctcctacagcccccaaagcaggaactacaactgtggcaccaagtgcaccagacatttctgctaattctagaagtttatctcagattctgatggaacaattgcaaaaggagaaacagctggtcactggtatggatggtggccctgaggaatgcaaaaataaagatgatcagggatttgaatcatgtgaaaaggtatcaaattctgagcaagcctttgatacaagatagtgacttgaaaacatctgatgccttacagttagaaaattctcaggaaattgaaacttctaataaaaatgatatgactatagatatattacatgctgatggtgaaagacctaatgttctagaaaacctagacagcgtcaaaggaaaagactgttggatcagaagcagcaaaaactgaagatacagttctctgcagcagtgatacagatgaggagtgtttaatcattgatacagaatgtaaaaataatagtgatggaaagacagctgttgtgggttctaacttaagttccagaccagctagtccaaattcttcctcaggacaggcttctgtaggaaaccagactaatactgcttgtagtcctgaagagtcatgtgttttaaaaaaacctatcaaacgagtatataaaaaatttgatccagttggagagattttaaaaatgcaggatgagctcttaaagccaatttccagaatagtaccagaattgcccttaatgaatttagaaaattctaaacagccttctgtttctgagcaattgtctggtccttcagactcctctagttggccgaaatctggatggccttctgcatttcagaagccaaaaggacgattgccatatgaactccagttctatgatgcacgattcatcggaatacctacctcctggggaaggaaattgggtttataagtcatttagcctgcaagacctgttgttactcgtacgctgcagcgtccagaggatagagacaagaccacgttctaaaaaacggaagaaaatcagaagacaatttccagtttatgtactaccaaaagtagagtatcaagcttgttatggagttgaagctctgactgaaagtgaactttgtcgctttatggactgaaagtttattgcattccaacagctcattttatgttgggcatatcgatgcatttacttcaaaactttttctactggaagaaattacctcagaagaattaaaagaaaagctttcagcactcaagatttccaatttatttaacatcctccaacacattctaaagaaactaaagtagcttgcaggaggggttcctacttgttatctcatgcagcagaagattcttcactccctgatttataaggcctctgatggaaaagttactaggacagcatacaatttgtataaaacacattgcggccttcctgggtgtaccttccagtctctcagttcccggggtcccattaggatcccagcctggttattaccatatcatatccatcatggaagaatacccttgtacttttccacccgaaaatcactggataccacaacaccacaccaaaagattggtggaacgaggaatgccctacacgcagcccacaggaatcccagtttcccatggaaaccaaaagcgagttgctttgcctgctcagcaagttgaaactgaaggagtgggctccacataaaagaaaaataacttgaggactgtacccatgggaaaactaaatttaaaaaaacagttattaacagtgtttaatttaggataagtttgaggggaaaataatcagtaggcaagaggaacattttttcctgtagtagctagagtgcccttggaaaaaaatgtggttggctatggtggaaggaatatttccaactaaaatggaatggtatgcttttcacccttaaagtttgaggaggatctttgatatgttgttaacattatcatggcagggaaatatataaagaagaaaaatatttttacattaaacccttttcctaaaaattgtaaataggaaaataatttggttttttatcaagaacaaccacttatcgttatgtattgtgttagttatattgccgagtctgttgcgactgactcaaaaagttaaatgttgccactgctggaaggatgattatggagcatcgcaaactttgtttctgacccattttgacagtttttatatactcctttaaaatgatgaatgttacaggttaataaagttaatacctttaaaaacttggtgaaattccattacagaagccaaaaataaaaactccctgcctctgaaaagtcagattacctgacttcttgtttggcaaccatcagtttgtttaataaaagaaaaaatttggtggtataacatgttttgatgacagatggcctcctatctctaagattccaagcctgagttgttgaaatacactggctgaaag

SEQ ID NO: 155280 - DNA, 454 bp, Homo sapiens
tcatatttctactcaaacctgtccctcctgcagtcttctttgtgtcaaataatggcaactccattcttctagttgctcaggtcaaaaagtttggtaattggtgaacacgccgtccacgtgcgccttgctgtctctccattatcgcttgagatctccagccttaccgcggcttgaaatggaccccaactgctcctgcaccactggtggctcctgcacgtgcgccggctccagctgccaagtcacactttttcatctgcaggaatgattcacggcagagagacgttgtcatagactgacttcattccttcagacagcatttctcaaacacttatcctcagtgtactccagggacgccttgagttacccaatctctcgcagccagacccgcgggtctcccggaacccacctcggcgtcgggaggacgaaatcgtcgacccgggaattcgcggcgcgg

SEQ ID NO: 155281 - DNA, 1137 bp, Homo sapiens
tcagtaccaggaagtgcaggcgatgaggaagcgcacgtcgtccagcggcccccacgggctgggctcgggctggggctggggctggggctggggctggggctggggcggatgccggggctgttccgggccctccggcgccgcaggctggggctggggctggggctgggtttgcgcaggctccggggcgccgcggccgccgcttagctgagcccccatggtctcggcgtcgggaggagctggcgccgtgacgccaccaccgcgtaccgacctcaccctccgtgcgttggagcggaaagaagggactcgaccctgtgcttcggggcggggctccgcgaccgtcccccgccaatcccgccccagcgcctcaaggccccgccccgcgcaaggggacggaatgcgtcccaacagcctgtcaatgagggaatcccgcatgctggtggcaatggtgctaggctgggcttcattcagcttgaagacactctccaccactgacagctctgtgctggttgtgtccaggccacagaaggcacaccagtcattcaccaccatcccagcagcaatcacctcactgcctcggttcacagtccccgccacaagggggacttgaagaagagaggacagctcatcctggtcttcaattgaagtcttgggatgcaccagccctccctgattgctgaagacacagtagcttcctactagcacctggtcggccactgtctgtctgaagacttccaccttgagcacatctgccagaatttcttctgtctccctgtccaagtctgggtggaccaaggccacgtagtcattgcaggtggtgacattgcccaaggctgagagccgctcctccacccgcctaatctgcactgtgtctgggaggctgttgcgaatgtgttgcagctcctggtcggtggtattgttgggtaccaggagaccgtgcctgttccccacacacatgcgcccgatgatgcggcagccggcgatagacgcgtgcaccacggggatggtatcggagagctcgccctcgaacacactgtagaagttctctgagcctccgatcgctaccagacagtaggtgttggtgagcttggcaaagcagccgatctcacagttgttctcgaacgaagctcggaccgccat

SEQ ID NO: 155282 - DNA, 591 bp, Homo sapiens
gagctcttcatatttctactcaaacctgtccctcctgcagtcttctttgtgtcaaataatggcaactccattcttctagttgctcaggtcaaaaagtttggtaattggtgaacacgccgtccacgtgcgccttgctgtctctccattatcgcttgagatctccagccttaccgcggcttgaaatggaccccaactgctcatgcaccactggtggctcctgcacgtgcgccggctccacccactcaagagccgatggcagccaacaggcaatgctgcgccattaaggtgtttgtcaagaagctaagctgggcattgtgggcgatcctgagggccctttttagattggcagctgccaagtcacacttttttcatctgcaggaatgattcacggcagagagacgttgtcatagactgacttcattccttcagacagcatttctcaaacacttatcctcagtgtactccagggacgccttgagttacccaatctctcgcagccagacccgcgggtctcccggaacccacctcggcgtcgggaggagctggcgccgtgacgccaccaccgcgtaccgacctcaccctccgtgcgtt

SEQ ID NO: 155283 - DNA, 1818 bp, Homo sapiens; identical to SEQ ID NO: 142882

SEQ ID NO: 155284 - DNA, 1575 bp, Homo sapiens; identical to SEQ ID NO: 123266

SEQ ID NO: 155285 - DNA, 2040 bp, Homo sapiens; identical to SEQ ID NO: 140190

SEQ ID NO: 155286 - DNA, 1875 bp, Homo sapiens
atggtaattgtccctattggctacgcagcgcaggaattatttgacgtttcacaggttcgcggcggtacgccgtacggcgcaaccaccatcgcaggcggtgacggttcacgccagcccagccaggaagaactgtctattgctcgttatcaaggggaatatgtcgcaggcgtgcggtatcggtctaccttctatccgggtatctccggctcagtgtcctttcgcatattctggtgctctattgtacagcgggtttacacatcggtgcatgctattgtacccacccgctacgcttactgtaattctgaattcagcagtaagcgccgtcagatcagaaaagagattttcttgtcccgcatggagcagattctgccatggcaaaacatggtggaagtcatcgagccgttttaccccaaggctggtaatggccggcgaccttatccgctggaaaccatgctacgcattcactgcatgcagcattggtacaacctgagcgatggcgcgatggaagatgctctgtacgaaatcgcctccatgcgtctgtttgcccggttatccctggatagcgccttgccggaccgcaccaccatcatgaatttccgccacctgctggagcagcatcaactggcccgccaattgttcaagaccatcaatcgctggctggccgaagcaggcgtcatgatgactcaaggcaccttgatgcatcagaccaagaaaggcaatcagtggcactttggcatgaaggcccacattggtgtcgatgccaagagtggcctgacccacagcctggtcaccaccgcggccaacgagcatgacctcaatcagctgggtaatctgctgcatggagaggagcaatttgtctcagccgatgccggctaccaaggggcgccacagcgcgaggagctggccgaggtggatgtggactggctgatcgccgagcgccccggcaagagatcagcaagctgcatccagaaactgaacaccaccatgatctacgtgacccacgatcagaccgaagcgatgaccatggcgacgcggattgtgattatgaaagacgggattgttcagcaagccgaggaaaggaacgactggcactttactatcggcgcgatgtacgaaatagaaaacgtcgagggttatggcgaagatttggatgggctggcggatccttcagtctattttaatgccgccaacgggccgtgtagaattgctctgggctattatcacgaagggcccgaaaatataacgcgggcaccggaagagatgcgcagcttcctgctggatgccggggcagaatataacggctatgcggctgacctgacccgtacctggtcggcaaaaatgaccaacgactacgcgcagctggtgaaggacgttaatgatgaacaactggcgctgatcgccaccatgaaagcaggcgtcagctatgtggattaccacatccagttccatcagcgcatcgccaaactgctgcgtaaacatcaaatcatcaccgatatgagtgaagaagcgatggtcgaaaacgatcttaccgggccgtttatgccgcatggtatcggccatccgctgggcctgcaggtgcatgacgtcgctggttttatgcaggatgatagcggtacgcacctcgcggcaccggcaaaatatccgtacctgcgctgcacccgtattctccagccgggcatggtgttaaccatcgaaccgggtatctacttcatcgaatcgctactggcaccgtggcgtgaagggcagttcagcaagcacttcaactggcagaaaattgaagcactgaaaccgttcggcggcattcgtatcgaagacaacgtggtgatccacgaaaacaacgtggaaaacatgacccgggatctgaaactggcgtga

SEQ ID NO: 155287 - DNA, 1407 bp, Homo sapiens
tcaatcgctgatctggccgaagcaggcgtcatgatgactcaaggcaccttggtcgatgccaccatcattgaggcacccagctcgaccaaggggcgtccacagcgccgaggagctggtccgtaggtggatgtggacctggctgatcgccgagcgccccggcaaggtaagaaccttgaaacagcatccacgcatagtacaaaacggccatcttacatcgaatacatgaaagccagcatccgggccagggtggagcacccatttcgcatcatcaagcgacagttcggcttccctaattgatgctgttcctgtgctgcccggattgtcatttttgccactggctaacgccaggtcgagattgttactacctgaaaatgcatcgctggcgatcagatttaatgaaccattcgggccaaatccaaatccgttgttggaaatattagcggtattcaactgaacacgaatatagcgtcctgatcgcattgcattaccagcgtgattgttctgtctgctaaattgtgttgttttaccccggtcaacttggcgcatggcagcacttcgtttgccaatagtcgatatttgtggtaattgctcgtggactgagcgggccaatgtggaaagttcgctgtcaaggaccagcgcctcatcagcgtttgtctgctcaagatgagagcgaatcaatacttgctcaagacgattgagatgtttaatacctgcaagatgaggattgcgccccagccgcaccgggcttagcgccaacgtaatcccctcgttacgcaaacggtcgtaatgtgcaggataagccgtaacggagagaatccgcgttgccggtccgctgttcaatgtgctgtaccctcgcccgccactaccgcgactgatcacgactttcagcacaccattttgctgttctgctgccagcgttttcatctcttgttcaagctgaggccagaagtcacaggaaatcatcaaccgctgacaagcatcctgtagtcgctggatatgcgccgataacaaactgactttaccgtcgataactctggcggtggtaaaacaaccatcaccaaactgcgttgcccgatcgcttactgccagcgattcctgacgcgcttcgtgcggtacgaaatccagatcgcaaccttcatccgggttatccaggttgatggttggcggaacagcctgatcgcgcagcgccaggatggagtagatagattctactgcacccgccgcacctaacaggtgaccggtcatagatttcgtggagcttaccaacacacggcttgcagcttcaccgaagatggttttcaccgcctgcgcttcagctttatcgccagccggcgtagaagtaccgtgcgcgttaacgtagccaatctgactcgcttcaatgcctgcatcacgcagagcatttgccat

SEQ ID NO: 155288 - DNA, 999 bp, Homo sapiens
atgatgactcaaggcaccttggtcgatgccaccatcattgaggcacccagctcgaccaagaacaaagagcagcaacgcgatccggagatgcatcagaccaagaaaggcaatcagtggcactttggcatgaaggcccacattggtgtcgatgccaagagtggcctgacccacagcctggtcaccaccgcggccaacgagcatgacctcaatcagctgggtaatctgctgcatggagaggagcaatttgtctcagccgatgccggctaccaaggggcgccacagcgcgaggagctggccgaggtggatgtggactggctgatcgccgagcgccccggcaaggtaagaaccttgaaacagcatccacgcaagaacaaaacggccatcaacatcgaatacatgaaagccagcatccgggccagggtggagcacccatttcgcatcatcaagcgacagttcggcttcgtgaaagccagatacaaggggttgctgaaaaacgataaccaactggcgatgttattcacgctggccaacctgtttcgggcggaccaaatgatacgtcagtcatacgcttcgagatacttaacgcccaacaccagcgaaatgagcggcttgccgacgatcaacaccgcgagcgccaccagataccgattaccgcccgtacacgttggctttgccatgagcgtaattaatgaagccgaagcacgcgacactctcgacgccttacaaaacatgtttgacgttgagccggatgtcggcgcgctgttgtattgtgctgaggacaaacataattgctgttatttgtttgcattgacatatctgctgctgcctggcaaccagtgttgcatgccagattcacatttgatgccatcgttgctgctgcaactgatgctatccaccatcatcatcattcaccacctgcgcagcaactgtggtgcatccgtcttaagcagctctgcacctttgcaatgtggcaattgccaatgtctttgtgcaacctag

SEQ ID NO: 155289 - DNA, 2151 bp, Homo sapiens
gaaagctgagctgccctgacccccaaagtgaggagaagctgcaagggaaaagggagggacagatcagggagaccggggaagaaggaggagcagccaaggaggctgctgtccccccacagagcagctcggactcagctcccggagcaacccagctgcggaggcaacggcagtgctgctcctccagcgaaggacagcaggcaggcagacagacagaggtcctgggactggaaggcctcagcccccagccactgggctgggcctggcccaatggcctttaatgacctcctgcagcaggtggggggtgtcggccgcttccagcagatccaggtcaccctggtggtcctccccctgctcctgatggcttctcacaacaccctgcagaacttcactgctgccatccctacccaccactgccgcccgcctgccgatgccaacctcagcaagaacggggggctggaggtctggctgccccgggacaggcaggggcagcctgagtcctgcctccgcttcacctccccgcagtggggactgccctttctcaatggcacagaagccaatggcacaggggccacagagccctgcaccgatggctggatctatgacaacagcaccttcccatctaccatcgtgactgagtgggaccttgtgtgctctcacagggccctacgccagctggcccagtccttgtacatggtgggggtgctgctcggagccatggtgttcggctaccttgcagacaggctaggccgccggaaggtactcatcttgaactacctgcagacagctgtgtcagggacctgcgcagccttcgcacccaacttccccatctactgcgccttccggctcctctcgggcatggctctggctggcatctccctcaactgcatgacactgaatgtggagtggatgcccattcacacacgggcctgcgtgggcaccttgattggctatgtctacagcctgggccagttcctcctggctggtgtggcctacgctgtgccccactggcgccacctgcagctactggtctctgcgcctttttttgccttcttcatctactcctggttcttcattgagtcggcccgctggcactcctcctccgggaggctggacctcaccctgagggccctgcagagagtcgcccggatcaatgggaagcgggaagaaggagccaaattgagtatggaggtactccgggccagtctgcagaaggagctgaccatgggcaaaggccaggcatcggccatggagctgctgcgctgccccaccctccgccacctcttcctctgcctctccatgctgtggtttgccactagctttgcatactatgggctggtcatggacctgcagggctttggagtcagcatctacctaatccaggtgatctttggtgctgtggacctgcctgccaagcttgtgggcttccttgtcatcaactccctgggtcgccggcctgcccagatggctgcactgctgctggcaggcatctgcatcctgctcaatggggtgataccccaggaccagtccattgtccgaacctctcttgctgtgctggggaagggttgtctggctgcctccttcaactgcatcttcctgtatactggggaactgtatcccacaatgatccggcagacaggcatgggaatgggcagcaccatggcccgagtgggcagcatcgtgagcccactggtgagcatgactgccgagctctacccctccatgcctctcttcatctacggtgctgttcctgtggccgccagcgctgtcactgtcctcctgccagagaccctgggccagccactgccagacacggtgcaggacctggagagcaggtgggcccccactcagaaagaagcagggatatatcccaggaaagggaaacagacgcgacagcaacaagagcaccagaagtatatggtcccactgcaggcctcagcacaagagaagaatggactctgaggactgagaaggggccttacagaaccctaaagggagggaaggtcctacaggtctccggccacccacacaaggaggaggaagaggaaatggtgacccaagtgtgggggttgtggttcaggaaagcatcttcccaggggtccacctccctttataaaccccaccagaaccacatcattaaaaggtttgactgcg

SEQ ID NO: 155290 - DNA, 2871 bp, Homo sapiens
tcacagagtcagaatggatttccagaaaccagcctcactcttggtgatgctggcacagatgcgtatgtcattacctttgccagaaagagccttacactcatagggtttctcaccagtgtgaattctctgatgttcagtaaggtgtgaattaagtctaaaggccttcccacattgtttacactcatagggtttctcaccagtatgaattctttgatgtattctaaggtctacactacgactaaaggccttcccacattctttacatttgtatggttttacacccgtatgaattttctgatgttcagtgaactgcccacgccgactaaaggacttcccacattctttacagtcatagggttttaaaccagaatgaattttcagatgttctttaagattccctctacgaataaaggcctttccacattctttacatttatagggcttttcaccagtgtgaattctctggtgttcagtaaggtagaaaccaaatctaaaggtcttcccacatcgtacacatttgtagggcttcacatcagtatgaattttcttatgtagaattcgtaagggtttcacaccagtatgaagtctctgatgttcagtaaggagtgccagcagcgtttcaacaggcaccggacgcgggcggtcggtgccgtcaatggcgataatgtccgcgcccgcctgcgccagcgcatcaacatcttcaatataggccgtgatgcgtaccggagaatcctccagatcgcgtttcacaattccaataatcggcacgctcaccaccgcacgcgtggcttgcagatttgccacaccttcaatgcgaatggcaaccgcgcccgcctgttctgccgctaatgccatggcggcgacgatttcgggtttatcgagcgggctgtccggaaccggtaaatcgtttttggcgctgccaaacggcacggcaccgctgaatggtttaccgtcgatagcgtcatgagtacgcaacgcttccgggcgcaaccaacgctgaacgcgagaaggcatatccagcccaatcagcaggatcaccacgaacgtcagactgaacgagagcgatgccagcgcagtacccagatccagacgttgagcgatcaacgcgccgatgattggggccagtgcaccgcccaatgcgccaacgttgtaggtaaagcccaggcccgctgcacgcttgccgggacgctcggcgatcagccagtccacatccacctcggccagctcctcgcgctgtggcgctccttggtagccggcatcggctgagacaaattgcttctctccatgaagcagattacccagctgattgaggtcatgctcgttggccgcggtggtgaccaggctgtgggtcaggccactcttggcatcgacaccaatgtgggccttcatgccaaagtgccactgattgcctttcttggtctgatgcatctccggatcgcgttgctgctctttgttcttggtagagctgggtgcctcaatgatggtggcatccaccaaagtgccttgggtcatcatgacgcctgcttcggccagccagcgattgatggtcttgaacaattgacgggccagttgatgctgctcgagcaggtggcggaaattcatgatggtggtgcgatccggcagggcgctatccagggataatcgggcaaacaggcgcatggaggcgatttcgtacagggcatcttccatggcaccgtcgctcaggttgtaccaatgctgcatgcagtgaatacgcagcatggtctccagcggatagggccgtcggccattgcccgccttgggataaaacggctcgatgacagcggtcatattctgccatggcagaatctgctccatgcgggagaggaaaatctcttttcgggtctgacggcgcttagtgctgaattcactatcggcgaaggtgagttgatggctcatgatgtccctctgggatgcgctccggatgatttgatgatctctatcagactggtcgcccaaatgtaacccgagatccgggaccattgaacgcgactccaaaaccttcgatttgctgtcatctcgttgccgatcaacagaagctgcgaaggacgcgcccagcactggggtctgcggtggtctgggctttagagctataagctcgaagctccgaatttctcgtatagtcacttggtcattatgcctcgtgtcgcttggatagtagataattcgctgatcacgatcatcaaatatcacacaatttcccgatagctgaacggtaaacgcgcatctgccagcgcggagcatcgggtgttttgccgcttgttctgccaccagcgcgctaagcgtggtttctggaatctcaacctgagtggcgttgagctgcgccagctgcgcatactcacctggcagcataatatcgacatcgccgcacaacagcgccggatccgcggcgaactgggcaatcagcattttcaggcgttcagcatgctggattaacgttggctcatcgtaacgctgtttattggcgaggatctcaatactcaaatcaccgtgtacatccgggaacagggccagttcaaggtcattaaccggaccggttgccagggtatgggtttgcgcctgaacatcaggaatatccagttggtaatcaaataccttgatattgagtaccggaccaaacagcggttcatcacctgccgctcgcccgctgtcacggacaatttgttcggcatcgtaacgttgatgacgacgcatttttttcagttgtgctgccagtcgggttgccagttccggcagcgtttcttgcgccgcaatgtgaatacccaacggcaaaacgttgagcacgggtccggtagccgtcagcgccgccgagcccagtcgacgcataaagataaatccggcggcgtagtccat

SEQ ID NO: 155291 - DNA, 4311 bp, Homo sapiens
atgcagtattggggaaaaatcattggcgtggccgtggccttactgatgggcggcggcttttggggcgtagtgttaggcctgttaattggccatatgtttgataaagcccgtagccgtaaaatggcgtggttcgccaaccagcgtgagcgtcaggcgctgttttttgccaccacttttgaagtgatggggcatttaaccaaatccaaaggtcgcgtcacggaggctgatattcatatcgccagccagttgatggaccgaatgaatcttcatggcgcttcccgtactgcggcgcaaaatgcgttccgggtgggaaaatcagacaattacccgctgcgcgaaaagatgcgccagtttcgcagtgtctgctttggtcgttttgacttaattcgtatgtttctggagatccagattcaggcggcgtttgctgatggttcactgcacccgaatgaacgggcggtgctgtatgtcattgcagaagaattagggatctcccgcgctcagtttgaccagtttttgcgcatgatgcagggcggtgcacagtttggcggcggttatcagcagcaaactggcggtgctgcgtggccgctctccatccttgttattgacaaattaatatatcgtcgcccttgctgtggaacactgcagccagatgtgattattacaccggttctgccggtggcctgcattagcacctggcgccatactgaggcagatcccaaagaaacagcaaagggttggcctccactactctccgatgtcctatgtgtcttggagataccgcgtctgccactggacgataacggtattctgtttatcgaaaacgttggcaacctcgtatgcccggccagcttcgatctcggtgaaaaacacaaagtggcggtgctttccgttaccgaaggtgaagacaaaccactgaaatatccgcatatgtttgccgccgcctcgctgatgctgctcaacaaagttgacctgttgccgtatctcaactttgacgttgaaaagtgcatcgcctgcgcccgcgaacggcgaagggatggaccagtggctgaactggctggagacacagcgatgtgcataggcgttcccggccagatccgcaccattgacggcaaccaggcgaaagtcgacgtctgcggcattcagcgcgatgtcgatttaacgttagtcggcagctgcgatgaaaacggtcagccgcgcgtgggccagtgggtactggtacacgttggctttgccatgagcgtaattaatgaagccgaagcacgcgacactctcgacgccttacaaaacatgtttgacgttgagccggatgtcggcgcgctgttcgccctggcgcagacccgcgagcaaggctacgccctggacagcgaagagaacgagcagggcgtgcgctgcgtggcggtgccggtgtggaaccacgagtcccgcgtcatcgacgacctgagcctgtcgacgctgacctcccgcgctggtaatggccggcgaccttatccgctggaaaccatgctacgcattcactgcatgcagcattggtacaacctgagcgatggcgcgatggaagatgctctgtacgaaatcgcctccatgcgtctgtttgcccggttatccctggatagcgccttgccggaccgcaccaccatcatgaatttccgccacctgctggagcagcatcaactggcccgccaattgttcaagaccatcaatcgctggctggccgaagcaggcgtcatgatgactcaaggcaccttggtcgatgccaccatcattgaggcacccagctcgaccaagaacaaagagcagcaacgcgatccggagatgcatcagaccaagaaaggcaatcagtggcactttggcatgaaggcccacattggtgtcgatgccaagagtggcctgacccacagcctggtcaccaccgcggccaacgagcatgacctcaatcagctgggtaatctgctgcatggagaggagcaatttgtctcagccgatgccggctaccaaggggcgccacagcgcgaggagctggccgaggtggatgtggactggctgatcgccgagcgccccggcaaggtaagaaccttgaaacagcatccacgcaagaacaaaacgggcatcaacatcgaatacatgaaagccagcatccgggcccaggtggagcacccatttcgcatcatcaagcgacagttcggcttcgtgaaagccagattcaaggggttggggagaaaaaatcggctcaaacatgaagaaatgaaatgactgagtcagccgagaagaatttccccgcttattcgcaccttccctaattgatgctgttcctgtgctgcccggattgtcatttttgccactggctaacgccaggtcgagattgttactacctgaaaatgcatcgctggcgatcagatttaatgaaccattcgggccaaatccaaatccgttgttggaaatattagcggtattcaactgaacacgaatatgagcgtcctgatcgcattgcattaccagcgtgattgttctgtctgctaattgtgttgttttaccccggacaacttggcgcatggcagcacttcgtttgccatagtcgatattttgtatgctactggagatattacactctgccagacgaacgcgatccccggcgtggcatttgagggcatccagttgtgcggcggttaaaatcaaacgctcggttgccggatcggtacgcaccagcaccacgcggaaatggtgataattttcattggcgaccaggcaggctgggaaatcgccctgcgcaggctgcccttctgccacttccaccagccgacttttacggatggcgcgcacgcggtcgatgtcacactcaagcgtcggcccaccgtcaaagatgtcgatatagttacggtagcgaaaaccttctttctccagcaccgcgcgggcaggcgcggtttgcggatgtacctgaccgatgacgtcctgggcttcctgggataaaaagtgggtatagatcggatgtttcggcatcagttctgcaataaatgccttttgcccggtgccgcagagaaaatcggcgcggctaaaatccatcgaaaagaagcgtttaccgaggctttgccagaacggtgaatagccgtgttcgtcaatcaccccgcgcatttcagcaaccactttgtcattaaacttgtcgcgaaaagccgccataaacataaagcgcgatttcgacagcaaatagccgttgccctctttgcgccagtccgggtcgagaaacagcgtgcacagctcgctgctgccggtgtgatcgttatggaatttgttcgtctgttccgtcgtaagaacaaactgcaacgtgaaattcaggacgttgagaaaaagatccgtgacaaccagaagcgcgtcctgctgctggacaacctgagcgattacatcaagccggggatgagcgttgaagcaatccagggcatcatcgccagcatgaaaggtgactatgaagatcgcgttgacgattacatcatcaaaaatgccgagctctccaaagaacgccgcgatatctccaaaaagctgaaagacgttgtgcgctccagcttcccgtaaccaacttttcaccaaagatatttgttccatgctggctaaatctgctttggttactactccaatgaccgggtgattcatggcccggtagggcgtttttacctctaattcctgcttcagcgctgagattcctgccgtctgaacggtatcgatccggaagcgtatctgcgccatattctgagcatactgccggaatggccctccaaccgtgttgacgaactccttctcaatacctttacggaacttcgccccttctttcaggttgcgtaggccatacttcacaaacgcctgcatatagcccatttttttgccgcagtcgtaactgtcgccggtcatcagcattgcatcaacggattgttttttcgccagctcggcaatagcatcagtcagctgaatacgtccccatgcaccatgctgagtacgttccagttccggccaaatatcggcagaaagcacatagcgacctacggccatgatgtctgagtccagcgtctgcggctgatccggtttttcgataaattcaacaatgcggctgactttaccctcacggtccagcggctctttagtctggctgcggcccgtttcgttgaaacgtgcaatcatggcagcaaggttgtaacgtagcgggtcggcgctggcatcgtcgatcacaacgtctggcagtaccacgacaaatgggttgtcaccaatggcaggtcgcgcacacaaaatggagtggcctaaacctaaaggttcgccctgacgcacgttcat

SEQ ID NO: 155292 - DNA, 3252 bp, Homo sapiens
tcacaagcatgtgttgatatccttccatatgccagatgcggtgatgggagccatatacacaaagatgaaggactggctacagctttcacagaccttacaaccagggccagcccaatccgcccgattctcggtccctatactgcctccttttcccatgcgcatcgcaagggatcggttgatggggccctcagtatgacttcgcctcctttctccatccgaggccggggtcctaaagtcggtgtcacggtggcagcacccagcgttttgttggctctttcgccagcagcgccgagcggggggttttctgtcacagcacttgttgcaccgaatttctcggtcgcagaacctctcttttccgagggtcgacattttctgcgtgacaacaccgttggttccgccaaaatggatgttgtccttgggaactcctccggctggcgtcactcttagggtcccagcaccgccatttcgccaagccgagttctcttggtcgcggcacatcttgttcctcggtgcctccattttctcggtggcggcagcgctctggtagccgatccagcggcaaactttagtttttggtgcagttaaggtattgccactaagaaatcgtcgtctctgagaaatatcgaggcttggaaggttgtacagtgcttccaccgagaaagcacttttgggggtactcatttgtttttcatctttttcctttccatggacagcttttgattgtcttccatctgtaagggcacatggggctttttgggcctttgtgatggccagatgagaagctggaagaccccaataggcaaggccagtgaccaatgtgcatgcacagagaggcaactggaggctgaggagcttcctttgtcctgctgctgtggcctgttctccagggtggaggggtaggtccatgggggatgtggaccagagcccctccccggtttcggcactagatgtaaggttcttgtgttggttcaaaccctgtgggtatttcttgcaaggtggagacgagacattcatttcattcttttgatcttcaatcactgatacgctttcttccacttgatcaaatcggctactgaagcttgtgcatgcatcacgtagtacttgtgccatggttttcagctccatcaggtcatttaaggtcttctctatgctgtttattccagttagccattcgtctaatcttttttcaaggtttttagcttctttgcgatgagtttgaacatcctcctttagctcggagaagtttgttattaccgatcttctgaagcctacttctgtcacctcgtcaaagttattctctgtccagctttgttccgttgatggcgaggagctgtgattctttggtctttgatgatggtaacctacagatggggttggtgtggatgtcctttttgttggtgttgatactattcctttctgtttgttagttttcctcctaacagtcagaaccctcagctgcaggtctgttggagtttgctggaggtccactccagaccttatttgcctgacttcaagggctttgatagcttctagcatttgtagaaactctgctgctttccatacatcattggcttcttcttctccttgtatcattaattttgctgtatatgtgaactcaattaaatggcgaaaggccattttactaacacctgggtttgggcattgtctagaccagtggccttcattgccatacttgaaacatgcgccaggtggaggtggattgctaggaggcttctgtgtggagctgcggccctgtgggcctgcagggccccggatggcggagtcaagcatttgaaactctgcatgtttttgccttttattttcctcatcacgattgttaaagactttgaaggctaaattaagaaggtctcgttgtgggttttgagagccatcatcaagcttctgtagcttacgccgaatatcggggtggattgggacatgaactaaaggtttaaaatagtggttccttctgggctggttgggttggacagctgtgatttgggactgctttccagcccttgctggcggctgcccggagtctactggcaaaacggactctctcctggagtccagagcaccttggaaccaagtacagcgaagcccactgagttcagttggccggggacacagaagcagcaagaggcacccgtagaagaggtggggcaggcagaggaacccgacagactcaggctccagcagcttccctggagcagtcctctccatccgtatcatttggtccgcccgaaacaggttggccagcgtgaataacatcgccagttggttatcgtttttcagcaaccccttgtatctggctttcacgaagccgaactgtcgcttgatgatgcgaaatgggtgctccaccctggcccggatgctggctttcatgtattcgatgttgatggccgttttgttcttgcgtggatgctgtttcaaggttcttaccttgccggggcgctcggcgatcagccagtccacatccacctcggccagctcctcgcgctgtggcgccccttggtagccggcatcggctgagacaaattgctcctctccatgcagcagattacccagctgattgaggtcatgctcgttggccgcggtggtgaccaggctgtgggtcaggccactcttggcatcgacaccaatgtgggccttcatgccaaagtgccactgattgcctttcttggtctgatgcatctccggatcgcgttgctgctctttgttcttggtagagctgggtgcctcaatgatggtggcatccaaggagcgccacagcgcgaggagctggccgaggtggatgtggactggctgatcgccgagcgtccaggcaaggtaaaaaccttgaagcagaatccgcgcaagaacaaaacggccatcaacatcgaatacatgaaagccagcatccgtgccagggtggagcacccgtttcgcatcatcaagcggcagttcggcttcgtgaaagccagatacaaggggctgcgccacaaacgcaggtacagggacagccgacaccgagaaccaagggaagcggctgagagctgcgcctccacggaataactgccagccggcacagtgcgagtgagaaaccggccactccatgaaacgaccagtactgccacggaaaagaatccgacgtcgccaacaagcggtgctaccaggagaaacgctttcagtgaagcgcttggttgaatgatctgccaggaaaaacttagatggtagatgttggtcttttccattgtggaaactggtggtcat

SEQ ID NO: 155293 - DNA, 4446 bp, Homo sapiens
ttatttcaacccggcatttttattagagaatggcacatccgttgctgatttatcgaccagtgaaccaaagccggtgccggtttcgcctttatgggcaatatccccgaaactaacttcgcctttcttgccgcgcacgacgcccggcgttgccagttgaacatctgccactggctcacccaacatttgcgcgccgtggaacagaattttctcccgtagattttccgctgccaaacgcgccgcgttacccgagaagcaagtaccggacgaggcatatgcgcctttatcaaacaacgcatgatcggtatcaccggagataacatgcacgtcctgcggtgggcagtgcagcacttctgctgccagtttcgtcactacagtatccagaccagtaccaatatccgcaccgccagaatgaacgataaaggtgccgtccgattccagtttgatcatgcagttagcctgatcgatatccgggatacccgatttctgcatgataatggcgacgccgcgaccgatgtgccagtcaccattttgcggtttcggtgacgaccattggatcatctcgcgaccctgacgcaggatctcttccagtgcacagctggcggcggaaggaacggaggtcggcgctttaccttcaccgatcttctcgatcgcatcgccgcacctacccgcgaagagatcgacgacgcgctttctggtttgttcagccgcgatgctggctggcagcaatactatcaggtcattgaactggcggttgcacgtaaaatatccgcagccaccagttgggtacttctcaattaacactgcgttgcgttcaaaatcaccgctgccgccgatgccgttcatcagatcgaccccggctacgtgtgttgagttggcatgcccgtaaatatcaaactccaggccgatgttcagagcgatgacgcccagacgacggatgatttccgggttattggaaatctccgcaggggttggcgcactgccgccgtcgctgctggtcaggcgaatggtatccagcgccgcgaggcctggggtattttcggtgttgtgctccagcaccacgcgatactggttggcctgagtataaatagtggaaatcagccgctgaccaaacgcgttgtacagggcgttatcgacatccgccatgctgatccccagacggctggcgctgtcgcgatcaacattgacatacgccaccagccctttgtcctgccagtcgctggagacatcagaaagctgtggcagttgctggagtttttccatcaactgtggcacccaggtactgagcgcatccagtgacgtggcctgcaaggtaaactggtactgggtgcggctgacctgagtatcaatagtcagatccatcttatcggcgtcgcacctatccggtacgtggacgtggatgtcacagtttttcgtaaaaatcaggatatgatccccagtaatttccgcacgcgcacgaaccaccgttaacgccgcctgaatggactcctgcatcacttcgccgagcgaaccggtataggtcagtttgcctttacccggaacacatgcggtttcaatggtcagcaagtcaccgcccacttccgtccacgccagaccggttacctgaccgacacggttttcgttatccgcgcgaccatagtcgaaacggcccggcagttcggttgggatcgccaggttaaacatcggcagagtgaaggtttctgcagtatccagcgaaccgttgaggatggcgtcgataatggcgcgggtatctttaatcgagatacgtttgccagtgccgttccagccagtgttaaccagataagcctgcgcgcccgccgcctgcatacgtttcaccagcacttctgcgtaaaagtgttcccggaaatggcgacgatgccgattgcgctggttattctgattgtctgtgccattggtgcggtgatcggtttgatcaacggtctgattatcgcttatctcaacgtgacgccgttcattaccacgctcggcacgatgatcatcgtctatggcatcaactcgctctattacgactttgtcggggcgtcgccaatttctttgctcagggctttgtcgcactgggcggcgaatcagggttgggatctgaacaaagacggtcagattcagttcgtactgctgaaaggtgaaccgggccatccggatgcagaagcacgtaccacttacgtgattaaagaattgaacgataaaggcccgcaagcggcggcctggcgcattactgtgcgccagttcgtccattaagatcagcgccgggcggcgggcgagggcggcatcgagatcaaactcgctgatatgccgcccacggtacgcctggcgttttaacggcagaacagccagcccttccagcatggcggcggtatcttttcgcccgtgggtttctaccacgccaaccacaatatccagcccttgcgcccgcagtcgctgggcttctgccagcatcgcccaggtcttcccacgcctgcacagcaccgaagaaactttcaggtccgactttttcccattacgccatgaggctgtaaatctgaggtcatcgatcacttcgagcattacgagaagaagacaggaaaatgtgggcaaaaacgcagacctgagcatgctgcagagaggatgtgcgagaatggagagcgtggtgctgggatcttcacagggtggcagaaactcggctgcagctcctcctgcaatgatgctggagatgtggtgtgatgtgatgcgggaagcagcatcacaggtgacttccgagatgttaaaggcgccacatggttcctcctgctgcttctggtcaaatgccagaggagagcgcaaaacagagccaggatttaaagcattgtcagaaaacgtcactgatattgtgctttctgatgccaacgtgcgtttagttgtcctctcggcttctgctggtatcactaatctgctggtcgctttagctgaaggactggaacctggcgagcgattcgaaaaactcgacgctatccgcaacatttccgggattttcgcccagacatacatcgaagccttcggcatttcaaccatccagcccgcttcatgcagccctttcttcagtgcaccgacaatgccgcgcagattatttctgccgatcatcgctttgttagagcgcatgcgcccacgggtctgcacccattccatcagctgattattatgtggacgataggtagccatcattggttggcacagtcccatcacgcggccgcccagttccagcgacataaaatggacgccgacaaccattacgccgcgattttgcatttgtgcgcgtttaaggttatccaacccttcaacatcaaaccatttacgtacgcgactgtcgggccagaaccatgccatgccggtttctaccagcgccatgccgagtgaacgaaagttttcggcaatcatcttctcgcgttcttccgcagaatgcaaggtgccttgagtcatcatgacgcctgcttcggccagccagcgattgatggtcttgaacaattggcgggccagttgatgctgctccagcaggtggcggaaattcatgatggtggtgcggtccggcaaggcgctatccagggataaccgggcaaacagacgcatggaggcgatttcgtacagagcatcttccatcgcgccatcgctcaggttgtaccaatgctgcatgcagtgaatgcgtagcatggtttccagcggataaggtcgccggccattaccagccttggggtaaaacggctcgatgacttccaccatgttttgccatggcagaatctgctccatgcgggacaagaaaatctcttttctggtctgacggcgcttactgctgaattcaccctgagtattatcgaggctgacttccgcatttgggctaatgctggttaacgcattgtagcgtgcattaagcccctcgatagccagcgttccccctgtaacattcaggtttccgccacctgtcagttcaccctgactgatcccacctttatttaccgtcagcgccccctctttgaacaaaacagtcgaacccatctgcccggtgaatgtctctaccgtctgcgtcgatccattaagatcgacgatggccgcgttgctgatgttcagttcccgggtgttgccaagtgcaccatccgcatcggtacgtaatgtccccatctgaacgtaggttgccccctgatagtcgttctgaccgttggaaagcgaaacctgtcgcaccgtattgattgccagatccccttcaccaccgatttttgccgacatatcggccgttgcgccataggctccgccatgttcggctaacgtcagcttttgcccaccatggatgttcagcgctttcagcccatagttaacgtacaaaccattacctggtgcggtcgtgaggcggaatccataatcaccctcggcgaccaccgttccgttttgcgcaatgtgtaacgttttgtccgcttccacctcgtcgcc

SEQ ID NO: 155294 - DNA, 2802 bp, Homo sapiens; identical to SEQ ID NO: 140208

SEQ ID NO: 155295 - DNA, 4989 bp, Homo sapiens
atgtttggtggtgatctcacccgtcgttatgggcaaaaggtgcataagctgacgctgcacggcggttttagctgccctaaccgtgacggtaccatcgggcgtggtggctgcacattctgtaatgttgcctcgtttgccgatgaagcgcagcagcatcgttccattgccgagcaactggcgcaccaggcgaatttagttaaccgcgctaaacgctatctggcctactttcaggcgtataccagcacctttgcggaagttcaggtgctgcgttctatgtatcagcaggcggtgagccaggccaatattgtcggtttgtgtgtgggtacccgcccggactgcgtgccggatgcggtgctggatctgctttgcgaatataaggaccagggttacgaagtgtggctggagctggggctacaaaccgcccacgacaaaacactgcatcgcatcaaccgcggccatgattttgcctacagtgatattactgaattcagcagtaagcgccgtcagaccagaaaagagattttcttgtcccgcatggagcagattctgccatggcaaaacatggtggaagtcatcgagccgttttaccccaaggctggtaatggccggcgaccttatccgctggaaaccatgctacgcattcactgcatgcagcattggtacaacctgagcgatggcgcgatggaagatgctctgtacgaaatcgcctccatgcgtctgtttgcccggttatccctggatagcgccttgccggaccgcaccaccatcatgaatttccgccacctgctggagcagcatcaactggcccgccaattgttcaagaccatcaatcgctggctggccgaagcaggcgtcatgatgactcaaggcaccttggtcgatgccaccatcattgaggcacccagctcgaccaagaacaaagagcagcaacgcgatccggagatgcatcagaccaagaaaggcaatcagtggcactttggcatgaaggcccacattggtgtcgatgccaagagtggcctgacccacagcctggtcaccaccgcggccaacgagcatgacctcaatcagctgggtaatctgctgcatggagaggagcaatttgtctcagccgatgccggctaccaaggggcgccacagcgcgaggagctgtccgaggtggatgtggactggctgatcgccgagcgccccggcaaggtaagaaccttgaaacagcatccacgcaagaacaaaacggccatcaacatcgaatacatgaaagccagcatccgggccagggtggagcacccatttcgcatcatcaagcgacagttcggcttcgtgaaagccagatacaaggggttgctgaaaaacgataaccaactggcgatgttattcacgctggccaacctgtttcgggcggaccaaatgatacgactggcacaggcagatgacgccgccccggcagcgggcagtactctggacaaaatcgccaaaaacggtgtgattgtcgtcggtcaccgtgaatcttcagtgcctttctcttattacgacaatcagcaaaaagtggtgggttactcgcaggattactccaacgccattgttgaagcagtgaaaaagaaactcaacaaaccggacttgcaggaccaagaagacaacacagatgacagaccgatcatgagagagacgagacgaccagagcgagacacgacaagaagaagaagaaaggtagagggccattttggtgtgtcggtctccgagttttctcgggaggttgttccagggcccaaggaagttcatgcaaaaaaagggtggtttcggtgttggacccgagggccttctcagtactgcgctgtcctaaaaaaagtaatagggggcaacaaacttccacaagaggagaggcgcaacaaagagggaacaacctgcgcggtgctgacgccgcttattcagacgctgcgtgacattcccggcgtgaaagcgctgcgtgatgccacccgtggtggtgtaaacgcggtggttcatgagttcgcggcagcctgcggttgtggtattgaactttcagaagcggcactgcctgttaaacctgccgtgcgtggcgtttgcgaattgctgggactggacgccctgaactttgccaacgaaggcaaactagtaatagctgttgaacgcaacgcggcagagcaagtgctggcagcgttacattcccatccactggggaaagacgcggcgctgattggtgaagtggtggaacgtaaaggtgttcgtcttgccggtctgtatggcgtgaaacgaaccctcgatttaccacacgccgaaccgcttccgctcaatgaccttttgcaccgctttgcggtgctttcctggaagaacaaaatgtcatatacaccgatgagtgatctcggacaacaagggttgttcgacatcactcggacactattgcagcagcccgatctggcctcgctgtgtgaggctctttcgcaactggtaaagcgttctgcgctcgccgacaacgcggctattgtgttgtggcaagcgcagactcaacgtgcgtcttattacgcgtcgcgtgaaaaagacacccccattaaatatgaagacgaaactgttctggcacacggtccggtacgcagcattttgtcgcgccctgatacgctgcattgcagttacgaagaattttgtgaaacctggccgcagctggacgcaggtgggctatacccaaaatttggtcactattgcctgatgccactggcggcggaagggcatatttttggtggctgtgaatttattcgttatgacgatcgcccctggagcgaaaaagagttcaatcgtctgcaaacatttacgcagatcgtttctgtcgtcaccgaacaaatccagagccgcgtcgttaacaatgtcgactatgagttgttatgccgggaacgcgataacttccgcatgcgggttaccgggtgcttttgtctcacagctctcaagattctttccttcatcgtaacattaaatagcctgatgacaatgtgcctaggcgatgatctttttgcaatgaatttcccaggaaagaatgatacagagagacagaaagagagagagagagagactgaaaggcagacagatggaaaacatgcactcatggtggaagccagagtccttgctaacctaatttcagaagtggcataccatgctcccatgagattgtggtgtagcaaggccctctatgatccaccttcaggcagaaatgcaggcatttggagcacctacttgcctgaaccagcatccatctgccaggtgacttcgttagatattccaaccgtaagcgtgcgcaaatcccactggggaaatgcgctaacggcgacgctgcaaacagaaaaacgcccgctatgcctttccctggcgcgtcaggcgggagcagcgaaaaacgccacgttgccctctggaatgcaacaactgaacattgtcccgggtgcgcttccggactggctggttagcacagaggatctgaaaaatgttacccgcgacccattagctgaggccagacgggtgctggtggtggggcagggcggagagccagataaccaggaaatcgctatgctggcagaaaagctgggagccgaagtgggctacagtcgggcgcgagtgatgaacggtggcgttgatgctgaaaaagtgattggtatttccggacatctgctggcacctgagtttcatcggaccaaaaccgtcgattttgcaatcgatgttatggtcgccttcaaccaggcggatgtttttcactttggtgccaattttcagcatcgaagagctacctttcaccttcagatctttaatgatggtaacgctgtcgccgtcagccagcagattgccgttagcatctttaacgatcagctcgtcgctttcctgtgcaggttctgcgtcgttccattcgtaggcacattccgggcagatgtacatgccgttatcttcgtgtattcggagttgcattttgggcagtgtggtaatgacatgtggatttcctcaaaagtcagcagggcaaaagcgccaaaaaacggcagattgccgaaaaaggccgcaattatacacaaaatccctgagtttgtcggggtgaaggcaattctggccaaaggctacgacccggtgaaatggcggaagaaagataaggtgctggacgcagtattgaaagagctggaaagcggtaaatacagcgacggcgataagcatgccttcgaccagatgctgcacagtatcggcaaacagggcggcgatccgtatctggtgatggcggatttcgcagcctatgtagaggcacaaaagcaggtggatgtgctgtaccgcgaccaggaggcctggactcgcgcggcgatcctcaataccgcccgctgcggaagctcgatggaaagcaaacgtctggataatgccgcgctggcggcggggattagccccaattacatcaatgcccacggtaaaccgcagtcgattagcgccgaaaccaaacggcgtttgcttgacgcgatgcatcaacgtaccgccacgaaagtggcggtaacgccagtcccgaatgtcatggtttataccagcggcaaaaaaatgccgatggtggtggagggcagcggcgaatatagctggctgctgaccaccgaagaaggaacgcagtacaaaggccatgtaacggggggcaaagcgttcaatctaccgacgaagctgccggaaggttatcacacgctgacactcacccaggacgaccagcgcgcgcattgccgggtgattgtcgccccgaaacgctgttacgaaccgcaggcgttgctgaataaaccaaagctgtggggtgcctgcgttcagctttatacgctgcgatcggaaaaaaactggggtattggggattttggcgatctcaaagcgatgctggtggatgtggcaaaacgtggcgggtcgttcattggcctgaacccgattcatgcgctctatccggcaatccggagagcgccagcccatacagcccgtcttctcgccgttggctga

SEQ ID NO: 155296 - DNA, 2325 bp, Homo sapiens
atgaaccttatggaacaacccgccaaagaccagtacctatcaactcaagggttacctgtgttagtcaactcacttgcacgctatccacaagaagccttgcccatcacgaattacttcgcagcgagtgagctggctcctgccgtcgcccgtgccttcaacaaactgaaaacgctacgcgaaaacgcccgtagctggctgttgaaatacccggaacatgcccttaccggcctgctgcctgcggcgctcggcaaagccggtgaagcacaggataacgcccgcgctgccttgcgtatgcttaccgaaaacggtcatcagccattactgcaagaaatcgcccgacgttataaccagccggaagtaaccgatgcggtgaacgctctgcttgcgctcgatcccttagataatcacccgacaaaaatccccactcttccggccttttatcagccatcgctctggacgcgcccggtattaaaagcaaatgcccaatcactgccagatagcgccctcctccacctcggtgaaatgctccgcttccctcaggaagaggctctgtatccgggattattgcaggtgaaagacgtctgttccgccgactcactggcgggatttgcctgggatctgtttaccgcctggcagaccgctggcgcgccgtcgaaagagagttgggcgttcactgctgaattcagcagtaagcgccgtcagaccagaaaagagattttcttgtcccgcatggagcagattctgccatggcaaaacatggtggaagtcatcgagccgttttaccccaaggctggtaatggccggcgaccttatccgctggaaaccatgctacgcattcactgcatgcagcattggtacaacctgagcgatggcgcgatggaagatgctctgtacgaaatcgcctccatgcgtctgtttgcccggttatccctggatagcgccttgccggaccgcaccaccatcatgaatttccgccacctgctggagcagcatcaactggcccgccaattgttcaagaccatcaatcgctggctggccgaagcaggcgtcatgatgactcaaggcaccttggtcgatgccaccatcattgaggcacccagctcgaccaagaacaaagagcagcaacgcgatccggagatgcatcagaccaagaaaggcaatcagtggcactttggcatgaaggcccacattggtgtcgatgccaagagtggcctgacccacagcctggtcaccaccgcggccaacgagcatgacctcaatcagctgggtaatctgcttcatggagagaagcaatttgtctcagcgatgccggctaccaaggagccacagcgcgaggagctggccgaggtggatgtggacctgctgatcgccgagcgtcccggcaaggtaaaaaccttgaagcagaatccgcgcaagaacaaaacggccatcaacatcgaatacatgaaagccagcatccgtgccagggtggagcacccgtttcgcatcatcaagcggcagttcggcttcgtgaaagccagatacaaggggctgctgaaaaacgataaccaactggcgatgttattcaccctggccaacctgtttcgggtggaccaaatgatacagctgccaacgtatgagttatcgtcgggtataggcgctgttcgcagacaggcagaacttgatggtacgcctgcgatcaattccaaacgtgtttaccggatcatgcgccagaatgcgctgttgcttgagcgaaaacctgctgtaccgccatcgaaacgggcacatacaggcagagtggccgtgaaagaaagcaatcagcgatggtgctctgacgggttcgagttctgctgtgataacggagagagactgcgtgtcacgttcgcgctggactgctgtgatcgtgaggcactgcactgggcggtcactaccggcggcttcaacagtgaaacagtacaggacgtcatgctgggagcggtggaacgccgcttcggcaacgatcttccgtcgtctccagtggagtggctgacggataatggttcatgctaccgggctaatgaaacacgccagttcgcccggatgttgggacttgaaccgaagaacacggcggtgcggagtccggagagtaacggaatagcagagagcttcgtgaaaacgataaagcgtgactacatcagtatcatgcccaaaccagacgggttaacggcagcaaagaaccttgcagaggcgttcgagcattataacgaatggcatccgcatagtgcgctgggttatcgctcgccacgggaatatctgcggcagcgggcttgtaatgggttaagtgataacagatgtctggaaatatag

SEQ ID NO: 155297 - DNA, 1741 bp, Homo sapiens
cctcccttaacccttgcagcagtgcttcttggtacctctgtaggtgctgaaactgggttacatcatttgggtcccagttagggtctgcttctgggaactggccccgagcgtaagcctgaacaaaaaatgtgccttctggtgcattggcttttaaccagtggagggctgcctgggttaccctccggcactcctcggtgttaaacagtgtcagtagttgctgtttgcagtgtatcatttggtccgcccgaaacaggttggccagcgtgaataacatcgccagttggttatcgtttttcagcaaccccttgtatctggctttcacgaagccgaactgtcgcttgatgatgcgaaatgggtgctccaccctggcccggatgctggctttcatgtattcgatgttgatggccgttttgttcttgcgtggatgctgtttcaaggttcttaccttgccggggcgctcggcgatcagccagtccacatccacctcggccagctcctcgcgctgtggcgccccttggtagccggcatcggctgagacaaattgctcctctccatgcagcagattacccagctgattgaggtcatgctcgttggccgcggtggtgaccaggctgtgggtcaggccactcttggcatcgacaccaatgtgggccttcatgccaaagtgccactgattgcctttcttggtctgatgcatctccggatcgcgttgctgctctttgttcttggtcgagctgggtgcctcaatgatggtggcatcgaccaaggtgccttgagtcatcatgacgcctgcttcggccagccagcgattgatggtcttgaacaattggcgggccagttgatgctgctccagcaggtggcggaaattcatgatggtggtgcggtccggcaaggcgctatccagggataaccgggcaaacagacgcatggaggcgatttcgtacagagcatcttccatcgcgccatcgctcaggttgtaccaatgctgcatgcagtgaatgcgtagcatggtttccagcggataaggtcgccggccattaccagccttggggtaaaacggctcgatgacttccaccatgttttgccatggcagaatctgctccatgcgggacaagaaaatctcttttctggtcacgcctcccgtgaacaacgccgcgctgtccagggcatcggctcttttcagaggaattgtttgatggctaccctcaccactggcgtggttcttcttcgctggcaacttcttagtgccgtaatgatgtttctggccagcacactcaacatccgttttcgtcggtctgattatgtcgggcttgcggtgatcagcagcggtctgggcgttgtttccgcctgttggttcgcaatggggttgcttggcatcacaatggcggacatcaccgctatcccaaccgccctgcggctgaccaccaccgatattgccacctgccggagcgccaccaccctgacgaccacccagcatctgcatggtgccgccaacgttcaccacgacttctgtggtgtagcgatcctgaccggattgatcggtccatttacgggtacgcagctgaccttcgatataaacctgagaacctttacgcagatattcgctcgccacttctgccagtttgccgaacagcacaacgcggtgccattcagtctgttctttcatctcgccggtcgctttatcacgccaggattcggaagtagccagcgtaatgttggcaactgggccaccatttggcat

SEQ ID NO: 155298 - DNA, 2607 bp, Homo sapiens
ctatatttccagacatctgttatcacttaacccattacaagcccgctgccgcagatattcccgtggcgagcgataacccagcgcactatgcggatgccattcgttataatgctcgaacgcctctgcaaggttctttgctgccgttaacccgtctggtttgggcatgatactgatgtagtcacgctttatcgttttcacgaagctctctgctattccgttactctccggactccgcaccgccgtgttcttcggttcaagtcccaacatccgggcgaactggcgtgtttcattagcccggtagcatgaaccattatccgtcagccactccactggagacgacggaagatcgttgccgaagcggcgttccaccgctcccagcatgacgtcctgtactgtttcactgttgaagccgccggtagtgaccgcccagtgcagtgcctcacgatcacagcagtccagcgcgaacgtgacacgcagtctctctccgttatcacagcagaactcgaacccgtcagagcaccatcgctgattgctttctttcacggccactctgcctgtatgtgcccgtttcgatggcggtacagcaggttttcgctcaagcaacagcgcattctggcgcatgatccggtaaacacgtttggcattgatcgcaggcataccatcaagttctgcctgtctgcgaagcagcgcccatacccgacgataaccatacgttggcagctctccgataacatggtgtatacggagaagcacatccgtatcatcagtgtgacgactgcggcggccatccatccagtcatcggttcgtctgagaatgacgtgcaacaggtttatgccgtcgatgagcacgcgaatccgacaacgcttcaccacgttgatgagtttgtcatgcagctccaccgattttgagaacgacagcgacttccgtcccagccgtgccaggtgctgcctcagattcaggttatgccgctcaattcgctgcgtatatcgcttgctgattacgtgcagctttcccttcaggcgggattcatacagcggccagccatccgtcatccatatcaccacgtcaaagggtgacagcaggctcataagacgccccagcgtcgccatagtgcgttcaccgaatacgtgcgcaacaaccgtcttccggagactgtcatacgcgtaaaacagccagcgctggcgcgatttagccccgacatagccccactgttcgtccatttccgcgcagacgatgacgtcactgcccggcgggttgagaagcggtgtaagtgaactgcagttgccatgttttacggcagtgagagcagagatagcgctgatgtccggcggtgcttttgccgttacgcaccaccccgtcagtagctgaacaggagggacaggtatcatttggtccgcccgaaacaggttggccagcgtgaataacatcgccagttggttatcgtttttcagcaaccccttgtatctggctttcacgaagccgaactgtcgcttgatgatgcgaaatgggtgctccaccctggcccggatgctggctttcatgtattcgatgttgatggccgttttgttcttgcgtggatgctgtttcaaggttcttaccttgccggggcgctcggcgatcagccagtccacatccacctcggccagctcctcgcgctgtggcgccccttggtagccggcatcggctgagacaaattgctcctctccatgcagcagattacccagctgattgaggtcatgctcgttggccgcggtggtgaccaggctgtgggtcaggccactcttggcatcgacaccaatgtgggccttcatgccaaagtgccactgattgcctttcttggtctgatgcatctccggatcgcgttgctgctctttgttcttggtcgagctgggtgcctcaatgatggtggcatcgaccaaggtgccttgagtcatcatgacgcctgcttcggccagccagcgattgatggtcttgaacaattggcgggccagttgatgctgctccagcaggtggcggaaattcatgatggtggtgcgatccggcaaggcgctatccagggataaccgggcaaacagacgcatggaggcgatttcgtacagagcatcttccatcgcgccatcgctcaggttgtaccaatgctgcatgcagtgaatgcgtagcatggtttccagcggataaggtcgccggccattaccagccttgggataaaacggctcgatgacagcggtcatattctgccatggcagaatctgctccatgcgggagaggaaaatctcttttcgggtctgacggcgcttagtgctgaattcactatcggcgaaggtgagttgatggctcatgatgtccctcttcccaaggggaaaacgcacgacgtgctgaccggaagtgatgacggtcgccacagcaacacgtctctggcgtggggagctggcgtgcagtttaacccgaccgaatccgtggccattgatattgcttatgaaggccccggcagtggcgactggcgcactgacggtttcatcgtgggtgtcggttataagttcctcacagcgctcaaacctgacgccggatttcccattcttagcgcaaggaagaccccttgtggccat

SEQ ID NO: 155299 - DNA, 2111 bp, Homo sapiens
agctgagctgccctgacccccaaagtgaggagaagctgcaagggaaaagggagggacagatcagggagaccggggaagaaggaggagcagccaaggaggctgctgtccccccacagagcagctcggactcagctcccggagcaacccagctgcggaggcaacggcagtgctgctcctccagcgaaggacagcaggcaggcagacagacagaggtcctgggactggaaggcctcagcccccagccactgggctgggcctggcccaatggcctttaatgacctcctgcagcaggtggggggtgtcggccgcttccagcagatccaggtcaccctggtggtcctccccctgctcctgatggcttctcacaacaccctgcagaacttcactgctgccatccctacccaccactgccgcccgcctgccgatgccaacctcagcaagaacggggggctggaggtctggctgccccgggacaggcaggggcagcctgagtcctgcctccgcttcacctccccgcagtggggactgccctttctcaatggcacagaagccaatggcacaggggccacagagccctgcaccgatggctggatctatgacaacagcaccttcccatctaccatcgtgactgagtgggaccttgtgtgctctcacagggccctacgccagctggcccagtccttgtacatggtgggggtgctgctcggagccatggtgttcggctaccttgcagacaggctaggccgccggaaggtactcatcttgaactacctgcagacagctgtgtcagggacctgcgcagccttcgcacccaacttccccatctactgcgccttccggctcctctcgggcatggctctggctggcatctccctcaactgcatgacactgaatgtggagtggatgcccattcacacacgggcctgcgtgggcaccttgattggctatgtctacagcctgggccagttcctcctggctggtgtggcctacgctgtgccccactggcgccacctgcagctactggtctctgcgcctttttttgccttcttcatctactcctggttcttcattgagtcggcccgctggcactcctcctccgggaggctggacctcaccctgagggccctgcagagagtcgcccggatcaatgggaagcgggaagaaggagccaaattgagtatggaggtactccgggccagtctgcagaaggagctgaccatgggcaaaggccaggcatcggccatggagctgctgcgctgccccaccctccgccacctcttcctctgcctctccatgctgtggtttgccactagctttgcatactatgggctggtcatggacctgcagggctttggagtcagcatctacctaatccaggtgatctttggtgctgtggacctgcctgccaagcttgtgggcttccttgtcatcaactccctgggtcgccggcctgcccagatggctgcactgctgctggcaggcatctgcatcctgctcaatggggtgataccccaggaccagtccattgtccgaacctctcttgctgtgctggggaagggttgtctggctgcctccttcaactgcatcttcctgtatactggggaactgtatcccacaatgatccggcagacaggcatgggaatgggcagcaccatggcccgagtgggcagcatcgtgagcccactggtgagcatgactgccgagctctacccctccatgcctctcttcatctacggtgctgttcctgtggccgccagcgctgtcactgtcctcctgccagagaccctgggccagccactgccagacacggtgcaggacctggagagcaggaaagggaaacagacgcgacagcaacaagagcaccagaagtatatggtcccactgcaggcctcagcacaagagaagaatggactctgaggactgagaaggggcccttacagaaccctaaagggagggaaggtcctacaggtctccggccacccacacaaggaggaggaagaggaaatggtgacccaagtgtgggggttgtggttcaggaaagcatcttcccaggggtccacctccctttataaaccccaccagaaccacatcattaaaaggtttgactgcgc

SEQ ID NO: 155300 - DNA, 3234 bp, Homo sapiens
atgttcgcaagggtctcgactacacccgtcactcgatacgagatgtataggaaaacgcggtctactcgtctagaggacaacaacgcactaagtcaatcatgcaagccgctgccgttcagcgaagttactggatcgaaaggtaaagcggataaagaaaaggtgggcgattacgttttttgcctgaaggcgcagggacgatataacggtgaaccgctcacgggtacgggaaaaataggcggtatgctggcgctgcgtggcgaagggacgccgtttccggtacaggctgatttccgctctggtaacacccgtgttgcttttgatggcgtcgtgaatgacccaatgaagatgggcggtgtcgatttacggcttaaattttctggcgattcactgggtgatctctatgaactgacgggcgttctgctgcccgataccccgccgtttgaaacggatggtcggctggtagcgaaaatcgacactgaaaaatcgtcggtctttgattatcgcggttttaatgggcgaattggtgatagcgatatccacggttctctggtctacaccaccggaaagccacgaccaaaactggaaggtgatgtcgagtcgcggcaattgcggctggcggacctgggaccgttgattggcgttgattccgggaaaggggcagaaaagtcgaaacggtctgaacagaagaagggcgaaaaaagcgttcagcctgcgggcaaagtgctgccttatgaccgcttcgaaaccgataaatgggacgttatggatgccgatgttcgcttcaaagggcggcgcattgagcatggcagtagcctgccgattagcgatctttctactcatatcatcctcaaaaatgctgacctgcgcctgcaaccgctgaaatttggcatggcgggcggcagcattgcggcgaatattcatctggaaggcgataaaaagccgatgcaggggcgggcagatattcaggctcgtcgactgaaactgaaagaactgatgcccgatgtggaactgatgcagaagacgctgggggaaatgaacggtgacgcggaactacgcggtagcggtaactcggtggcggcacttttaggcaacagtaacggcaacctgaaactgttgatgaatgacgggctggtgagccgcaacctgatggagattgttgggctgaatgtcggcaactacattgtcggtgcgatatttggtgatgatgaggtgcgggtgaactgcgcggcggcgaatctgaatattgccaacggcgtggcgcgcccgcagatttttgctttcgatactgagaacgcgttgattaatgttaccggcacggcaagttttgcttcggaacagctggatttgactattgatccggagagtaaaggaattcggattatcacactggttctccgctgtatgtgcgggggacgtttaaaaatccgcagtctggttgatggtctgaactttgctgctcagtaccaaggcaaaaacgatcgtagcgatttcgataactacactgaaggtaacggtgatggcttcggtttctctgctacctatgaatacgaaggattcggtatcggtgcaacttatgcgaaatctgatcgtaccgacactcaagttaatgcagggaaagttcttcctgaagtatttgcttccggtaaaaatgcagaagtttgggccgcaggtctgaaatatgacgctaacaacatttacctggccactacctattctgaaacccagaatatgactgtatttgctgatcacttcgttgctaataaagcccaaaacttcgaagctgttgcacaatatcagttcgatttcggtctgcgtccgtccgttgcttacctgcaatctaaaggtaaggatcttggagtatggggcgatcaggacttagtcaaatatgttgatgtaggtgcaacctattacttcaacaaaaatatgtctactttcgttgattacaaaatcaacctgcttgacaaaaatgacttcactaaggaagggttcatcatgagtcatcaacttaacttcgccgacagtgaattcagcagtaagcgccgtcagaccagaaaagagattttcttgtcccgcatggagcagattctgccatggcaaaacatggtggaagtcatcgagccgttttaccccaaggctggtaatggccggcgaccttatgcgctggaaaccatgctacgcattcactgcatgcagcattggtacaacctgagcgatggcgcgatggaagatgctctgtacgaaatcgcctccatgcgtctgtttgcccggttatccctggatagcgccttgccggaccgcaccaccatcatgaatttccgccacctgctggagcagcatcaactggcccgccaattgttgaagaccatcaatcgctggctggccgaagcaggcgtcatgatgactcaaggcaccttggtcgatgccaccatcattgaggcacccagctcgaccaagaacaaagagcagcaacgcgatccggagatgcatcagaccaagaaaggcaatcagtggcactttggcatgaaggcccacattggtgtcgatgccaagagtggcctgacccacagcctggtcaccaccgcggccaacgagcatgacctcaatcagctgggtaatctgctgcatggagaggagcaatttgtctcagccgatgccggctaccaaggggcgccacagcgccgaggagcttgccgaggtggatgtggactggctgatcgccgagcgccccggcaaggtaagaaccttgaagcagcatccacgcaagaacaaaccgcccatcaacatcgaatacatgaaagccagcatcccgggccaggggtggagcacccatttcgcatcatcaagcgacagttcggcttcgtgatagccagatacaaggggttgctgaaaaacgataaccaactggcgatgttattcacgctggccaacctgtttcgggcggaccaaatgataccattggcatcaactgttgagtatggtgagacagttgatggtgttgtcctggaaaaagatatccagctggtttatgggaccgccaataatacgaaaatcaatcctggcggagaacagcatataaaagaatttggtgtaagtaataatactgaaattaacggagggtatcagtacattgaaatgaatggcgccgcagaatactcagtattaaatgacggttatcaaattgttcaaatgggtggcgcggcaaaccagactacgctcaataatggtgtgctacag

SEQ ID NO: 155301 - DNA, 8178 bp, Homo sapiens
atggttgcccgcgccgccgcacttaccgccacgccgcaggtcgacaaagtggtgttgtcacggttgattgatatcaccactgacgccgccattgatagtggcgtattgctggaacggttgattgcgcaaaacccggttagttacaacttccatgttccgctggctgatggtggcgtcctgctgggggccagcccggaactgctgctacgtaaagacggcgagcgttttagctccattccgttagccggttccgcgcgtcgtcagccggatgaagtgctcgatcgcgaagcaggtaatcgtctgctggcgtcagaaaaagatcgccatgaacatgaactggtgactcaggcgatgaaagaggtactgcgcgaacgcagtagtgagttacacgttccttcttctccacagctgatcaccacgccgacgctgtggcatctcgcaactccctttgaaggtaaagcgaattcgcaagaaaacgcactgactctggcctgtctgctgcatccgacccccgcgctgagcggtttcccgcatcaggccgcgacccaggttattgctgaactggaaccgttcgaccgcgaactgtttggcggcattgtgggttggtgtgacagcgaaggtaacggcgaatgggtggtgaccatccgctgcgcgaagctgcgggaaaatcaggtgcgtctgtttgccggagcggggattgtgcctgcgtcgtcaccgttgggagcgaggatgagcattccattcacccgctggccggaagagtttgcccgtcgctatcgggaaaaaggctactggcaggatttgccgctgaccgacattctgacgcgacatgctgcgagtgacagcatcgcggttatcgacggcgagcgacagttgagttatcgggagctgaatcaggcggcggataacctcgcgtgtagtttacgccgtcagggcattaaacctggtgaaaccgcgctggtacaactgggtaacgtcgctgaattgtatattacctttttcgcgctgctgaaactgggcgttgcgccggtgctggcgttgttcagccatcagcgtagtgaactgaacgcctatgccagccagattgaacccgcattgctgattgccgatcgccaacatgcgctgtttagcggggatgatttcctcaatactttcgtcacagaacattcctccattcgcgtggtgcaactgctcaacgacagcggtgagcataacttgcaggatgcgattaaccatccggctgaggattttactgccacgccatcacctgctgatgaagtggcctatttccagctttccggtggcaccaccggcacaccgaaactgatcccgcgcactcataacgactactactacagcgtgcgtcgtagcgtcgagatttgtcagttcacacaacagacacgctacctgtgcgcgatcccggcggctcataactacgccatgagttcgccaggatcgctgggcgtctttcttgccggaggaacggttgttctggcggccgatcccagcgccacgctctgtttcccattgattgaaaaacatcaggttaacgttaccgcgctggtgccacccgcagtcagcctgtggttgcaggcgctgatcgaaggcgaaagccgggcgcagcttgcctcgctgaaactgttacaggtcggcggcgcacgtctttctgccacccttgcggcgcgtattcccgctgagattggctgtcagttgcagcaggtgtttggcatggcggaagggctggtgaactacacccatgagtcatcaacttaccttcgccgacatgaattcagcagtaagcgccgtcagaccagaaaagagattttcttgtcccgcatggagcagattctgccatggcaaaacatggtggaagtcatcgagccgttttaccccaaggctggtaatggccggcgaccttatccgctggaaaccatgctacgcattcactgcatgcagcattggtacaacctgagcgatggcgcgatggaagatgctctgtacgaaatcgcctgccatgcgtctgtttgcccggttatccctggatagcgccttgccggaccgcaccaccatcatgaatttccgccacctgctggagcagcatcaactggcccgccaattgttcaagaccatcaatcgctggctggccgaagcaggcgtcatgatgactcaaggcaccttggtcgatgccaccatcattgaggcacccagctcgaccaagaacaaagagcagcaacgcgatccggagatgcatcagaccaagaaaggcaatcagtggcactttggcatgaaggcccacattggtgtcgatgccaagagtggcctgacccacagcctggtcaccaccgcggccaacgagcatgacctcaaaccaacggggtacactggtgcatgcagaggagcaatttgtctcagccgaatgccggctaccaaggggcggcacaagcgcgaggagctggccgaggtggatgtggactggctgatcgccgagcgccccggcaaggtaagaaccttgaaacagcatccacgcaagaacaaaacggccatcaacatcgaatacatgaaagccagcatccgggccagggtggagcacccatttcgcatcatcaagcgacagttcggcttcgtgaaagccagatacaaggggttgctgaaaaacgataaccaactggcgatgttattcacgctggccaacctgtttcgggcggaccaaatgatacccattcgctacctgctggcgtatcgtgacgttggcaatacatttcccagaccgcctgccacggcaacgatttctgctcttccagcagtgccagacgcgcagtgtaatcgcccgccgcttccagcttgcgcagctcagcgaggcatcgaagaagtcaaggccgatatgcacccggtcaaacagatcgtgacgcacaatctcactggcaattgcctgggtttcatcatccagcagcactacgtgatcgctgtcccagcgaacctggactggcttgaacgttgcaagcaaagcaactcgggtggaagtgcccggcgtccaggcacagcgcagtctggctggctggttggcataccccatgtaaaactcattggagccaaccgtgtagctctctgcgccaatgccaaacaattggctctcaacggcgtcgatattgggtttagcttctcgcctgatcacctcatccagtgctgccagcagacgctgacgcggggcgagacggtcaacggtgatatctttcataccatccgggatccagatgttcatcaccgatggtgtgccgagttgctcgccaaaataggccgaaacgcgacggctggctttgcagtgatcaatccagaactggcgaatgctgtcctcactggcattacgcgctttgcccggataattgcctgtggcctgaatccccccggtcagcgaaccttccgggttttcaaaaccggaaacatcatcgcctgccagcagtgcattgaaacggctgcgccagctcatgcaacacatcggcatacagcagcgccagctgtcgaaaatgcagcgcgcaggcttggcaataatttgcggttggagatcctctggcaggttgggttgactggaaatcataaagcgaaagatctcaatgcggcgcaactggatgcactcgcacacgcgttactggagattcctcgattttcctacgctacgcggggcagaacagggttcatcatgagtcatcaacttaccttcgccgacagtgaattcagcagtaagcgccgtcagaccagaaaagagattttcttgtcccgcatggagcagattctgccatggcaaggcatggtggaagtcatcgagccgttttaccccaaggctggtaatggccggcgaccttatccgctggaaaccatgctacgcattcactgcatgcagcattggtacaacctgagcgatggcgcgatggaagatgctctgtacgaaatcgcctccatgcgtctgtttgcccggttatccctggatagcgccttgccggaccgcaccaccatcatgaatttccgccacctgctggagcagcatcaactggcccgccaattgttcaagaccatcaatcgctggctggccgaagcaggcgtcatgatgactcaaggcaccttggtcgatgccaccatcattgaggcacccagctcgaccaagaacaaagagcagcaacgcgatccggagatgcatcagaccaagaaaggcaatcagtggcactttggcatgaaggcccacattggtgtcgatgccaagagtggcctgacccacagcctggtcaccaccgcggccaacgagcatgacctcaatcagctgggtaatctgctgcatggagaggagcaatttgtctcacccgatgccggctacccaagggcgccacagcgcgaggagctggccgaggtggatgtggactggctgaatcgccagcgccccggcaggctggcaccagacccggtcctcgactttatcacccatcggttatctgtgtcgcctgaaggaactccgggtaagcctgccgtgacggtcataccggtaaagatagtgcgcgtcacgggcgatccggttatccggccacatgctgagggtgctgtccgggtgcagctccgggtcgggcaggcggttacctccggggtctgtggcatacgggatgcggatatccagattcgctgcggtggtgtgaacgccggtcagcctgccggtggtgctgtagctgtaactccgggtctggcgcgggctgctgatgcggatgagttcgccgttgtcgttccaggtgtaatcgcggtcagacagcaggctgttcaggtgctggctctgtaactgcccggcaggggtataagcggtggtgagttcataacggccgaagtgcgcagcgtttcccggtgcaggcggtcgcgggtgtactccaccagggggatcctctagagtgagcccactcctgagcatgtgctctgtgtgtgtcccattagactgagaggaacaagtgccgaaggcagggacaaggtgtggagtacagatccccaatgatgggatggaggctgggtagaagagggaggcgtttgggtgacagccttgttcttggtaagctagaagtaggatgttttctcgctgggggcagtttctcaaattgcggacaataatttctgagcctgcttggacagcgaggtgcaggggggtcaacttggaggcatcctggactcttgaattcacattagcgtggacactgatcaggaacagcacactttcaatatcagagttctgaactgccacatgaaggaaattccggcccttgttatccaccttcttctctggggcacttggctgggggtgggcaattgggccctgcccttggccacctgggtcggccttctctgggaagcccttggcatagagtgtagctgcaagctgtcctgtgccccacaggtccagtccttgatggcacagcttggctgacagcgtccatctgcagacgccactgcacatgcgatcgcctataaccatccggatgtggtgtctgtcatcctgtagcagaaaggtaagtaagtgggaatactgtccatccttttgactgtgggacagcagtttaggatccttagttacagagttgatgttttttctgttggtgagtttcatatggctagtttcttcgccgacagtgaattcagcagtaagcgccgtcagaccagaaaagagattttcttgtcccgcatggagcagattctgccatggcaaaacatggtgggaagtcatcgagccgttttacaccacaaggctggtaatggccggcgacacttatccgctggaaacccatgctacgcattcactgcatgcagcatttggtacaacctgagctaatggcgcgagtggaagatgctctgtacgatatcgcctccatgcgtctgtttgcccggttatccctggatagcgccttgccggaccgcaccaccatcatgaatttccgccacctgctggagcagcatcaactggcccgccaattgttcaagaccatcaatcgctggctggccgaagcaggcgtcatgatgactcaaggcaccttggtcgatgccaccatcattgaggcacccagctcgaccaagaacaaagagcagcaacgcgatccggagatgcatcagaccaagaaaggcaatcagtggcactttggcatgaaggcccacattggtggtcgatgccaagagtggcctgagccacagactggtcaccaccgcggccaacgagcatgacctcaatcaggctgagagtaactctgcgtgcactggagaggagcaatttgtctcagccgatgccggctaccaaggggcgtcacaccgccgaggagctggcccaaggtggatgtggactggctgatcgccgagcgcccccggcataggtaagaaccttgaaacagcatccacgccaaaggaaccaaaacggccatcaacatcgaatacatgaaagccagcatccgggccatgggtggagcacccatttcgcatcatcaagcgacagttcggcttcgtgaaagccagatacaaggggcttgctgaaaaacgataaccaactggcgatgttattcaccctggccaacctgtttcggccggacccaaatgatacgactggcacaggcagatgacgccgccccggcagcgggcagtacactggacaaaatcgccaaaaacggtgtgattgtcgtcggtcaccgtgaatcttcagtgcctttctcttattacgacaatcagcaaaaagtggtgggttactcgcaggattactccaacgccattgttgaagcagtgaaaaagacactcaacaaaccggacttgcaggtaaaactgattccgattacctcacaaaaccgtattccactgctgcaaaacggcactttcgattttgactgtggttctaccaccaacaacgtcgaacgccaaaaacaggcggctttctctgacactattttcgtggtcggtacgcgcctgttgaccaaaaagggtggcgatatcaaagattttgccaacctgaaagacaaagccgtagtcgtcacttccggcactacctctgaagttttgctcaacaaactgaatgaagagcaaaacatgaatatgcgcatcatcagcgccaaagatcacggtgactctttccgcaccctggaaagcggtcgtgccgttgcctttatgctggatgacgctctgctggccggtgaacgtgcgaaagcgaagaaaccagacacctggaacatcgtcggcagccgcagcccaggaggctacgggtgtatttgccgtcaccaggacaaaggctatgacagagtcccgctggtggtgccgttgctgttttatcatggcgaaaactcgccttacccgtactcactcaactggctggatgagtttgacgatccgcaacttgcccggcagttgtacaccgaagcttttctgttggtggatatcaccatcgtacctgacgatgagatcatgcaacatcggcgtatagctctgctggaactgattccaaagcatattcgcgaacgcgatttaatcgggatggtcgacaggatcaacacgcttttgatagcaccatcacacaagacaagacgacgggaccacaaaaacgagcagacacagactacgcaagcagagggaaataacgaagccaaaccgccacaggaaaccaaaacgacagcgaagacgcaaagacctgagccagagacaccgaataggcaaaaccaacaaacagcgaggccgcaaagatcgacgacagcccggaccgagaagagcaacaaccagaagcacaacagcacaaagacgccagcaatgacgacgaacgcacactacagacagaaacgtgtagtgtctgtggaccaggctgcggtacagcaaagtattatcgaagggctggtctgggagcaggcgacacccacaacgattactcatccacagcaacttcacgaagaactggcgcgtattcgccgtcagggctggagctatgacaacggcgaagattacgccgatgtccgtggtgtcgctgcgccggtgtttaacgccaataacgagcttaccgctgcgatctcggtggtcggtacccgcttacaaatcaatgaagaataccgtgattatctggcgggcaaggccattgcctgcgccagggatatttcacgtctgttgggatggaaaagtccctttgacttacaagcctcataa

SEQ ID NO: 155302 - DNA, 547 bp, Homo sapiens
aggccctgctgcttctcgcgctgtgcgccacaggcgcccaggggctctacttccacatcggcgagaccgagaagcgctgtttcatcgaggaaatccccgacgagaccatggtcatcggtcaggcgggctgagggtggggaggccctttgtacccagctcagccctcggcggcgctccctcctcccgagcccagccgggtcgctggctcccccagtacctagcctgagggtgccccgaggacgccaggccccctgcctagagctccgggccgcacgtcggagggggccgggcggagaggcggcccactagggccggtcgtgactatgtgtctgccccgcaggcaactatcgtacccagatgtgggataagcagaaggaggtcttcctgccctcgacccctggcctgggcatgcacgtggaagtgaaggaccccgacggcaaggtggtgctgtcctcgcagtacggctcggagggcgcgtttacgttcacctccacacgcccgggggccaataaaacaggctggcctccaatttaaccagagggttttg

SEQ ID NO: 155303 - DNA, 550 bp, Homo sapiens
attaccaaaggtatcgtgaagagcgcttccgattgacgagcgagagcaccaaccagagggtcctatggtggtccattgctcagactgtattcttcatcctccactggcatctggcagatgcgtcacctcaagagcttctttgaggcccaagaagctggtgtagtgccctctttgtatgacccttcctttttacctcatttaatttggtactttccccacacagtcctttatccgcctggatttttagggaacaaaaatgaaaaagaataagtcacattggttccatggccacaaaccattcagatcagccacttgctgaccctggttcttaaggacacatgacattaggccaatctttcaaaatcttgccttagggcttgtgaggaatcagaactaacccaggactcagtcctgcttcttttgcctcgagagattttcctctgtttttcactaaataagcaaaagaaaactctctccattaccttctgctttctctttgtccacttacgcagtaggtgactggcattgcccacagagcaggcctgcctca

SEQ ID NO: 155304 - DNA, 2252 bp, Homo sapiens
atggcaggtgtcggggctgggcctctgcgggcgatggggcggcaggccctgctgcttctcgcgctgtcgcacaggcgccaggggctctacttccacatcggcgagaccgagaagcgctgtttcatcgaggaaatccccgacgagaccatggtcatcggcaactatcgtacccagatgtgggataagcagaaggaggtcttcctgccctcgacccctggcctgggcatgcacgtggaagtgaaggaccccgacggcaaggtggtgctgtcccggcagtacggctcggagggccgcttcacgttcacctcccacacgcccggtgaccatcaaatctgtctgcactccaattctaccaggatggctctcttcgctggtggcaaactgtatcgtgaagagcgcttccgactgacgagcgagagcaccaaccagagggtcctatggtggtccattgctcagactgtcatcctcatcctcactggcatctggcagatgcgtcacctcaagagcttctttgaggccaagaagctgcgcgtgcgtgctgcgctactgagcagcgccatggaggactctgaagcactgggcttcgaacacatgggcctcgatccccggctccttcaggctgtcaccgatctgggctggtcgcgacctacgctgatccaggagaaggccatcccactggccctagaagggaaggacctcctggctcgggcgcgcacgggctccgggaagacggccgcttatgctattccgatgctgcagctgttgctccataggaaggcgacaggtccggtggtagaacaggcagtgagaggccttgttcttgttcctaccaaggagctggcacggcaagcacagtccatgattcagcagctggctacctactgtgctcgggatgtccgagtggccaatgtctcagctgctgaagactcagtctctcagagagctgtgctgatggagaagccagatgtggtagtagggaccccatctcgcatattaagccacttgcagcaagacagcctgaaacttcgtgactccctggagcttttggtggtggacgaagctgaccttcttttttcctttggctttgaagaagagctcaagagtctcctctgtcacttgccccggatttaccaggcttttctcatgtcagctacttttaacgaggacgtacaagcactcaaggagctgatattacataacccggttacccttaagttacaggagtcccagctgcctgggccagaccagttacagcagtttcaggtggtctgtgagactgaggaagacaaattcctcctgctgtatgccctgctcaagctgtcattgattcggggcaagtctctgctctttgtcaacactctagaacggagttaccggctacgcctgttcttggaacagttcagcatccccacctgtgtgctcaatggagagcttccactgcgctccaggtgccacatcatctcacagttcaaccaaggcttctacgactgtgtcatagcaactgatgctgaagtcctgggggccccagtcaagggcaagcgtcggggccgagggcccaaaaggggacaaggcctctgatccggaagcaggtgtggcccggggcatagacttccaccatgtgtctgctgtgctcaactttgatcttcccccaacccctgaggcctacatccatcgagctggcaggtagtagtgtgacggcccaggcatctgcatggacagcacgcgctaacaacccaggcatagtcttaacctttgtgcttcccacggagcagttccacttaggcaagattgaggagcttctcagtggagagaacaggggccccattctgctcccctaccagttccggatggaggagatcgagggcttccgctatcgctgcagggatgccatgcgctcagtgactaagcaggccattcgggaggcaagattgaaggagatcaaggaagagcttctgcattctgagaagcttaagacatactttgaagacaaccctagggacctccagctgctgcggcatgacctacctttgcaccccgcagtggtgaagccccacctgggccatgttcctgactacctggagagcaaagtcccagaacccactgcgcagcttcaagcacaaaggaaagaaattcagacccacagccaagccctcctgaggttgttgggcctctctggagctgagcacattgtggagcacaggcttacacccttcgtggacaggcgaggctctggtgcttactgcacagcctga

SEQ ID NO: 155305 - DNA, 2422 bp, Homo sapiens
tttcgtgtcggggctgggcctctgcgggcgatggggcggcaggctcctgctgcttctcgcgctgtgcgccacaggcgcccaggggctctacttccacatcggcgagaccgagaagcgctgtttcatcgaggaaatccccgacgagaccatggtcatcggcaactatcgtacccagatgtgggataagcagaaggaggtcttcctgccctcgacccctggcctgggcatgcacgtggaagtgaaggaccccgacggcaagatgttgcaggtggtgctgtcccggcagtacggctcggagggccgcttcacgttcacctcccacacgcccggtgaccatcaaatctgtctgcactccaattctaccaggatggctctcttcgctggtggcaaactgcgggtgcatctcgacatccaggttggggagcatgccaacaactaccctgagattgctgcaaaagataagctgacggagctacagctccgcgcccgccagttgcttgatcagtatcgtgaagagcgcttccgactgacgagcgagagcaccaaccagagggtcctatggtggtccattgctcagactgtcatcctcatcctcactggcatctggcagatgcgtcacctcaagagcttctttgaggccaagaagctgcgcgtgcgtgctgcgctactgagcagcgccatggaggactctgaagcactgggcttcgaacacatgggcctcgatccccggctccttcaggctgtcaccgatctgggctggtcgcgacctacgctgatccaggagaaggccatcccactggccctagaagggaaggacctcctggctcgggcccgcacgggctccgggaagacggccgcttatgctattccgatgctgcagctgttgctccataggaaggcgacaggtccggtggtagaacaggcagtgagaggccttgttcttgttcctaccaaggagctggcacggcaagcacagtccatgattcagcagctggctacctactgtgctcgggatgtccgagtggccaatgtctcagctgctgaagactcagtctctcagagagctgtgctgatggagaagccagatgtggtagtagggaccccatctcgcatattaagccacttgcagcaagacagcctgaaacttcgtgactccctggagcttttggtggtggacgaagctgaccttcttttttcctttggctttgaagaagagctcaagagtctcctctgtcacttgccccggatttaccaggcttttctcatgtcagctacttttaacgaggacgtacaagcactcaaggagctgatattacataacccggttacccttaagttacaggagtcccagctgcctgggccagaccagttacagcagtttcaggtggtctgtgagactgaggaagacaaattcctcctgctgtatgccctgctcaagctgtcattgattcggggcaagtctctgctctttgtcaacactctagaacggagttaccggctacgcctgttcttggaacagttcagcatccccacctgtgtgctcaatggagagcttccactgcgctccaggtgccacatcatctcacagttcaaccaaggcttctacgactgtgtcatagcaactgatgctgaagtcctgggggccccagtcaagggcaagcgtcggggccgagggccaaaggggacaagtgtggcccggggcatagacttccaccatgtgtctgctgtgctcaactttgatcttcccccaacccctgaggcctacatccatcgagctggcaggacagcacgcgctaacaacccaggcatagtcttaacctttgtgcttcccacggagcagttccacttaggcaagattgaggagcttctcagtggagagaacaggggccccattctgctcccctaccagttccggatggaggagatcgagggcttccgctatcgctgcagggatgccatgcgctcagtgactaagcaggccattcgggaggcaagattgaaggagatcaaggaagagcttctgcattctgagaagcttaagacatactttgaagacaaccctagggacctccagctgctgcggcatgacctacctttgcaccccgcagtggtgaagccccacctgggccatgttcctgactacctggagagcaaagtcccagaacccactgcgcagcttcaagcacaaaggaaagaaattcagacccacagccaagccctcctgaggttgttgggcctctctggagctgagcacattgtggagcacaggcttacacccttcgtggacaggcgaggctctggtgcttactgcacagcctgaacagacagttctggggccggcagtgctgggccctttagctccttggcacttccaagctggcatcttgccccttgacaacagaataaaaattttagctgcccc

SEQ ID NO: 155306 - DNA, 1563 bp, Homo sapiens
gaaggggaaggctcagggtctcacctcacattgtccctacaaggacaggccccaactgataaccgttgctttttttttttgtgaacatagtttgatttgatcacaggtcaaaaacgccttatattttcgaaagactcctggcccctcttccctcttcctggtttcctagccgttccccttctgccccagtctgagccagtgaggggtagctttttaaaaccattattctagatggaggaggcactgatgcttgtaactctggaaagaggcctacacccaagggctaggaattttatttttccttttctcaccaggtgtctgcatgtgtgtgtgggtgtgaatgtgtatacatgcccatcagcatttagtcacatgtctgaatttctgtgtccagacgagccccatcaaactagttggggaaggggccccagtgaccaagtgtattaaggcatcccttgaagagggattggggcaggggaggcagaaggggctctccagaccccttttccatgatgacccactccaagatattatgtgtaaattgtgttattatgtatatgggtaaagatgtacaaatatatgtcctctttgtagcagatatgattttatatttataatgtgcatcaacatgtgaaagcaatctaggtcactagcacagaggaagttgccaggaaggtggcttcagcacctccaggttggttctgggtgtcctgctgtgaggggtagaacgggaggctgctgaagtgagtagctgagcagctggagccatcccaagcatcagtgtctcagagtcctcctcgccccgtttcttcaccccgccccccaacccccagactttcctggagcatctgccctttgctcctagcagcctccccaggaagggactgcagaggcgggcaagccctctctatgtgtttttatctccaccttccccggaatctggggagggcttttgtttttacgttttcaagttcagcattgtattcggacagaagctgtgactgaagactcagtgccaaggaaaggggcttcttgtgtgtccctcgggtttggggctcttctcaaaaaaccaactactcccataaccccttactgttcaccttcaactcccccacacagctccatgaaaatgtgtgaaccccctgtttgaaattttggtatttggtaagtggagggtggggggatgggggccagcagctgtcatcccccccgggaaagccgaagcagtgtcccctggtgggttaaaaaccctcaagtcctctttgcccagtgaggcccccacccacatcggtgtgagttaggtttcctcatctggagctgtttcctcaggcattcttccccaaccctcttccttttccccttcggtgtgcctcagtggtctccttcatagagtgagagggcttgagaccctccctcaaccggactaattaaagaaagacacttgtgttcccaagtggtggttttatttttttagtttttatgtttgtatgggaaattgtggataaagtgaaaagaattgtaaataaatggtgtatttcctcctccaaaaaaaaaaaaaaaaaa

SEQ ID NO: 155307 - DNA, 1311 bp, Homo sapiens
tttttttttgtaattttagtatacagtttgatatttattttcctctgcaacatacctacttgtacctgtaacacccgatccaaactccagaggcatcttctccttagtaattctatagtgtctcactgaccaccattctctagttgttttattgatagattcatccaggctgggccaatgggacagcgggataagaaagagagagggagggtttagcatactggcaggagagggtctgaaggaatgaatcatggaatcccaggtaataggaagccctaaggagggagattaagacagcacagatcaggagaaagaggagatagttggggatatgcttggaacaggtaccagtgaagataactcagtgagagagcttgggaggaaggaggcagcagtcaggagtgtggagggactaaagtttcaaactttcaaaggtggagcagtttcaggagggtggcccaagcaagaggatgccatgggttatccatgttttcccatgggtccacttccagctctgtatacctgctcttcagctctgctctcagcccagagcaaacacacttcaccctaatctcaggtggggaggtaagggccagagtcccatctgggatcccagcatagaaggacagccaggattgctacctgctggctgcctttgctatacatgcagaatgtgtaccatgttcagtctagacaatacaccctccttccttcctcaccagccacagacttccaggcccttcccacccttcttgcctgtggctgagcctcccaccatagcccatacggtgctggttcagcttctgacggtgcctggcttgagatccgtgatgctggctttccctcaacaggaaagaaagcctgcagggtaacgctgaggcttgtcccatctgggctcctgtgggggcctgtccaggctcacctgcgccaacctgtccctgatcagcattgaagcaggaagctggggtgggggaaccggaggagcagaggcccgcaaagtagtgcagatcttccttcttgccaaaccttgccctgatcctaagggctgcaggcaggaacagatgcagcaggtggctgggagggtaactgggggtgggtgggtggaaaggcctggtctggagatgccacagctctactcttctcttaaacttgggtgtttggcacagggtcccatgcaaagaggtgggataggagccagagggagtctctctcctgcctctgctgtttctggggcaagagagggcacaaaaaagttgtcaggggctggattcttgtgcttgaaaaacttgggtcctcagagagggaagatga

SEQ ID NO: 155308 - DNA, 282 bp, Homo sapiens
  misc_feature (1)...(282): n = a,t,c or g
cggccgccagccggggcgatggcggggctctggctggggctcgtgtggcagaagctgctgctgtggggcgcggcgagtgccctttccctggccggcgccagtctggtcctgagcctgctgcanagggtggcgagctacgcgcggaaatggcagcagatgcggcccatccccacggtggcccgcgcctacccactggtgggccacgcgctgctgatgaagccggacgggcgagcacaggatgcggtatttccaaacccctgccctcggtcttttcccacctca

SEQ ID NO: 155309 - DNA, 880 bp, Homo sapiens
agcggccgccagcggtggcgaatggcggggctctggctggggctcgtgtgtggcagaagctgctgctgtggggcgcggcgagtgccgtttccctggccggcgccagtctggtcctgagcctgctgcagagggtggcgagctacgcgcggaaatggcagcagatgcggcccatccccacggtggcccgcgcctacccactggtgggccacgcgctgctgatgaagccggacgggcgagggtaagggccggcgctcctcctggagcgcaacggggtccgcattcccgttcccaccctccgatcagccaggagtcactctgcttgtggcgctggccgaaggaagaagaggagcctgtcaccctgtggaagaatgcactcccagttctagtcgtttgccccttggcacccgccgacactgctaagtgccccatcccaaagtgagcattttctttgtgtgtaagcacaggatgcggtatttccaaacccctgccctcggtcttttcccacctcaccgctgctcagctctcaaagccctgaccgtttcctcctgccttgacttgggaagccttaggaacagaagctccctgggagcacagagcggttttaaactggccaacaccttaacgcccagagccgccctcctctcgctgccactttggaaaataagagactagagattcactggacgcttcctcccggcatcacaagacttgactgctgcttcagttcccgcttgaccttcatactttagccctttaaaggatgttacataataacaattaagagtcggcagggccttcaggcagacttctttggagggtgtcaaacgccttgtttattaaagagtgaattttttaattaaaatcatgttttaaaacagaa

SEQ ID NO: 155310 - DNA, 473 bp, Homo sapiens
caatgaaagatattcagttcctgcccacatagagcttacattttgctgttggagtggggaaaaaaaaccagacattaaataattaccattctaaatacgtctaaattattgcaaataaatattgcaaagagatatgggactcataatagggggcgagaggttagagaataccctcaacactgaaaaaagtggcattaaagctgtgacactaatatgggagataggagggctgaggtggagtgctgtcttctttcgtatgatccatcatttaagaaataggctgggtgcagtggctcatgggagtgctgtcttctttcgtatgatccatcatttaagaaataggctgggtgcagtggctcatgcctgtaatcccagcagtgtgggaggccgaggtgggaggattgctggagcccagaagtttgagagcagccagggcaatatagcgagacccggtctccattttatttttctta

SEQ ID NO: 155311 - DNA, 1656 bp, Homo sapiens
ttttttttaacttttatcttttggatggcattgagagtaaccttctgtttttttggcctcaagttccatattgaattttttaaaattgcattttgagcaataacatttccctggttgcttaaccagttatacaagttgagacttctgtctctatgcctatcttataatagcttctctgggagaacagatgaaaaataagccagttagatattttatgagtattgaaatcctttccattcagaaatgtaaataaaacaaccagcatgagcaatcagcttatgtcagattccatgggtttgtattacatagggaaattacagtgcaacctgaaacatgcttcttaatgaattcatagtgctgtcacagttgaatgtaaacccttgagcttttcttttgtgaagggtttcagaaatcaccctttataaactacctaggggagggaagagaactaagatgatactaacaaatgctatcactggttttgtggctgcctcccttacagcaccaaattttgccagttaagtaaagcagaaacctagaatagtggcacacgttttggcttattcagtgtacacacacacacaaacacacaaacacacacacactcagtgccacactgggtcagacccatagtttcaattacttctgtttctgaaagtggcaccagggaactggctttgtgaagaataagattgcccttatgggtttttatcctcagaagttagggaagtttggttaagaagtatgacaaaagccccataagtagcgatttttacctttagcaaatgcaggaaaatagacacctaactagagatcatgaagttagaatttgtctccttctttggctgctacttcagcccctggtagtaaattagaataaagttcctcatttattagtgagctggttttgcagtctctaaagctcttttgcagctcttctattcactatggcctcagatacgataaatctgctagctgcaaaaattcaatataccaagtagaatatgtaggaccagtcaagttttaagtttgggagtgaggaaaagcagcatgtattttctattttaaattattttcttttcacattctaatttcttaagggtttggcttgatttatgccaggttctgggcctgtaagcctacattaatgtatcacagtactggataggatatttgatatctcttacttagcccagaatctcaaatgataaggagctgtagttaatgatatgtagcattttgttgaactttacagtgtagatctctgttagtccctgggtctgtaacaaatggactcatccttgtgcttttccataggtgccctgatgtttactgacataaatcaagatactatgtggctctataggggatgctgaaccatttgacagtctaggtgcacacagtcacctcacattatttaagccctgatctcagcattctaatttctctgtattccacagtgtatataatgtgtacgtgcttgtaattcattatatattgcttgtacattcctgcttgtaagtttcagcacataccagttccctctatttagaatgccttcttctgactgccctcagtcagttcataaaacacataaagctatcttttaaaaattcaactcaaaagtcacctcctgtggaatgccatctctgcgaa

SEQ ID NO: 155312 - DNA, 2265 bp, Homo sapiens
atggctccgtggcctcacgagaacagctctcttgccccatggccggacctccccaccctggcgcccaataccgccaacaccagtgggctgccaggggttccgtgggaggcggccctagccggggccctgctggcgctggcggtgctggccaccgtgggaggcaacctgctggtcatcgtggccatcgcctggactccgagactccagaccatgaccaacgtgttcgtgacttcgctggccgcagccgacctggtgatgggactcctggtggtgccgccggcggccaccttggcgctgactggccactggccgttgggcgccactggctgcgagctgtggacctcggtggacgtgctgtgtgtgaccgccagcatcgaaaccctgtgcgccctggccgtggaccgctacctggctgtgaccaacccgctgcgttacggcgcactggtcaccaagcgctgcgcccggacagctgtggtcctggtgtgggtcgtgtcggccgcggtgtcgtttgcgcccatcatgagccagtggtggcgcgtaggggccgacgccgaggcgcagcgctgccactccaacccgcgctgctgtgccttcgcctccaacatgccctacgtgctgctgtcctcctccgtctccttctaccttcctcttctcgtgatgctcttcgtctacgcgcgggttttcgtggtggctacgcgccagctgcgcttgctgcgcggggagctgggccgctttccgcccgaggagtctccgccggcgccgtcgcgctctctggccccggccccggttatgccaattctgccttcaacccgctcatctactgccgcagcccggactttcgcagcgccttccgccgtcttctgtgccgctgcggccgtcgcctgcctccggagccctgcgccgccgcccgcccggccctcttcccctcgggcgttcctgcggcccggagcagcccagcgcagcccaggctttgccaacggctcgacggtgagagacacttgtgagccctttaactgggagttctgctcccataagtttagcatccactccaatcactgccaccccaccagggaacggctgttttctccagaagatcttggactctgtgtgttcatggatgtgcccctcgcccacaagctagagggcagcttgttaaagacctacaaacaagatgattacccgaacaagatattcttagcctatagagtctgcatgacaaatgaaggccatccctgggtttctctcgtggtgcagaagactcgactacagatttcacaggatccctccctgaattatgagtacttgcccaccatgggcctgaaatcattcatccaggcctctctagcactcctctttggaaagcacagccaagccattgtggagaacagggtagggggtgtacacactgttggtgacagtggtgccttccagcttggcgtccagtttctcagagcttggcataaggatgctcgtatagtttacatcatctcttctcaaaaagaactgcatggactcgtcttccaggacatgggctttacagtttatgaatactctgtctgggaccccaagaagctatgcatggaccccgacatactcctcaatgtggtggagagcaagcagatattcccattttttgatattccctgtcaaggtttatacaccagtgacttggaagaagatactagaatcttacaatactttgtgtctcaaggctttgagttcttctgcagccagtctctgtccaaaaattttggcatttatgatgaaggagtggggatgctagtggtggtggcagtcaacaaccagcagctgctgtgtgtcctctcccagctggaaggattagcccaggccctgtggctaaacccccccaacacgggtgcacgtgtcatcacctccatcctctgcaaccctgctctgctgggagaatggaagcagagtctaaaagaagttgtagagaacatcatgctaaccaaggaaaaagtgaaggagaaactccagctcctgggaacccctgggtcctggggtcacatcaccgagcagagtgggacccacggctatcttggactcaactcccagcaggtggaatacctggtcaggaagaagcacatctatatccccaagaacggtcagattaacttcagctgtatcaatgccaacaacataaattacatcactgagggcatcaatgaggctgtcctcctcacagagagctcagagatgtgtcttccaaaggaaaaaaaaacactgattggaataaaactttag

SEQ ID NO: 155313 - DNA, 2645 bp, Homo sapiens
gctactcctcccccaagagcggtggcaccgagggagttggggtggggggaggctgagcgctctggctgggacagctagagaagatggcccaggctggggaagtcgctctcatgccttgctgtcccctcccctgagccaggtgatttgggagaccccctccttccttctttccctaccgccccacgcgcgacccggggatggctccgtggcctcacgagaacagctctcttgccccatggccggacctccccaccctggcgcccaataccgccaacaccagtgggctgccaggggttccgtgggaggcggccctagccggggccctgctggcgctggcggtgctggccaccgtgggaggcaacctgctggtcatcgtggccatcgcctggactccgagactccagaccatgaccaacgtgttcgtgacttcgctggccgcagccgacctggtgatgggactcctggtggtgccgccggcggccaccttggcgctgactggccactggccgttgggcgccactggctgcgagctgtggacctcggtggacgtgctgtgtgtgaccgccagcatcgaaaccctgtgcgccctggccgtggaccgctacctggctgtgaccaacccgctgcgttacggcgcactggtcaccaagcgctgcgcccggacagctgtggtcctggtgtgggtcgtgtcggccgcggtgtcgtttgcgcccatcatgagccagtggtggcgcgtaggggccgacgccgaggcgcagcgctgccactccaacccgcgctgctgtgccttcgcctccaacatgccctacgtgctgctgtcctcctccgtctccttctaccttcctcttctcgtgatgctcttcgtctacgcgcgggttttcgtggtggctacgcgccagctgcgcttgctgcgcggggagctgggccgctttccgcccgaggagtctccgccggcgccgtcgcgctctctggccccggccccggtggggacgtgcgctccgcccgaaggggtgcccgcctgcggccggcggcccgcgcgcctcctgcctctccgggaacaccgggccctgtgcaccttgggtctcatcatgggcaccttcactctctgctggttgcccttctttctggccaacgtgctgcgcgccctggggggcccctctctagtcccgggcccggctttccttgccctgaactggctaggttatgccaattctgccttcaacccgctcatctactgccgcagcccggactttcgcagcgccttccgccgtcttctgtgccgctgcggccgtcgcctgcctccggagccctgcgccgccgcccgcccggccctcttcccctcgggcgttcctgcggcccggagcagcccagcgcagcccaggctttgccaacggctcgacggggcttcttggggagtttcttaggcctgaaggacaagaagcaacaactctgttgatcagaacctgtggaaaacctctggcctctgttcagaatgagtcccatgggattccccggctgtgacactctaccctccagaacctgacgactgggccatgtgacccaaggagggatccttaccaagtgggttttcaccatcctcttgctctctgtctgagagatgttttctaaaccccagccttgaacttcactcctccctcagtggtagtgtccaggtgccgtggagcagcaggctggctttggtaggggcacccatcacccggcttgcctgtgcagtcagtgagtgcttagggcaaagagagctcccctggttccattccttctgccacccaaaccctgatgagaccttagtgttctccaggctctgtggcccaggctgagagcagcagggtagaaaagaccaagatttggggttttatcgctgggttcccttattactgctctcaagcagtggcctttctcactttagccatggaatggctccgatatacctcacagcagtgtcagaaggacttcaccagggttttgggagctccagggttcataagaaggtgaaccattagaacagatcccttgttttcctgttgcaatcagataaataaatatcactgaatgcagttcatcctcggcccactttccctccgtttgttttcttttcataatccacttactcccttcccttctactctgcgctggcttttgacagaggcagtaaattaggcctaatcctcactcttttcttcctaatcttcatcaaacaaaaaatgaaaagtctgtctggacgaaggggagtgagcttgagcctttgatatcttgctcccccacccttcctgaaactcttgaaatccagttgccattgagtagcaaagccacgctccccacaggacttggacagagggcccacagggggatgggctggctgtggccaggtttagggcagggggcatttgtcccctccatgctataatccagtggtgccttacatggtgtgtgtgtgtgtgtgtgcgtgtgtgtgtgtgtgtgtgtgtctggaggcacaggcacaaagcattgcttgggttggtcaaatgtcttgtgtcataaatatattctgatgtttcccagcctttccacaacctctaccttcccactcaccttccccagctacaaaaatctgtattatcctcttaaagtaaaactggagttac

SEQ ID NO: 155314 - DNA, 2110 bp, Homo sapiens
tttttttttttttcagatctttcaccaacaatttctttatttaataggggtattttatatagacaatcttttaaaaaataaaatgccttatttgtgttgcatacatttattccgagggagcctccctacaagtcaagagtattctcttagccagaaatacttctattgctagaaacatttttagaacagaacagatttttcctgttatcatggctgcatcaaatgttaccctgcattttaactaaaatggccaaacattttcaaagtcatcatgcactacaagaatctaaggcagtgtgtctaaaatgccaaacccagtacatttagttaaatatctggtcaattcaaaaagcaaaataaattgattcaattgtttaatcagttaaaccatctggccaacatagagtgaatcctcaaaagggcaacatgtcctaatagaaacgtgtgacaggattgtccaagcacacccaggccacacagaagagatgccattctatcttcatgatgatgtctggttagattctgttttgcaaatattttctctttgcatcattctcacttgctttttgcagtcatcgtttacagattttcctttgatagggaacattctttgaatacctgatgtaattctaaatttcaggttaaaaatagcagggcagaaaattagcacggcattttctccttcaactcttcaggaatgaggtaggcttgagggcttgctcactgcaacttggaggaggatcagttattccttattgccactctgtcttggctaatcagttatattttcatttcctcagtgaaatggaacccagaaagcccttgaactgctatcatatacaagcagtttattacctattgattttcaccaggtcaggtttggtctggctcatgtttgtaaactaaaactctagagcgtctcagagtttgggctcagatactaccactgctgttgtgcagatctggtagctttatgatttcaggattccaacctcaaagaattcttagaaagctaagtgaatgagaatttagtatatggccaataatattattgcaaaaggtaaggaaaatgtttaacataagaaactggatccttaaacagcaaggcaagagaatcagcatgtgaagggtagcatgtgaggtctatttttatattgctggacatctggtaaatggtttaatattattttcacatgtcattttgggctttcttccgagaggtgattacaaaatttatcaaagaccctcccaaagaaaactgccccgaaaatgtctgtgtgctgtgtgccttttagtatttaaaagtgaattggccaggtgcggtggctcactcttgtaatcctagcactttgggaggttgaggtgggtggatcacctaaggtcacgagttcaagacctcagctgatcacccaccttggcctcccaaagtgctgggattacagtcttgagccactatgcccaacctgcttgttttttgagatacaatcttgctctatcacccaggtggagtgcagtggcacaattacagctcactgtagccttcaactcctgggctcaagtgattctcctgcctcagcctcccaagtagctgggactacaggtgcactccatgcctggttaatttttaaatttattgtagagaaggggtctcactttgctgcccaggcttgtcaaacttttagctacaaaaagcttcatgcataattttttttttgttttgtatatagtgtggtaggagaaatacagggtcacaagataagaacatatgaaggaccctgataccttgattgacaaattattttccaaagggattttacaatttgaactagttgtgatttcaaagaatcctccccaagtagtaaagcttattgcttggaaaagaaaggttaagcagagtccctcatagcaggcatcctcagctaggctggaagagataccttgtgaaactgctgctcagctgcaggaaccccctccctaccctccctctcttccccgttgccactctttatgggtaggagaagaaatgggtggtgtacattggaagagctttaggttattaatggtttccagaatctttttcttttttctcttttcttctcccctcccctct

SEQ ID NO: 155315 - DNA, 651 bp, Homo sapiens; identical to SEQ ID NO: 134933

SEQ ID NO: 155316 - DNA, 1540 bp, Homo sapiens
ggggggggggggaccacttggcctgcctccgtcccgccgcgccacttggcctgcctccgtcccgccgcgccacttcgcctgcctccgtcccccgcccgccgcgccatgcctgtggccggctcggagctgccgcgccggcccttgccccccgccgcacaggagcgggacgccgagccgcgtccgccgcacggggagctgcagtacctggggcagatccaacacatcctccgctgcggcgtcaggaaggacgaccgcacgggcaccggcaccctgtcggtattcggcatgcaggcgcgctacagcctgagagatgaattccctctgctgacaaccaaacgtgtgttctggaagggtgttttggaggagttgctgtggtttatcaagggatccacaaatgctaaagagctgtcttccaagggagtgaaaatctgggatgccaatggatcccgagactttttggacagcctgggattctccaccagagaagaaggggacttgggcccagtttatggcttccagtggaggcattttggggcagaatacagagatatggaatcagattattcaggacagggagttgaccaactgcaaagagtgattgacaccatcaaaaccaaccctgacgacagaagaatcatcatgtgcgcttggaatccaagagatcttcctctgatggcgctgcctccatgccatgccctctgccagttctatgtggtgaacagtgagctgtcctgccagctgtaccagagatcgggagacatgggcctcggtgtgcctttcaacatcgccagctacgccctgctcacgtacatgattgcgcacatcacgggcctgaagccaggtgactttatacacactttgggagatgcacatatttacctgaatcacatcgagccactgaaaattcagcttcagcgagaacccagacctttcccaaaagctcaggattcttcgaaaaagttgaagaaaattgattgacttcaaagctgaagactttcagattgaagggtacaatccgcatccaactattaaaatggaaatggctgtttagggtgctttcaaaggagctcgaaagatattgtcagtctttaggggttgggctggatgccgaggtaaaagttctttttgctctaaaagaaaaaggaactaggtcaaaaatctgtccgtgacctatcagttattaatttttaaggatgttgccactggcaaatgtaactgtgccagttctttccataataaaaggctttgagttaactcactgagggtatctgacaatgctgaggttatgaacaaagtgaggagaatgaaatgtatgtgctcttagcaaaaacatgtatgtgcatttcaatcccacgtacttataaagaaggttggtgaatttcacaagctatttttggaatatttttagaatattttaagaatttcacaagctattccctcaaatctgagggagctgagtaacaccatcgatcatgatgtagagtgtggttatgaactttatagttgttttatatgttgctataataaagaagtgttctgc

SEQ ID NO: 155317 - DNA, 1750 bp, Homo sapiens
  misc_feature (1)...(1750): n = a,t,c or g
ttgagacacagtctcaccctgttgcccaggctggagtgcagtggtgtgatctccgctcacggcaacctccatctcccaggntcaagtgagttcccattcctcagccccagagctgggaccacaggcgcgcgaatttttgtatttttagcagagacggggtttcactatgttggccaggctagtctcgaactcaagttggccctcaagtgaatctgccccacccctggcgtccccagtgttgggatttcaggcatgagccactgtgccctggcccatgtaatagagacttttaatatagggagggtgtaccagaaggcaccagtttcctgtgggcaaacagaattattcctgctgtatttgtaatctgggtgccacggagggtaggcccagatcccttcagcttctgatgggaaggagcattgctttcagctngtaaaatggacacctgcaggaaaccttgcaccgatggatagtctccctcagctccgtgccatcgctgcagaggctgttatggacatcactgcagcccagtggctctctctcctggtctccaccatatgagatggcttctgtttctctcctgttttacttcgcctttagctgtggtctttcaaaccaccatccctccttatcttcctcaggtggttcctcagatcttcctgtgatggcgctgcctccatgccatgccctctgccagttttatgtggtgaacagtgagctgtcctgccagctgtaccatagatcgggagacatggacctcggtgtgcctttcaacatcgccagctacgccctgctcacgtacatgattgcgcacattcacgggcctgaaggtgggctgtctcgggaaaggtgacttgcccagcctacccacactgagctcctccagttctttaaatatgggaaaacaaattgccagagtttaagtcctctgattagcttttaaatttgatatgtgtaagtaagacatgaaccagcttttactttgaaaccttcctcttctggaaggttttctggccctgtggtatatgcactaacagatctatacaggttgtttgtgatacagcttctatggatcttctcaaaagctatgctgagattgggtatggtggctcatgcctgtaatcccagcactttggaagactgagacaggagcaattgcttgaggtctggagttcaataccagcctgggcaacataacaagatgctgttgctacaaaaaaatggaaaagctacactaaattatttttttaaaaaaagccttgcggtgtctgcatattctaatgtttttaaatgatgttttaaagaattgaaactaacatactgttctgctttctcccccgggtttatagccaggtgactttatacacactttgggagatgcacatatttacctgaatcacatcgagccactgaaaattcaggtaagaattagatgttatacttttgggtttggtaccttctcttgataaaaggttgactgtggaacaggtatctgctcaatgctgtgtccaagataaagatgactgctccaaatgtggggcttcagtttagggagaagtggtgggcaggtgggcaggacaaggcaggcatctgcctcagcaaccatgggcacttaacttgtcaggtgctgtgaggtactaagcaccagtaccagagagggaagagccacattcaagccaggggattgtccaaaaggaggcattttaactcattttaacttgaaggagaattgaagtgcaaagaattcgcc

SEQ ID NO: 155318 - DNA, 2425 bp, Homo sapiens
atgtgcccagctgcagccctgacccctacttctgtggccagccaatcagaggctccctggtccttcatgctcattcgagaatgcaatactatggtgacaccctccttgcgtggagagatgcagacaactcggctgcacgctgccacacccagctctaactcagacaggcatgtgtcaatgccattgttgctctacctggagcaggttacattccttcaggaacatgctggcacaggacggcgctggtggtcgatcgtgtggcgccggaggacgttccccgcggccggagccatggagatgccgctgccccccgatgaccaggagcttcgaaatgtcatcgacaagctcgcccagttcgtggctcgcaatgggcccgagtttgagaagatgactatggagaagcagaaggacaaccccaaattctcgtttcttttcggaggcgaattctacagttactacaagtgcaagctggcgctggagcagcagcagcgtcactctagaggatccccgcatcttccgggactcgggctccgagcgcgggggaacgggggcggggctgcagccacgcgtgcgcactgggacgacgggagggcgacctacgtctaccagtggccctggacgctcctgctcctggctgtcagcggcttctgtaactttgcccagaatgttatcgccttcagcatcctcaacctcgttagccccctgagctactcggtcgccaatgccaccaaaagaatcatggtcatcacggtgtccctgatcatgctgcgcaacccagtcaccagcaccaacgtcctgggcatgatgaccgccatcctgggggtcttcctctataacaagaccaagtacgatgcaaaccagcaagccaggaagcacctcctccccgtcaccacagcagacctgagcagcaaggagcgtcaccggagcccactggagaagccccacaacggcctcctcttccccccagcacggggactatcagtacggccgcaacaacatcttaacagaccacttccaatacagccggcagagctacccaaactcgtacagtttgaaccgctatgatgtgtagagtccaaaggacaggaccagactgttggtgactccttccccggcccccacagcagtatcagaaacttctgacaatcagtgaatgtacaacccagccgaggggacggtgcataactctccatcagaagccctggggttcctggccccccgtgagccgcaggaggatgcgttgcctgcagtgcagacggccgtgagctctgggcaaacctaaacagagaccagtgtctcatgctctttcttcctggagtctgtcatctgagggccgtgtccctgcggagatcttggccacgttgtacctttccatgtggaattattccccaagcacgtgtatgctcagaagcacttgtgtcttgcacttccagataacattcaggacctgtgtgaaaaagctggggtcactgtggctcgtagaccatgaacttggcagtgggggtgtccagggcggtgcttgagaacgtcagactggctagtttaattccctggcgcagatacgcataggaccaacagggtcaccaagcagacagggagcccgcgagaatcattcaaaacatccccagccacagagatggatccagtttcctggtcatccccttagcagttcacaagttcctgggaaaatgtttccaaagcaaaaagcgattgcaattagcatccagttcctgcagcctggtgctctgccctgcacgtcagggttggcatccacccagatccagatggaagggaaacttctctcttctcctttgcctcctcttccctcaccagagcagggcgcttctcttggggtggtgagaaggatcttcgagaaatcgtgtttcagtattttaagctctatttctgtggcacatgtcttttgagaggcatcttcacctcttctgtgatgacttggtatgttgtttggtaggagagatcttgattttcggaggatcttgcattcttctacggaaattcttggaacttgcggggtgtgtgtttttgccttggtccccattatgggatgcattaggactggcctatgcatcgaaaatctttttgtttgtaaacgtttaaaaacaaagttccccggccaggcacagtggctcgcgcctgtggtcccagcactttgggaggccaagatgggcggatcacgaggtcaggagttcgagaccagcctggccaacatagtgaaaccccatctttactaaaaatacaaaaaattagccgggcatggtgtcgcgtgcctgtagtcccagctcctcaggctgctgaggcaggcgaattgcttgaacctgggaggcagaagttgtggtgagccgagattgtgcattccagcctgggtaacagagcgagactccatctcaaaaaaaaaaaaaaaaaa

SEQ ID NO: 155319 - DNA, 701 bp, Homo sapiens
aaggggctcaattttaagccaaggagttttcactcgcagctatctctgtcagctttttgaacaaagttacattcacaagcagcttcaaattgaacaagccaaaggttcagaaaactgttgcataaaattggagtgatctcacttatagcagtttatagcagggctgaaaatacactggcaaaagttcagacaccagtgggggaaaatgaacaagtaaagcttcgagattaattcactcattttttgttttgttctatgtcatggaataatggagactccaaaaagccacgctgaagatgtgaatgcattcataaagaaaaattgtgcataaggctatgaaaaattaataccggtattattctataataattaatgggcccgaccccctatattttaagagctccccatgggttaatttaattttataacaatattataaagtaggggctcttatccttattaaaaaggaaaagaagttttaaggagctttagtaatttacaaaaggtccccccccaagtaaaaaaaggtttattagtagtattaatatttttgacaagggctttcagtttggtttccacaggggagttccagggcatgattttggaaacctgggacctttgcctccaggtatcaagcgatttttaagccttagcctctcaaatagctgggaatgtaagcctgcatccttagagcggccgtc

SEQ ID NO: 155320 - DNA, 1248 bp, Homo sapiens
accttggctgtttcacaccacataattttgttttccttttatgtaacttaacgtataagcaagaaggatgcaatgttgattctaataacattcggcacttgaaagaatcaccaagtgtttttttaaaaagcggttttctggtggccaacaaattggcctgtggttatgttgagtgactaattgtattttcttttctggaaacttgtgcaaagttggcagttttgtgttaacactaatactttgtttggcatttgtgccctatactgaccagaccatttttatacaagtgaattttttttaaaaaagacacttactgaagtatggcaatagtttaaggataaaaaagaagcatggttattacacatccccttgtagtgtatgaaaaaaagtgcatgacgggatttatgtactagtacaggacattttaaaaaatcagatctgtgctgtaaagcatgccagcacctctttagcactatatctaacaggtagtaaaaacaagcccatgtttttttctttttttaaaaatgtgcattaatgctaacataaatgaatagagctagccagcaaactatcttttcctgcatatctaacagctggatgtaactgtaaaaattaaacaaaaaagttaaacaaccatcaatacaattgttttacatcaatggcccctcaaggctaaatatttacaggtgaatctgccatgctttaattgaagattctttcaaaaccttaaagttcacaaaagacaactataagaagttcctttttgtttcttttttcttttttttcccttttatttttgcaggcaacagtcatgggtacaacaaattgtctctttggggaagaccaagaattattctgtcaaaactggggctagttgcacactgtgtgtgtagtgtgtgtgtgtgtgtgtatgtgcatgtgtgtgtgtgtgtgtttaaaggggtactctgttttcaccctgaaaatccaaagatcccactccttttcccaaaactataaaggggaagtgaaaaaaaattcaaaagcacctagtgtttatcttgtttatctcaaggaaatacgtgtgtgtatatgtagccacagagcatacataaatgcacacacacacacacacacacacacacacacacaccccaagtacataagcgcacactgactatggcagttcaaacacgtaggccatctggtgagagctggcatttgtagtgtccattctgagactaatctactgaagtgaagggaatgttt

SEQ ID NO: 155321 - DNA, 448 bp, Homo sapiens
tttttttaacgttcatactaaatttattctgttacttaagagtgtttatggatttacattccatttgtggactaattttctcactggatcttctttcctgcagtaagaggtgatttgggtcctgtggaaggtcattgtctcaatttgtctggtgtttgcagaagagatgtctgcaaagtagtagaagatcaaattggtgccttttggaaatttttaaagtctccacaggtttccagaggtgactgtagctgcactgaaagtcactgcctggataactggcctggggtagttgcaggagtaggcctaaatccaggtgtgaagatccttgaactgggggtgtttctgtacctgttctgggactctgctccacttgccaacatttgagtggattcatttgtgttgtagtcaagattcccgttgtggcacaaggacacatgcactcgtgtcc

SEQ ID NO: 155322 - DNA, 416 bp, Homo sapiens
ttaacgttcatactaaatttattctgttacttaagagtgtttatggatttacattccatttgtggactaattttctcactggatcttctttcctgcagtaagaggtgatttgggtcctgtggaaggtcattgtctcaatttgtctggtgtttgcagaagagatgtctgcaaagtagtagaagatcaaattggtgcctgcaggttgtttttcctattttctgaatgttaatccttgccttctggaactcaacattaccccaggagagaagggctgatctccatgatgtggtttcctcagggtctcattaagggctggtgatacaggagcactgcctacccctcttcctcacgtgagagtggtacattctctgttgtcatggctgggatggctccatctggggtagttgcaggagtag

SEQ ID NO: 155323 - DNA, 513 bp, Homo sapiens
aacgttcatactaaatttattctgttacttaagagtgtttatggatttacattccatttgtggactaattttctcactggatcttctttcctgcagtaagaggtgatttgggtcctgtggaaggtcattgtctcaatttgtctggtgtttgcagaagagatgtctgcaaagtagtagaagatcaaattggtgcctggggtagttgcaggagtaggcctaaatccaggtgtgaagatccttgaactgggggtgtttctgtacctgtagagattgcagactgttctgggactctgctccacttgccaacatttgagtggattcatttgtgttgtagtcaagattcccgttgtggcacaaggacacatgcactcgtgtccaactccaaatagtagcttcacatagtatgtcagcactctcccaccatcatctcttctagaaggtcttccgctggattggaaatggcctgctgcaggacactcagcagctttcagtagttcatccagacatccagtt

SEQ ID NO: 155324 - DNA, 442 bp, Homo sapiens
gactgcacgctgcaggaattcggcacgagcttgtgccacagcgggaatgtgagctggatgacaaatggagatttggacttgtgataattggcctctgtgtcattgtgtggaagactgactggtccctttatttcctgtagcttgactaccacacaaattaatccactcaaatgttggcaagtggagcagagtcccaggacagtctgcaatctctacaggtacagaaacacccccagttcaaggatcttcacgcctggatttaggcctacacctgcaactaccccaggccagttatccaggcagtgactttctgtacagctacagtcacctctggacacctgcggagactttaaaaatttccagaaggtcaggaatttttggagacctttcttatggctacgttgcctgcaaaggtgaatcaataagcttctgaactgactta

SEQ ID NO: 155325 - DNA, 842 bp, Homo sapiens
tcagtaagaggtggtttgggtcctgcggaaggtcattgtctcaatttgtttggtgtttgcagaacagatgtctgcaacatagtagaagatcaaattggtgcctttgcaggcaatgtagccatgagaaaggtctccaaaaattcctgaccttctggaaatttttaaagtctccgcaggtttccagaggtgactgtagctgcactgaaagtcactgcctggataactggcctgcaggttgtttttcctatttttctgaatgttaatccttgccttctggaactcgatattaccccgtgagagtggtacattctctgttgtcatggctgggatggctccatgttgaacatataaattccaggttctagaagcaaaaaagcaaaagatgcattggatctgcatagggaactgcaagccatccaggaacctcaggacacactcagaaacaaccacgtggaccacatcgcccaagctcagctgcatggctctccgttgggctaggatgaggacctcttccaccaggctcaactggagtcctatcccatgtcccaggaccacaaggagcatctctttttttggaatcacactgctccactcgaaggacagccctcagttctctgtcttcaaaagaggctgcaaatggtgctgattgggagggagccgccagcagcatcaccctctacaactggggtagttgcaggtgtaggcctaaatccaggtgtgaagatccttgaactgggggtgtttctgtacctgtcctgggactctgctccacttgccaacatttgagtggattaatttgtgtggtagtcaagattcccgctgtggcacaaggtcacatcgac

SEQ ID NO: 155326 - DNA, 447 bp, Homo sapiens
cctttcagtaacctgaagctttcaccgtaaaagtgcttgtattgcccaaaaacccatcgtgtcgctggtcggggtcctgcggaagctggctgcctgccgggaacacccacgggctccctcaattctacatggcccttaccgtcacttgaagttcacagcacacgcaggcaaacagctcctgaacatgtccaccaccttcatgggcaggtcccaggccactggaggatgtgtccagacagacaccccaggtccaccgaccctgctgcaggacactcagcagctttcagtagttcatccagacatccagttggaagtgggatttcctggaggaggaggaggtgaacctggagctcccgccggcctctgggcgctccttggtggaaggagagggacttggtcctgagcctgccccggatctacctacaccacctcgtgccaagcatggag

SEQ ID NO: 155327 - DNA, 922 bp, Homo sapiens
  misc_feature (1)...(922): n = a,t,c or g
ttttttttttttttttttattctgttacttaagagtgtttatggatttacattccatttgtggactaattttctcactggatcttctttcctgcagtaagaggtgatttgggtcctgtggaaggtcattgtctcaatttgtctggtgtttgcagaagagatgtctgcaaagtagtagaagatcaaattggtgcctgccgaagaaggatgaagtgttgtagaacatggtggattttaatgccaattccaacaccacttatcatgtcagattatcaagaaccccttaaacataagttgaaatgaaactggggtagttgcaggagtaggcctaaatccaggtgtgaagatccttgaactgggggtgtttctgtacctgtagagattgcagactggtttgctgggactctgctccacttgccaacatttgagtggattcatttgtgttgtagtcaagctacaggaaataaagggaccagtcagtcttccacacaatgacacagaggccaattatcacaagtccaaatctccatttgtcatccagctcacattcccgttgtggcacaaggacacatgcactcgtgtccaactccaaatagtagcttcacatagtatgtcagcactctcccaccatcatcttttatagaaggtcttccgctggattggaaatggcctgctgcaggacactcagcagctttcagtagttcatccagacatccagttggaagtgggatttcctggaggaggaggaggtgaacctggagctnccgccggcctccgggcgctccggaacctccccgccggccccagccccaaagccagggcgatggcgcctacatgacaatgggtgaagaaaactcaggtcctccacgaaatcgtcgacccggtaattcctnnccggtgcggcttgctcagcctatttagtt

SEQ ID NO: 155328 - DNA, 883 bp, Homo sapiens
gtgacatcctaatgggctatgtgacgagaaagacgattacttaccaattaaattcactattacagcatataaacccaccactgtagctaaccattcaaaaacatttactaggcactccaagctcttagaagccccctacaaaggtatttttaaaactgtgcagagcaaagggtgacagaaaccactgttagaatgaaacaaatatgcgtgagttaaatgcagctgctaagactttaagtgttgggggagatgtcggtgaatgacagttactcacatcactatttacaacaaagctcaagtgtcaattctgaagtgccggggaagggtgaagggatgcggcagcgctgaacgcagaagccaccccaatcaacatgtggcggcacgcacaccctctgatgcctcaaaaacaaccacagcacaacgtaatggaggcgggaaacctcgttcctcaacgacttgtagcgttgtgtccaactctgtagactcatcgtcggatgtttgtcgatcgatgtccgtggaatctcagtcaatcgtcgcctatttcctgcactcccaggtgcaggcagccgggtacctgaaccctttgcatctcgccgttaaactctgccaagccccgggaacctctaacaactcagactgcctcaggcctcgtcgtcgacggtgtcaccgccagcacacgcccagcgaccacttcacctgctggccgagtaacgtgcaacaacgcatcaagcatccttcggcccgcacgctcgagtcagctccatggcctgctaagtcgccagctatcttcgcggatggcccgacgggtggcgcggcctgcatcctgcaggccctctttcgtgcggggagcaccgcgaaggcagcgatggtcgccagccgctga

SEQ ID NO: 155329 - DNA, 512 bp, Homo sapiens
gcaagttggtttgcagatcaaaggcagtgtgtgagaagtacttaacccagcacctggcatatagtagatgttcaggacatcgtagcaggaataagggagacatctcacaaaacattttgtgagaaaggatcagtttctatctagtcaatgtcttaaacattcataggttgttcatggtgggagctgctcgaggaatcatcctagttttatggaggaggaatctgaagctggaggaattgtctccttcaagattacttagttaaaggcaaacaggttcatagccagtggctcttcaccaacccacaaaaaggcctcagattataattttgaagattaagtatatgaaagtgctatttgagtgattaagtgtaagcatcagatcattttgaactggtgagatggctcacgcctggaattccagcactttgggaggcccaagagggaggattgtttgggcccgggagttcgagaccaacctgggcaacattttgagagaaagtccctacaaaaaa

SEQ ID NO: 155330 - DNA, 379 bp, Homo sapiens
gggatgggggtgtctacggtgacagctgccaggatcctaaaagggcagaagaaggacaaactggggcctgagatacccctggccatggaccgcttcccatatgtggctctgtccaagacatacaatgtagacaaacatgtgccagacagtggagccacagccacggcctacctgtgcggggtcaagggcaacttccagaccccgcgccccgctgatctttgcttcagtccttgaatcacctgtgggacttgaggactcgggatcttcaggacgcctggagaaaagtggtttcctgccaccctgctggccaaggaggctcctggggtggggatcaccagggggattttgacacagccttcggctggcccccactaagctt

SEQ ID NO: 155331 - DNA, 701 bp, Homo sapiens
ggttgggggtgcccacggtgacagccaccaggatcctaaaggggcagaagaatggcaaactggggcctgagacgcccctggccatggaccgcttcccatacctggctctgtccaagacatacaatgtggacagacaggtgccagacagcgcagccacagccacggcctacctgtgcggggtcaaggccaacttccagaccatcggcttgagtgcagccgcccgctttaaccagtgcaacacgacacgcggcaatgaggtcatctccgtgatgaaccgggccaagcaagcaggaaagtcagtaggagtggtgaccaccacacgggtgcagcacgcctcgccagccggcacctacgcacacacagtgaaccgcaactggtactcagatgctgacatgcctgcctcagcccgccaggaggggtgccaggacatcgccactcagctcatctccaacatggacattgacgtgcgacccccgggccaagggctggggctgggcagaggggaaggtggcacaggctcagatccaggcaaccaaaagcctgatctgggtcagcaggttctggaggtgatccttggcggaggccgcaagtacatgtttcccatggggaccccagaccctgagtacccagctgatgccagccagaatggaatcaggctggacgggaagaacctggtgcaggaatggctggcaaagcaccag

SEQ ID NO: 155332 - DNA, 2781 bp, Homo sapiens
gctgccctccagacatgctggggccctgcatgctgctgctgctgctgctgctgggcctgaggctacagctctccctgggcatcatcctagttgaggaggagaacccggacttctggaaccgcgaggcagccgaggccctgggtgccgccaagaagctgcagcctgcacagacagccgccaagaacctcatcatcttcctgggcgatggggtgggggtgtctacggtgacagctgccaggatcctaaaagggcagaagaaggacaaactggggcctgagatacccctggccatggaccgcttcccatatgtggctctgtccaagacatacaatgtagacaaacatgtgccagacagtggagccacagccacggcctacctgtgcggggtcaagggcaacttccagaccattggcttgagtgcagccgcccgctttaaccagtgcaacacgacacgcggcaacgaggtcatctccgtgatgaatcgggccaagaaagcagggaagtcagtgggagtggtaaccaccacacgagtgcagcacgcctcgccagccggcacctacgcccacacggtgaaccgcaactggtactcggacgccgacgtgcctgcctcggcccgccaggaggggtgccaggacatcgctacgcagctcatctccaacatggacattgacgtgatcctaggtgggggccgaaagtacatgtttcgcatgggaaccccagaccctgagtacccagatgactacagccaaggtgggaccaggctggacgggaagaatctggtgcaggaatggctggcgaagcaccagggtgcccggtacgtgtggaaccgcactgagctcatgcgggcttccctggacccgtctgtggcccatctcatgggtctctttgagcctggagacatgaaatacgagatccaccgagactccacactggacccctccctgatggagatgacagaggctgccctgcgcctgctgagcaggaacccccgcggcttcttcctcttcgtggagggtggtcgcatcgaccatggtcatcatgaaagcagggcttaccgggcactgactgagacgatcatgttcgacgacgccattgagagggcgggccagctcaccagcgaggaggacacgctgagcctcgtcactgccgaccactcccacgtcttctccttcggaggctgccccctgcgagggggctccatcttcgggctggcccctggcaaggcccgggacaggaaggcctacacggtcctcctatacggaaacggtccaggctatgtgctcaaggacggcgcccggccggatgttaccgagagcgagagcgggagccccgagtatcggcagcagtcagcagtgcccctggacgaagagacccacgcaggcgaggacgtggcggtgttcgcgcgcggcccgcaggcgcacctggttcacggcgtgcaggagcagaccttcatagcgcacgtcatggccttcgccgcctgcctggagccctacaccgcctgcgacctggcgccccccgccggcaccaccgacgccgcgcacccggggcggtccgtggtccccgcgttgcttcctctgctggccgggaccctgctgctgctggagacggccactgctccctgagtgtcccgtccctggggctcctgcttccccatcccggagttctcctgctccccgcctcctgtcgtcctgcctggcctccagcccgagtcgtcatccccggagtccctatacagaggtcctgccatggaaccttcccctccccgtgcgctctggggactgagcccatgacaccaaacctgccccttggctgctctcggactccctaccccaaccccagggactgcaggttgtgccctgtggctgcctgcaccccaggaaaggagggggctcaggccatccagccaccacctacagcccagtgggttaccagggcaggctcccttcctggggaaaagaagcacccagaccccgcgccccgctgatctttgcttcagtccttgaattaacctgtggggacttgaggatttgggatcttcagggacgccctggagaagggtggtttcctgcccaccctgctggcccaaggaggctccctggggtggggatcacccagggggattttgacacagccttcggctgcccccccactaagctaattccacacccctgttaaccccccagggggcccttctgcctcatggcaaaggcttgccccaaatctcaacttctcagacggttccataccccccacatgcccaattttcagcacccaactgagattccgaggagcttcctggggaagcccctgggtgcaggaacactggtcgagagccaaaaggtcccttcccccaagacatcttggacacttgggcatagatttctccaagaaggaaagactccccctgcctcccccagggcctcttgctcttcctggggagacaaaggcaataattaaaagggaagtgttttgtaattcccaggcattttggggaggccgaggtggggcggattcacggaggttcagggagatgggagacccatccttgggtttaacacggtgaaaccccttatctatgcgcctgtagtcccagctacccagggaggcttgaagcagggataattcgctttgaacccgggcggcgggagatttgcagttgagccgaggtcatgccgactgcacttgcagcctggggcgaacagagcgagatttttgcctcaaaaataaacaaataaattttaaaaataaataaataataaaagaaagtgttagacaatgaaa

SEQ ID NO: 155333 - DNA, 224 bp, Homo sapiens
gaatttgagccaaccaaaatattaaacctgtcttacacacacacacacacacacacacacacacacacacacacacaccggattgctgtccctggttcaagtgtgccaagtgtgcagacagaacatgagcgagtctggcttcgtgactaccgaccataaacccacttgacaggggaaacatgccttgggaaggtttaattgcacaatcccaaccttgagctgcg

SEQ ID NO: 155334 - DNA, 484 bp, Homo sapiens
ttgtttttttgagaagcagcagctgcatttgtaaaaatgtgaaagtgccagttcagaggtgttgtagcttgccaccttggaaggcgtgtgtgggccggtagctctgtgaacacacgtgtgaacccggcgttaggacacccgggccctccttcgtagtgtgaacactctggccgtgtcctgcagcttcgccttcttagctccttgctgggattttccagcatcccttagacttgtcctcttttgtcctttgggtctgaggtcacactgggcctcttggctctccatggagctcagtgtgggtgtgtcttgccggcaggcaggttccggggccgcagcatccccatcgcccacccggatgttcctggggctgtaggccgccagctggcacagggccacggctgccgtctgcttctgctcctcgatgctgtcctccgcgcatgcgtctggagcctcgtgcctcccgtcgatccgggacatccggaaa

SEQ ID NO: 155335 - DNA, 1583 bp, Homo sapiens
tcgatacgacttttttttttttttttttttttttttttcgtacacagtaaacataggcaatttttattagtcaatgttagaaaatattttttaacgaactatgtagtttacaaagcttaaagtatttgctatctggcttttaagaaaatgtttgcccatcccttccctggagacttggagagcaaggatggctctctataccttttatagtacctggcatttagtaggtacatattaaatatctgttgaaagaagtgaagagcctcaaggcccagctctaactcctctttaatgggaggctctttttttggaagggcagggctagacaggtatgggtcagttctcttctgatagtcccagagtctacagcgaaaccaaagatgaaaagctctgaaaggaagagacaccagtactcacaggtctcatgtcccatgctcccgtccaaggggacctagctacttccttaccctttctcattttcagtagaagaaaagtgttgtgagactggttaagaccctttcccaccaattgctgtggtgaaccctccagcaagggcatggctactttcaggaaagcaaagagggtcctctgcttctctatccttcccaaaaaacatgggctggggtagaccctaaagagcaggcatggaggactgtgggaaggacctcagccttgctgtagaagctctctgcaaagcaagaggcagggtatggtaacaaatgccaattcctggttaaattggacttgacaggtgaaagatgtcaggctgtgtgtggtcacattgtacatatgcatgcctgggggttaccaggctgtatgcaaatatacaaggaagaggtaggctctgagaacctgccagggcccctgggatgagctgtggatttttgcccctgatcccatgaattggagggtcctctgctcaaaacatatgatatacatgtcttcttttaatttggtatcgtctttaggtccggaagagaaaacattcccttccttgtaccaaagtcctcaggctcaggttccctgagtccacagagggttgcctcagacgaactgggatctgaagtcctgagaaagcaccagcttccaccactcccaagtcctggagggtatccagtaactgctcccaggcagcaccaataaagcaattctccagaaagatgggcaggcctcccacaccatcatgcagggtacaggggcactcacaccaggcccagcacctccagcccgtggtccttggcccctgttgcgctggcctccacagccaacagctgctcgagcgtcagagatttggcatagaagtgggccacaacacgtggccttgatccggcgtgagagctgcggtagtcagggcgctccacgcggaaggcggccgccgcctcgcccagcagttccagcagaccacggttcagcccgtcctccaggctgctgtcttgcgagtccacgaatccgccagggaagcccaggcgcccatcaaagcgcatctgcatctgagagaggaggaagcagtatggcgtagcgcagagggaggcggccagagagaattccagggtccggcgcgtgcaggagcgcatagcaggcat

SEQ ID NO: 155336 - DNA, 541 bp, Homo sapiens
tgttcctgcaggtcttgatatgcgaggacgctgtgtcttacctgccacattttcttcttctttcttgagacagacccttgctccatcacccaggccagagtgtggtggtgcgaacacggctcactgcagcctcgaccctcaggctcaagcgatcctcacgcctcggacccccaaagtgctgggatcacaggcgagagtcaccatgctggcctgaatcttcagggtattttacggttgaagtgtcacttacttaaccatccctgtttcaagagtgtaggtggtcaccctgtctctgccgctgacctggcctggaccctcggctgtgaaagggaggggtgggctgggctggaggaacctgaagccctcgtgatgtcacaagcccatctggctgggcatcccctgcgctgcacatgccccaggtggcccccacagcagaggcgagccactggagggtggagggcttccacgggacggtcttcagggggagaaggaagggcccaggcccccaggagactcaggagaccagagcctggggtcaggg

SEQ ID NO: 155337 - DNA, 1021 bp, Homo sapiens
ttttttgtaaaattttaaaaatttaaatttattaggatttattaacacaattacacagaataaagttcaggatttcattaatgatggtcaccaatatgtgcttctttgtggctttttaacccataattctcatgattcaaatttattcatattatagttgaatttcatacacagcttcacaatgtggatattacaggtccaccagtaaaattaatgaaaacatatctttcatgaaaggcacataaagaatctaaactaacacatttaaggaactttgataactttgaatttctttacattacaaagaagaaaatcctccaaatgaaacagatatgaatatagtttatgggttacacacacacacacacacacacacacacacacacacacacacacaaatatacttcaacccagtgacaacacgtaacttggaaactacttaccagcaacgtggtactgaaagactacccttttccaagatgagtaaaaaaaggagggtggggtgggaagttctggtttacttggatgaacaagggtcagagatggctcgtcatgaatagtcgaaagagaattattctatcaaagctcagtatctagctgatacatgacgcttatttgagcacacatataatctctgacttattaagcactattgctcattttgtaagtgtaatcgtccgtttcattctcagaaataatagtataattgaaaaagaaatgatataatctcaagcaagtggagaaatttgaattatctaagggaaaaaagtaattgtagcatagtgtgataattacatttgaaattagttatatgtataaatttaaatcttgcattatatcagcaatagagtattcaaagatccttcttgttatcttcccaacaaggagctatcatgtatgctaggtccaagagactcctcaagggaaataaaagcctcccccatcaatgtctcaaaattcattatgtccacaggttttttttttacccacaaaaatgctcttaggatccctccaaacttag

SEQ ID NO: 155338 - DNA, 3585 bp, Homo sapiens
atgctggagagcaaagaggaggatgtggaggtagaaaagtggtctcctttgagtctgcatcttcatacactgaagggatatggacaggtgcaagaggccagatactcacccaaggtaatcattgagatttggaaaatgggagttgattggtccacaggcctagttttaaaggcagagcagcattcttttgcatttggtgttatggaaacaggaatcagaataagaaaaaagaaaacctcaaatgaaagcaaatctggaggcccctccccatctcaaatgggaggctctgggaacctgattggaagaggaagaagaaagggaggagttaaaaataactgtaaagagccaaatctgagaactgaccctgctaaaaaagtcagacaagtcaagtggtgcagctggtgtgtgctagaaggtgagtctgttgaaatagtcagtgaggtcagagtagaagtaggagaacttaacatcataaaagactggggaagagagagtgtggagaaaggaggggcagtaatatccatggaagcagagagagtaaaaggccaagctatgatagcaactggtggagtgataactggcctggccgccttgaaaaggcaagactctgccagatcacagcagcatgtcaacctcagcccgtctcctgctacccaagagaagaagcccatcaggcgccggccccgggcagatgttgtggttgttcgtggcaaaatccggctttattccccatctggtttttttcttattttaggagtgctcatctccattataggaattgctatggccgttcttggatattggccccaaaaagaacattttattgatgctgaaacaacactgtcaacaaatgaaactcaggtcattcggaatgaaggcggtgtggtggttcgcttctttgagcagcatttgcattctgataagatgaaaatgcttggcccattcaccatggggattggcattttcattttcatttgtgctaatgccattcttcatgaaaaccgtgacaaagagaccaaaatcatacacatgagggatatctattccacagtcattgacattcacacgctaagaatcaaggagcaaaggcaaatgaacggcatgtacactggtttgatgggagaaacagaagtaaaacagaatgggagctcctgtgcctcgagattggcagcaaatacgatcgcctctttctcgggttttcggagcagttttcgaatggacagctccgtggaggaggatgaacttatgttaaatgaaggtaagagttctgggcatcttatgccccctttgctctctgacagctctgtgtctgtctttggcctctatccacctccttccaagacaactgatgataagaccagcggctctaagaaatgtgaaaccaagtcaattgtgtcatcgtccatcagtgcttttacattgcctgtgatcaaacttaataactgtgttattgatgagcccagtatagataacatcactgaagatgctgacaacctcaaaagtaggtcaaggaatttgtcaatggattcccttgtggttcctttgcccaacaccagtgaatccttccagcccgtcagcacagtgctaccaaggaataattccattggggagtcgttgtcgagtcagtacaagtcatctatggctctcggacctggggctggacagctcttgtcttctggggctgccagaagacagtttgggtccaatacatccttgcatttgctctcgtcacactcaaagtccttggacttagaccggggtccctccactctaactgtttcaggcagaacaacggaaacatccaagttgggcctagggttggatcgggaacaacaagcaaaggggatatatggaaactagagaacaaagaaagaccccgatgggataggtttgcttgtgcccaaagttggcatcaaaaaaggactttaccaataaggagaagcttcctaatgatttcaagatctcacaaataatttgagttttgaaacatgatgagtttttgggtaacaacctaaagaggggaacttctgaaacaaggttttaatgttaaaagaatatatcattttacaagggtatatattttaaaacgattttcactggtgtttccttcttaaagtattggctgtaagcctttttaatcaaatggtttgtagtgtattaaaattggctgcttagttctgtaatgaagatggttgtatgtttgggttacttgtgactgcagtactctatgttaccacacatgattttatttttctcttcctttgaaagcatgatctcttttattaatatgaatgcaaaatgcttgcatccaaattaaagcttattttctttacttttaagttctttgattgccctattcataaaatgaaatgtccagtatggaaaacatagggtaccaaagtgtggaccaggagtacaaattcagtcccaatactcaatacgtattatagatgaccatgagtgccaacccttggggatgtgattttccggaataattgttctttgtaggatttggttacattatttaaaatgaaaaagatctagttttagtgtgagctcagtaatgttaattggttaagttcattgtgaatcttgagttttagataagtagttattttttttcaatatcacttttgtttttagtgatattatatcaagaaacaacgtattcaagagccatggctgacagtgccagatatacttagggataaacatcaaagcgcgactatatgctggtataacgttagatactcggaatcacaatttatttgcgagctgacttgataaactaaatgaaccattaaaatttgtagaaatgctatcctgaaataatttatatacatggaagacaatgttggacttaatgaatttaagatacattatatactagttaatgctaactagtctcgagtacctgtttttagccatctgttactgtccaatagcacctcattcccacattctattttcccccggtattctttagatcctagtatttggaaaacaatcggctaaccttgacatttctttttaccttcatatgccactatctcggtagttcgaaaaaaatttagttcttgataaattgccttgaagtttaccttgtgctggagagcccttatgataactccaaagactttcttacggtataatacatgttgtttaggattgtgtttcttagtcactgaagataataaatattaaaaatggatgttttcatcagaaaattttcatgttttcctttaaggtaacataattgtaagaattgtttaataaaatactcaggaaattctaaaggtttctcccaatacctaaacatttctgaacatcagtattgcagttgtggaagagcagaaggaggatacatttgtttgtgttgctccccaaaattccaccttgcatttgcatcacaaacttccctcaattgaggcagttttctttgttagaacattaagtctgtgtattgtaatagagtgggctcaatattttactataaagcatttaataaactgttaccaatagaagtttgtgttcttcacacctttgctattgctttttaaataaaatgtacatttctgcttaaaa

SEQ ID NO: 155339 - DNA, 414 bp, Homo sapiens
cggacgcgtgggcggacgcgtgggcggacgcgtgggcagctacagcgagggcctcggccatccaagggtctcccaggtgaccttccctccaccccaaagccagtcctgtgtcaccaatcaaaggaaaggaagccgtcagcagagatgaacagaataaccaccaaggaagccacttcctcctgccccccaaaatcccctcttggagagacccgccagaaactctggaggagcctcaaaatgctccccgagagaggccagagggtccggcagcagctaaaaagccacctcgccactgtgaacttgtcgtcactcttggatgtccggagatccacggtgatctcaggccctgggaccggaaaaggcagccaagatcactcaggggatcccacctcggaggacagaggctacacggat

SEQ ID NO: 155340 - DNA, 510 bp, Homo sapiens
gcctccccaaagccagtcctgtgtcaccaatcaaaggaaaggaagccgtcagcagagatgaacagaataaccaccaaggaagccacttcctcctgccccccaaaatcccctcttggagagacccgccagaaactctggaggagcctcaaaatgctccccgagagaggccagagggtccggcagcagctaaaaaagccacctcgccactgtgaacttgtcgtcactcttggatgtccggagatccacggtgatctcaggccctgggaccggaaaaggcagccaagatcactcaggggatcccacctcgggggacagaggctacacggatccctgtgtggccacatctctcaaaagcccctcacagccccaggcaccaaaagacagaaaggtccccaccaggaaggccgagaggagtccaagccagagcaccagggcttggcagagcctgagaacgaccagctcccggaggagtaccaacaaccgccaccctttgcccctgggtactgctag

SEQ ID NO: 155341 - DNA, 966 bp, Homo sapiens
ttagactcctgaactgcatgctctaactctggaggactggtatccagccctggctttgatctctggctccttcaggttaagaacctgctctgctagaggggccaagctgctcccagacagctggtcacaacactccaatgggtggtgccaggcaaagcacttcatagggtagtggcagcaggatctgttcttgtttgcatgtgccagcggcagcacagcggggtgcacgcttatcggctgtgacagagtgctagtggatgtcagggagccagcctctgggagggcatttgtagcagcagcagtagtggcagtatggctggggtgggtgcaggggccacgctggcaactgtgcacctgttcattggtgccgatgatggggttagcatgggggcactggtgggtgcaggactgtgtgtgccctttgtgcatgttcacacgggacagaatgaaggaatcgcattcacgttgaaagtcttctgtccccatgcacaaagaagggtatgtctgtgcacttttgaggactttcagagatattggccattggcttttgtcctcatcaggttcaaagaggaccacttggaaaggttttacaaagcgctggctgcccagctgcccgggccatttaccaggcttgtccataggagacagagcctccacgcagttcccaaatgcatccatgctgttccatgcagtttcacactgttccatcttccacaggaaggtctgcaaagacctgaattccttgcaccctggggtctccatttgaaggcaaccccagtgtggccttttgcgaaccctcgatgctgctccatactgggggcaggcggctacttcgtccagctgactttgggaatgtcgtaatgctccgtgagtgtgtccaggtgtctgttgaagtcctccactctctgcttgtgggttttggatgccttctttaggatcctttccatttgcttccactggctccat

SEQ ID NO: 155342 - DNA, 467 bp, Homo sapiens
tcggcgagggcctcggccatccaagggtctcccatgtgaccttccctccaccccaggattttatgacagaggccgggaagctgcccctaccgctacccccacggctggactggtttgtgcacacccagatgggccagctggcccaagacggggtccccgagtggttccatggtgcaatctcaagagaggatgctgagaacttgctggagtcacagccactgggatcctttctcatcagggtcagtcacagccatgtgggctacacactctcctacaagtaaggcctgggccgggatccagggcaggggcaggtgggctcttgggtttccttggagggggcaaggggtgcttcatgtcatagcttctcaaaaagcagcagtaactgaggctgtggatctgagaacgggagctgctagccaagcaatgagtgaagcttttagccgtagtggcatgttttatctgaggcg

SEQ ID NO: 155343 - DNA, 630 bp, Homo sapiens
cccgccagaaactctggaggagcctcaaaatgctccccgagagaggccagagggtccggcagcagctaaaaagccacctcgccactgtgaacttgtcgtcactcttggatgtccggagatccacggtgatctcaggccctgggaccggaaaaggcagccaagatcactcaggggatcccacctcgggggacagaggctacacggatccctgtgtggccacatctctcaaaagcccctcacagccccaggcaccaaaagacagaaaggtccccaccaggaaggccgagaggtcggtcagctgcattgaggtgaccccaggggacaggagttggcaccaaatggtagtgagagccctatcctcccaggagtccaagccagagcaccagggcttggcagagcctgagaacgaccagctcccggaggagtaccaacaaccgccaccctttgcccctgggtactgctagagaacaggtccaccctggctctgggactcgctgccaggggctgccacactcctgaatgccttaacatttcttccatggccccacaccatggcatccgggggtcttcgggaacccgggaaatggaataaagatgtttttggggtctgaaaaaaaaaaaaaaaaaaaa

SEQ ID NO: 155344 - DNA, 2115 bp, Homo sapiens
atggagccagtggaagcaaatggaaaggatcctaaagaaggcatccaaaacccacaagcagagagtggaggacttcaacagacacctggacacactcacggagcattacgacattcccaaagtcagctggacgaagtagccgcctgcccccagtatggagcagcatcgagggttcgcaaaaggccacactggggttggctcacctgcttgaggaaacaggaactgcctcggggcagccagccccgccccattgacgtgcagaccttgaatcgaaacccaggctcctgcaggcactggcacagctacagcgagggcctcggccatccaagggtctcccaggtatgtgacccaagagcctcagccctcgaggagacagaacggtccagagcagtactgctctgggactgggatctggggatgcaaggctctgccagccgtgaccaccagggggcatccacgggtcagaaaccacggcttggagacccacccggccaggccacagagagaggcctccccaaagccagtcctgtgtcaccaatcaaaggaaaggaagccgtcagcagagatgaacagaataaccaccaaggaagccacttcctcctgccccccaaaatcccctcttggagagacccgccagaaactctggaggagcctcaaaatgctccccgagagaggccagagggtccggcagcagctaaaaaagccacctcgccacctgtgaacattgtcgtcactcttggatgtccggagatccacggtgatctcaggccctgggaccggaaaaggcagccaagatcactcaggggatcccacctcgggggacagaggctacacggatccctgtgtggccacatctctcaaaagcccctcacagccccaggcaccaaaagacagaaaggtccccaccaggaaggccgagaggaagctatgacagaggccgggaagctgcccctaccgctacccccacggctggactggtttgtgcacacccagatgggccagctggcccaagacggggtccccgagtggttccatggtgcaatctcaagagaggatgctgagaacttgctggagtcacagccactgggatcctttctcatcagggtcagtcacagccatgtgggctacacactctcctacaaagcccaaagcagctgctgccatttcatggtgaagctcttggatgatgggactttcatgatccccggggagaaggtggcccacacctcgctggacgccctggtcaccttccaccagcagaagccaattgagccgcgcagggagctgctgacacagccctgcaggcaggctgagggcggggaccacaagaaggatcccgcaaacgtggattacgaggatctcttcctctactccaacgcagtggccgaggaagctgcctgcccggtgtctgcccctgaggagctttttcctccccacatcaggctcttctatcgctaccaggacctggccccacagctcgtgcccctcgactataccacctgccccgatgtgaaggtgccctacgagctcattggcagcatgcccgagctgaaggacaaccccttccgccagaggattgcccaggtattctctgaggatggggatggccacatgaccctggacaactttttggacatgttttccgtgatgagtgaaatggctccccgcgacctcaaggcttactatgcttttaaaatttatggccttcaaatggagaccccagggtgcaaggaattcaggtctttgcagaccttcctgtggaagatggaacagtgtgaaactgcatggaacagcatggatgcatttgggaactgcgtggaggctctgtctcctctcccccaactccctgatggcggcccccaggaacaatcctcaaactgcaccagctctttcagctctcaccttccttatctgtacatcagccgtggtgacaatatggacaagcctggtaaatggcccgggcagctgggcagccagcgctttgtaaaacctttccaagtggtcctctttgaacctgatgaggacaaaagccaatggccaatcatctctgaaagtcctcaaaagtgcacagacatacccttctttgtgcatggggacagaagactttcaacgtga

SEQ ID NO: 155345 - DNA, 1582 bp, Homo sapiens
  misc_feature (1)...(1582): n = a,t,c or g
tgcagtgtcgtggaattccgagcaggtccaaaagggacccctgaagctgaaaggcgtcgcatagctgggagtgaccaagcggtgaggcccgagggcccgcgggattccgtcttcatcccccttagaccttttctcgggacccctggccctgatcctccgacccgccgcctcctcatgtctttttccaggaagaagaaaaagaaggacaaagacaaagcgaaacatcctggaagcaatgggagcgagcaaaaagaacgaggaggagaagcggtgcggccntggacaagcggaccccggcccaggcggacttcgagaaaatgcaggagaagcggcaaatggaaaggatcctaatgaaggctatccaaaacccacaagcagagagtggaggacttcaacagacacctgggcacacttcacggagcattaccgacattcccaaagtcaacttggacgaagtagccgcctgcccccagtatggagcagcatcgaagggttcgcaaaaaggggcacactgggggttgtgtgtggtttcctttgggtatattctggaaaacatggcttacaccacacccttgcatcttcttgctacagactgcttttccgaagctgtgttaccctcattctggaacttgattaaagtaagatcgtccttgtactcagtttaggcttcttggcaacatacagaagatacacccttttcgtttggatgggaaagtttcttaagtttatccagaggtaaagcccattgtgtgtctgtgtcatgttaaaaatgttttcacccgagttgcatgttaacgctctgagggccagccagctgtcttctcctggatgagacagactccagagggtaaggagctagcgccatggtggcctgcagtatgcagagccccgcaggacccagcgtgggcgcccttccaagcttcctctagctttgggcctatgctgtcccctgcaggccctagggaagccacttgcaactatgcggccttcagacttcctcctcagccacctggccactgagacagcatagcctgggtaacggaacagccacctaaggcaagaatggaacggacacaccttgctcctttctgagcccgtttcccaaaaccccccttccaggtgcttctaatgggtgttgccatagcagacgctgctaatgcatcacagcattctttgaaatggaaccagacacagcctgcctctcaatcctcagctgggggctcctagcagcctcttgtatttactcagagttgacacatcacacagatcctgtttggcattcctaccttacggacgtctcaggggtgacaggaccagggcagagccccggtacaaacagacaaggctgcagtcaaatgggagggtccaggtgtccgtgttggagggctgggatcttgtagggcctgtgcgtcctggctgaggatcaaaccacatatgttattgggagaaacgatttctgttgacgtagatattgaaagaataatgaaggcagaagagaaaaacgaagtgtggaatttggggttgtcctgtgtaaattacacaataaagcaaaagtcagttattgtaaaaaaaaaaaaaaaaa

SEQ ID NO: 155346 - DNA, 423 bp, Homo sapiens
tttcgtgctcgggagacatggcgggcgttaaagctctcgtggcattatccttcagtggggctattggactgacttttcttatgctgggatgtgccttagaggattatgggtaagttatcatttcaaaaagaactattcctctttctgtgtctttgtcactattagtatgggtgttagagagttcggtcaatttagcaccaagttctaaccagtgagttagtggagcccagtttatgaacacagtccctttgtgggtcaggtgtacttttgcagagggctctgttaaaaattgatgcattcatctccatacagcatttgtttaacacctactctggactagctggggacacgcaaacgaagagagagtcctgtcctcaaagaggaggtaaagttctagttgtgagtgagagacaggcaaacggc

SEQ ID NO: 155347 - DNA, 1145 bp, Homo sapiens
  misc_feature (1)...(1145): n = a,t,c or g
gtctggcttgggcaggctgcccgggccgtggcaggaagccggaagcagccgcggccccagttcgggagacatggcgggcgttaaagctctcgtggcattatccttcagtggggctattggactgacttttctnatatgctgggatgtgccttagaggattatggcctgggtccaactgacagcgtttactggcccttattcgtcctgattttccacggcatctcccccatcccccatttcattgccaaaagagtcacctatgactcagatgcaaccagtagtgcctgtcgggaactggcatatttcttcactactggaattgttgtttcctgcctttggatttccccggtaatccttgcccgtgtggctttgatcaaaatggggagcctgcggcctttgtgttgggcaggcaatgcagtcattttccttacaattcaaggggtttttccctatatttggaagaggagatgattttagctgggaagcagtggtagcactttattctgattacagtgcattgaatttcttagaactcatactatctgtatacatgtgcacatgcggcattttactatgaaattttaataatgctgggttttttaatacctttatatatcatgatcactttaagaaaagacttcataagtaggagatgagttttattcacagcaaatagacctgtcaaatttagattatgttactcaaattatgttacttgtttggctgttcatgtagtcacggtgctctcagaaaatatattaacgcagtcttgtaggcagctgccaccttatgcagtgcatcgaaaccttttgcttggggatgtgcttggagaggcagataacgctgaagcaggcctctcatgacccaggaaggccggggtggatccctctttgtgttgtagtccatgctattaaaagtgtggcccacagaccaagagcctcaacatttcctagagccttattagaaatgcagaatctgaagccccactctggacccaggacattttgatgagatccaaaggagttgtatgcacatgaaagtttgagaagcatcatcatagagaagtaaacatcacacccaacttccttatctttccagtggctaaaccacttaacctctctgggtgttacctgctcatttgttta

SEQ ID NO: 155348 - DNA, 1641 bp, Homo sapiens
cctgttgtggggctgaagctgctcccacctccctgacctacccctgctgcaccattcccccaactgggctggaaggttccataactggccagctgcccccataactggcagcattcccagacccagggtactctaataggggcggctcaggcactgagactaccgctcaaccccagggtggttttcaggagtccgaggtagccttcaatcactggactccatggccttcccttcgtgttgaccggaccttccttccagggcttttcctttgggggaggcggagaggggagaagaaggaagggaagggcagaaggaaggagggaagaaaagaaagcaaaggaacagaaggaaggaaagaaagatgggaggaagtgcagcaggaatagcaccctctccccgggaggccctagcttccgtgaggggccatcaccagccattccttggagggggctgtctccgcttttgcttgagcagggttcccaggagggagaaagagaagacaagagcctgatgcccaactttgtgtgtgtggggacgggggagtcagggccccccaagtcccacaatagccccaatgtttgcctatccacctcccccaagcccctttacctatgcctgctgctaacgctgctgctaacgctggctgctgctgctgcctgctttaaaggctccatgcttggagtggggaactggtcgggtgcccagaaagtctcttcgtgccactgacgcccccatcagggatttgggccgttctttcccccttcctttctgtgtctcctgcctcatcggcctgccatgacctgcagccaagcccagccccgtggggaaggggagaaaagtggggggatggctaagaaagcttgggagattaggggaccagaagagggtagtgggtgggctaggggggctgccttatttaaagttggtttgtttatgattcttatactaatttatacaaagatattaaggccctgttcattaagaaattgttcccttcccctgtgttcaatgtttgtaaagattgttctgtgtaaatatgtctttataataaacagttaaaagctgacagttcgcccttactcttggaggtccatgttccaggagggggcaattccttttcccccctggggggtccatggggtgtcccccatgcccccacatattggcacgtgccaggggaggtaaagtgcctgcatcccaaaatcggttctaggtcaactggcctcaaactgatttgccatgagctcacaaaatgaatccctatgcttaatgacccaggtcacataaaatccagcccacttacaggttttctggcatctgtttgggtgtcctaatttttttggcagtgtcattggaagaattttttttaaagcagtttattttaagaacatactgattaaatgcaggatcgctactaaaaaattgttttgtatccttggtgggtgtcctctggctattttatctacttttgaacactttcaggactttttagccagttttgcctttcttgaaaaatgttaatgttttcagcaataaatacattttgataatgactttgtttgtatcattttatgtttcacaaagtagagttgcttgatgaatgagatagcctgaaaaataaaatgcaaagagttcaatata

SEQ ID NO: 155349 - DNA, 410 bp, Homo sapiens
  misc_feature (1)...(410): n = a,t,c or g
cannnnnnnnnnnnnnnnnnnnnnnnnnnnnnnnnnnnnnnnnnnnnnnnnnnnnnnnnnnnnnnnnnnnnnnnnnnnnnnnnnnnnnnnnnnnnnnnnnnnnnnnnnnnnnnnnnnnnnnnnnnnnnnnnnnnnnnnnnnnnnnnnnnnnnnnnnnnnnnnnnnnnnnataatctcattccacatagccttatagatcctgtaaatagggggggtcacaaaagtaatatattgtgttatggaagataattttgtactgtgctgtttcctaaatcataccaatatcctaaagtcatgcacttcccagatgatcgtgatcctccaaatgctttgtaagatggggcagggcgtggaaatatatatatnnnnnnnnnnnnnnnnnnnnnnnnnnnnnnnnnnnnntagtattt

SEQ ID NO: 155350 - DNA, 757 bp, Homo sapiens
ttttttttttttccaatgcaacttgcaccaaagctttatttgctatttttcatagtctgaatgcaacatctttgtacatgcaaaggtcatcttgttttattgcagtcgaccagatttccaactgctcttctgtgcctatggaaactttctttacagttacaaaatataaaagcacttgtaggacgtccaatactctgtgagggtctggtaagcccccatttgttttttaacattaaaaaataataagtttttcctagaatgacttcctcaagtcacacgggttaggaggattctttctggggactgggataaaggtgcctctcggtctgcccttccggttcaggaactcctaggaggcttgtggaattccctaaggggcaattggcaagggaacaccgcaggcagggaaggctttaactttccctacacaaaggaactcgaggctcccttttctatcgtggactcaaggatctgaggggagggaccccggaggaaagggttaggggaaaatatatacctatacttgtgtgtgtgtgtgtctctgtgtgtgtgtgtgtatatatatatatttccacgccctgccccgtcttacaaagcagtgtggaggatcacgatcatctgggaagtgcatgactttaggatattggtatgatttaggaaacagcacagtacaaaattatcttccataacacaatatattacttttgtgacccccccctatttacaggatctataaggctatgtggaatgagattat

SEQ ID NO: 155351 - DNA, 589 bp, Homo sapiens
ctacgaagttccggtccaggtctctgacttcgggcttgttcgctggtggcgtcggagccgagccggactggtcaggtcagaggcacgcaggggccgttccacgggcccagccccgccgtggccgtggccgtggctggcgtgcagctcgcccatcttcgcccaaacatgctgggcgtgtcgctccttcttgccttgtcggttctcttatcactacgtggcccgtcaaccatcccaaagaagcaggaaatgaaagtggcgctttctccgccccaggtctttccccctcttttctagggttccagggacatagtctcgaggcaagatggagggtatgaggggccttcaacacttcactttcatccctttctacccatcacaacgatacaaaagcaactacaccctggatttttccaaacaactttttatttcctcaagaagtcttccttaaatccctatgggaacaaagaaagcctgccactagaatcgagggcccagtatacgggggcttgcaaattctcacacctccccccaatataaaaatatagacttttttttgtggtcccaaaaaaaaaaaaaaaaaaaagtcgac

SEQ ID NO: 155352 - DNA, 534 bp, Homo sapiens
  misc_feature (1)...(534): n = a,t,c or g
ccttggactgggaattccnttgccagctttcaagggacatattcatctgaccacagggagaagctgacatctgtcatattcttctgcctcacgtacacacacacacacacacacacgcatacgcactcttaggctttcaagaaggaagtgatgtggcagagtgaccgctggcacgtgtcgccactccactgaaggatccactgaagaatgagcttgcacaaagggccgtaagtcatggctgccaacaattgccccatggcccaacttatatgacctctattcttggctgaccacaagccctgcccacgggcgagtatccatggtgctgattcttccagttgtcccaaaacaaattttcaatgaattctgatggccccaaggcttcccttgttggccaagtcactgataaggttccacttgcctcaaccagcctatagctcttggacagggggagacagagtcagacgcaacacctgtcctgtgtcccagacagtgggggagggaggacacctggggcctcagtgctcacccgtg

SEQ ID NO: 155353 - DNA, 1364 bp, Homo sapiens
tataaccccctttgcttttccccacaaacgtgtttaactagcgccaaatttggcccatttttggaacaccccccctcccgagcccccttcaaaaggacaaggcctagtgattcgtccgcacacaaacccgtacgctaaggcgcatccatcaggcactgtcaggcatcgcggctctcgattacagtgcgaaggattctcagcatagtggtacgcaagtttccagtacgcgtgaaacgcgccagtgcagctaaattaccctactaagggataagttgcgccgttaataaatcttttttttttttttttttaacacttatgcatttattttcatgtgtaagaagaaaaacgtaactagcacgtgaacatgactgcatggatacacggctcagcacgaggctaaagtcagaagtgagtgaaaacaaaatagcatgttgatttaagtgaaataacagaacaggaggcctttggttataacaattgtggaggtggtctgtgaatgcagaagttcgggactccctgctctatgctccaggacaagacgctgtggtctggggccgaagccccttgggggttctacaagagaagcctgccccaagtgcacgggcccctggtggcattctcgtggggagcgtgtgagacccccagggaggggaaagcacattctggtttaacttgtcccgtgccgtacaaaaatgttcttagaagttgataaaagcaaacaatgattgattcttcctttcaaagggaagaagaatcttccagggtgtggtcttgaggacgcagaggttacaacaacatggctgggcttgcagggcccaagtaggacttgaggtcataaccagaggacttgaagggacaccgtgtccttggcaccatacttggagaagtgcttgtttggtgtaagggggagagggggtgcatggcccaaagtcaaggctgaagggaggaacgcttggcccctgcaccctgttcccagcataataccaggctctcaccccatgcctgctgaactcaaacacaagacccgggaggtgcccgccagaaaggcaaggtcgggggatgctgaacatcccggggtgtctgcggaccaccctctcctcttgggtcctggccctggccccactttgcaccacacattcccagggcggggaagtccatggctgtgccccaactgggtcccattcctgtacatgtgcgaaccaagggggtgtttgctattatgctccccactaaatccaaagaatgttggttcccatcatttcaacctcaacattttcaaaaagcacttttttttttggagacagagtctcgctgtgtctcccacactcctgaccccaggctccctatcctctcctcgtgccacc

SEQ ID NO: 155354 - DNA, 900 bp, Homo sapiens
atgtgtctgtctttggacccatgcaagcttctatctcctgtgaagatagtggcctacatcgatcggtgtgtgtgtgctggtaggagctcctctcagtctcccgtgatagcccgcaagggcaagtgtttggtcagccccaaagggttctctgttgtgaaggtggctgctctgagcagaaggttgctgccagtcctacccacagccaggaagagtgagaaaggctcagaaacagcccccaacaggcttccaggctgccatgctgcattggcggggaggaaaactggatgtggcatcctaagtcctggcccagtttctgctttaccacttcctagccatccatttttctcctcaccctctgttccccatgaggcagccagtgagagcttcataaacatgtcagatcctgtaattcaggggtctctaagccccggggtcacagtccagggccagttaggaacctggccgcacaagcaggaggaatacacacttgtggtatatattattgatggtgtagattttgtcactagtaactccagcagaagagttgtgatagagacgtattttaaagaattggctcgtgggattgtggggcctggaaatctgaaatctgcagagaaagcagcagctgaaattcagaccttggcgctgagagcgctgcttttgcgggtcggtggacggagagttccatgtaacaatctggaaggaaacttcacggacaggaagactgctggagaagagaagcgtgttagcccatttgagctgatgtctacacataccagcatcatccaccgatcagcacacgggccacatctagacccctacaaccgccacacatacctctataacaggccctatgcaaccaactaccccagcaacatcaccccccaagatcactcctaa

SEQ ID NO: 155355 - DNA, 3826 bp, Homo sapiens
  misc_feature (1)...(3826): n = a,t,c or g
ctgtctgagcatttcactgcggagcctgagcgcgcctgcctgggaaaacactgcagcggtgctcggactcctcctgtccagcaggaggcgcggcccggcagctcccgcatgcgcagtgcgctcggtgtcagacggcccggatcccggttaccggcccctcgctcgctgctcgccagcccagactcggccctggcagtggcggctggcgattcggaccgatccgacctgggcggaggtggcccgcgccccgcggcatgagccggtgaccaagctcggggccgagcgggaggcagccgtggccgagccacagggatctgattcctcccagggggatgtcctgcgcctcagggtccggtggtggcctgcggcatcccttgcggtgccagaagccgtgggacgagtgtctttaatgttatagagctactcagagttgctgtttctccttgagatgcttttggagtgtgaggaagaggctgtctgtgtcattatgtgtgcgtcggtcaagtataatatccggggtcctgccctcatcccaagaatgaagaccaagcaccgaatctactatatcaccctcttctccattgtcctcctgggcctcattgccactggcatgtttcagttttggccccattctatcgagtcctcaaatgactggaatgtagagaagcgcagcatccgtgatgtgccggttgttaggctgccagccgacagtcccatcccagagcggggggatctcagttgcagaatgcacacgtgttttgatgtctatcgctgtggcttcaacccaaagaacaaaatcaaggtgtatatctatgctctgaaaaagtacgtggatgactttggcgtctctgtcagcaacaccatctcccgggagtataatgaactgctcatggccatctcagacagtgactactacactgatgacatcaaccgggcctgtctgtttgttccctccatcgatgtgcttaaccagaacacactgcgcatcaaggagacagcacaagcgatggcccagctctctaggtgggatcgaggtacgaatcacctgttgttcaacatgttgcctggaggtcccccagattataacacagccctggatgtccccagagacagggccctgttggctggtggcggcttttctacgtggacttaccggcaaggctacgatgtcagcattcctgtctatagtccactgtcagctgaggtggatcttccagagaaaggaccaggtccacggcaatacttcctcctgtcatctcaggtgggtctccatcctgagtacagagaggacctagaagccctccaggtcaaacatggagagtcagtgttagtactcgataaatgcaccaacctctcagagggtgtcctttctgtccgtaagcgctgccacaagcaccaggtcttcgattacccacaggtgctacaggaggctactttctgtgtggttcttcgtggagctcggctgggccaggcagtattgagcgatgtgttacaagctggctgtgtcccggttgtcattgcagactcctatattttgcctttctctgaagttcttgactggaagagagcatctgtggttgtaccagaagaaaagatgtcagatgtgtacagtattttgcagagcatcccccaaagacagattgaagaaatgcagagacaggcccggtggttctgggaagcgtacttccagtcaattaaagccattgccctggccaccctgcagattatcaatgaccggatctatccatatgctgccatctcctatgaagaatggaatgaccctcctgctgtgaagtggggcagcgtgagcaatccactcttcctcccgctgatcccaccacagtctcaagggttcaccgccatagtcctcacctacgaccgagtagagagcctcttccgggtcatcactgaagtgtccaaggtgcccagtctatccaaactacttgtcgtctggaataatcagaataaaaaccctccagaagattctctctggcccaaaatccgggttccattaaaagttgtgaggactgctgaaaacaagttaagtaaccgtttcttcccttatgatgaaatcgagacagaagctgttctggccattgatgatgatatcattatgctgacctctgacgagctgcaatttggttatgaggtctggcgggaatttcctgaccggttggtgggttacccgggtcgtctgcatctctgggaccatgagatgaataagtggaagtatgagtctgagtggacgaatgaagtgtccatggtgctcactggggcagctttttatcacaagtattttaattacctgtatacctacaaaatgcctggggatatcaagaactgggtagatgctcatatgaactgtgaagatattgccatgaacttcctggtggccaacgtcacgggaaaagcagttatcaaggtaaccccacgaaagaaattcaagtgtcctgagtgcacagccatagatgggctttcactagaccaaacacacatggtggagaggtcagagtgcatcaacaagtttgcttcagtcttcgggaccatgcctctcaaggtgtgggaacaccgagcctgaccctgtcctgtacaaagatgactttcctgagaagctgaagagcttccccaacattggcagcttatgaaacgtgtcattggtggaggtctgaatgtgaggctgggacagagggagagaacaaggcctcccagcactctgatgtcagaattangtaggtttaaggttggaaaggttgaccctacttggatcttggcatgcaccccacttaaccccactttctcaagaaccaagaacctagaatgaatatcccaagcacctcgagctatgcaacctctgttcttgtatttcttatgatctctgatgggttcttctcgaaaaatgcccaagtggaagactttgtgggccatgcctccagatttaaatcccagctgaggcctcccctttgttttccagttccccatgtaacaatctgggaagggaaactttcacgggacaaggaagacttgctggaggaagagaagcggtgttagccccatttgaggtctggggaatcatgtaaagggtacccagacctcacttttagttatttacatcaatgagttctttcagggaaccaaacccagaattcgggtgcaaaagccaaacatccttggtgggattttgataaatgccttgggacctgggagtgctgggcttgttgcacagggaaggagcaccagccgctggagtcaggatcctgttcagttccatggagcttatttcctcttttggtttggcttttttgatatgattaaaattattttttattcctttttctactgtgtcttaaacaccaattcctgatagtccaaggaaccacctttctcccttgatatatttaactccgtctttggcctgacaacagtcttctgcccatgtctgggaacacacgccaggaggaatgtctgataccctctgcatcaagcgtaagaaggtcccaaatcataaccattttaagaacagatgactcagaaacctccagaggaatctgtttgcttcctgattagatccagtcaatgttttaaaggtattgtcagagaaaaacagagggtctgtactagccatgcaaggagtcgctctagctggtacccgtaaaagttgtgggaattgtgaccccccatcccaaggggatgccaaaatttctctcattcttttggtataaacttaacattagccagggaggttctggctaacgttaaatgctgctatacaactgctttgcaacagttgctggtatatttaaatcattaaatttcagcatttactaat

SEQ ID NO: 155356 - DNA, 812 bp, Homo sapiens
ttttttttttttttggtaaaataatgttttattccatggatgaacagacgctaccatgccacatccccacttccctccgaccagatgtcgtggccagagctggcttccccttccaaacctagctggctttgtagtcgttcaggcccattgaaatagcaaacgcacagtcatgtagcactcggatcggtcctgtttatcagcacgttggtcctttcacaaatgggggtgaatcacctttaaaacacccagtgatggagaccttccaatcaccctaactactaacggacgttcagagctcatgtgggataaacccaaagccccaaacgccaaaatgcaacagggacgcatctcctctgctgatggggatgccaagggacacccccgcagggctgggagctcggagaagtcagtcctgacattcagcttgtccacaagctcaaaaggaaatgacggtaatggatatatttcaaactagcacttctagagtccagatcggccacagtgtcagcatgcaggctcaacacggggttagcactggcgggaggaggctgggttgactgcacagaggcctgacacacattgcttcctttatatacaagagaatgaaatatacactgggaacaccggctgcacatttggtgggggtgtatcttacaaggctaacgtagcacatcatcaacctcctgctcgtggcaggaaggtcacggagccacccccacgatgggagagggatgcgcgcaggcccacagaaccctcaggactcccgtggcccgagcacacacagcgggcctgtgggtggagttgacgctttg

SEQ ID NO: 155357 - DNA, 1738 bp, Homo sapiens
tttcaagttcattacgtttaatttttttccaaaaaagttttgcattgacagctgtacaatactttggtgttaacctgtggtcttccttcacctcagtgaactctgccctgcccatctgtccagaggaagtcttagctcctaccccccaccctccctggcgcttggatgggaggcgacacagtatgggattgtgaaatccctgctgcgatgctgggtatctggaaggggagaagggggtggaagcagcgcagggaatgctgtgagatgagaagagctcacatcgatgggaaatggccctggcccaggctccagaatgtgacagcaacagtggcctggctgtttttcccggggggcgggggggcgggactggcaaactgggaggagaggcaattaagacgcaacaatcaaaccaacctttaaatagtaacttttaaaaatataaaaacagttcaggtacaatgacttttcattcttttttttcttcgggaataactttcttctaccctcaccctcccttctggctagagccttaacaagaggtggcagatggacatctgagacccagagagactctggacgccccacgcgcccagccttggagaggcacagggtgtgtcgccagcctccacatcccatgcccggtgcgctcagctggggagcaacctcactgaaggtgggtggctttccctggagcccctcccacctcctcagcagacggaatcacacattacaaaataatccataaaaatgcaagtataaaacatttatcttcgatatgctacatccaatggagagcctgccaccagggactcacagcggcctttagcttttctttaaaaggagaaaaaaaaaaaggaccaaaaggaaaaaaaaaacaaacaaaaaaaacccaacccaaatcctaacacctcagaacatgttggtaccaaaaggtggcacctgccagaggcgatagtctacctaacctgtttgggccacaagagactgcaatctgcaagaaatatccacagtgtgccaggatctgtgtccccctctcccaccccccaacccccactgctctgcccagggtgggggtgagggggatcctcttttcagactcacaaccctgtaggtttatacactttcccccctctaaggggagaggaagagactgtaggcgggaagggggagaaggcattttataaaaggacatcacttctaattctttttattcaaattaaaaaaaaaaaaaaaaggcccccacatcagttgctttttttctttggtagctccctgagctgagttgctatgctggcttctaactttttggcctttttaggctgggtcccaagattcaaaaaagctggagagggggttcctttgaacttccattgctcacaacaataactaagggggcccccaaagagaaagaccaggctgaggaggagagagggagagaccaagaaagagagacacagagagggcaagaggcagccagagtgcaagagaccacagaaagctccatttctgcgggtgtccgcctggacgggcccccatctcagtgccttccatccctcagtctggccggctggttatcagtccggatgcccagacccgtgtggaggcacacgcattccagcaggcaccttacggccaacctggttgccttttccacactctaagacttttctcctctttcttcaattggttcccctccctgtctcctcttcccaggtgagagcccgggaattccggaccg

SEQ ID NO: 155358 - DNA, 3707 bp, Homo sapiens
  misc_feature (1)...(3707): n = a,t,c or g
atggcttcttcaaagctccgagaacccgtggatgaagtttttgacctggacttggctgtgccagagacggccagactggacagcagtttacacaaggcccgggcccaactgttggccaagggccggagacaccggccatcccgctccaggcttcgggacagtgccagctccgcggaggatggtgaaggctcggatgggcccggaggcaaggtgaccgatggctgcgggagccccctgcaccggctgcgctcgcctttgcactcaggcccggggtccccggccgggggctctttctgcctggatcctccggggttgcggcgcagcctggacgaggacgagccgccgccctcgccgctcacacgctaccggcccctgcacaacgctgcgtcgcacgagggcctggccgccgcctcctgctctccgccgcgctccgcgccctcctccgacagctcccccagcttcgtgcgccgccacccgcgcgcagagccgcacagcgaagatgacagccgtgacgccagtcctcctgagcccgccagccccaccatcggcctcgataagaagactcgccgaaagttcctggacctgggggtcaccctgcgccgagcatccacgggcaagagccggaaggagaaaggcagcaaccgactgtccatgggcagcagggagtcagtggaggggtccggcaggtcagggggctccccgttcctgcctttttcctggttcacggacagcggcaagggctcagcatcctcgggtagcaccacctcccccacctgctcccctaaacacgagggcttcagccctaagaagtcagcttcccaggcccagctcctggctcatgcacaggaggcactgagcaactcctggtgcctagtccaggacttcggctccacccagatagggatggaatccactctgagtgatgactccacgccccccagcagcagccccaagatccccagtgggccctggcaggaggccaaatgttcttacccctaccacacgctgtctcagtcttcagatgagttcctggatgaacccctcccccctgtccaccactggaccagccagcaggtgggccagtggctgcagagcctcaacctggaacagtatgctgctgagtttgctgcacggcaggtagacgggccgcagctgctgcagctggacggaagcaaactaaagagcctggggctcagcaactctcatgaccgggcactggtgaagcgcaagttgaaggagatggcagcagctgccgagaaggagcgcaaggcccaggagaaggctgcgcggcagcgggagaagctccggcgccgagagcaggaggccaagaagagctaggggagggtgcacaggcgctggcacccggcaggggcagccactggctccgcgggcacaggcctcaccagggaggctggacctgggcgctgcacttgggctagcctggtcccacgctctcaggggggacatgctctctcttaccctgtcacttggtctagacccagagaccccagaaagggagaccccagggagagggcctagtaataaatcctattttgaggacttgtttggcacagagttcctgggggaggagcagatgaaggggagagggcagagaggccagggctgaggcaagtctgggaggctgggtcaggctgtcccattgccctcaggccatcgtggggctggggtggaggggagctaggaggcctgcctgcctgcttgcctgccagaggccctgaggccgggcccccagggctcagagctgggctgggcatttcagcaggagcccatgtgggagcggctcctctccactcttccagggggctgtgtggtgggagagctctgtcctgctcccccaagaggccagtgggcgctgcagcaagtcgcactcagggtagactcccagccaaactcctcaacaggagcgcagagaaagcagcctggggcgagtgcagtctttgccaggactcaagaggggaggatgaacatccccttctccctctcccctcctctgtcctgtgggtcccagggggcgagatgacaccacacaggtctgcctctcagggcccattcaagacctggtctttgacccattctccaagccaggactcccttcacttcctgctgcttcctcagagggcacctaagtcctctttgggagctgagcaaacaggaactgatagggacagaggacaccacttccaccagccaaggcctaggagctgctgacctggtcagccctcaccccagccaggcagagaggcaaaacctgggggtccccggcagctacgagattggaaaggttcatcagccctcccccatctgccccaggcattgtcagggaatcagtgggctcagaactggcaggcggtgcaagctctgcttccctgggccacactgagggctggggccagctccctggatgggggtggagtttaccagcagcctggggacagcatgtgtcctttttaggaaatgtccttggaggaagtgttcatgtgtggcgctggtcagcagctagtcccgcttccaggacactggtcagagttaccgatgaggcctgggggctcccgcttggaaacccctccagctcctcccatctgcccagacagagcggcagatggcaccaatgcatgctggctccctcattcctgcccaggggctgtggcttacggccagcaccctgtacctgggactcagcccttatcccccctctgctatctgtgctgggagaggggcttcggagggaaacagatatgaggacactggcaccatctgggcctggtggcagggccatgggaggttggaaggcacccacatccttaaagccatcagtagctctagtgggtgcccaccttgcatgtgaaggggaggcagttcttcaatttatttcaataaatccttatgatgtgccagtgaccagaatttctgtctgctccagttgttgggttggccggactctgctgggccctgagtatggtgggacaacaggtctgtcaccaggtgctgggccatccggcgttctgaacagatggctttgccaggtgttttactcacagtcctgagctgggccggacgtccccggtgcgtcatgtgggtggtcacagggcaccgcagtgtgcgtgtgtacgtgcgcacgtgtgggtcccctcccccagggatgcagccaggccagtctcattcagtctcctctttactgtgggtgtgggtgtcactggtcactgccacagccactgggagggacacacagctttaacccctgtgtgcttaggggaagggtgggggcattcagggttataaaactaactatatacacagaaggtcctagggagaaagccaccctgagcacacatgtctgggcacagtgggggcctgggggctgaagctcaggcaggatggactaggcttgtggaggagcgggtgggcatgagcatgtgaggacatgctgggagggctcaggaggtggcacagacattgccaaggccactgcagggccttcgagcagcttggctgggatgggcaagcttcttcggttttaacaaggttctttccacttttaggagtttngggccctgtgagagccaccccttccgccaccgaccttcaagccctgagccgaagggagaggctgcaggaccagcctcattccccactcacgggtgtaactcctttccccactcagtccccaggtctagagggcacccacc

SEQ ID NO: 155359 - DNA, 984 bp, Homo sapiens
atgccggccacagtgagcttgtggtatttagcttgccctaatccatccccatatcctcagcttcaaggtagccttgaaaagcaaccaccttttacaacagtaacagtgaatatctgcaccctagcagaatatctgcacttgagagaggactttaccccacgccgtgtctgcctgtgtgaactcaagcctctgataagctctccatttctgccagggctgaggtgtctggaaatcggacagtttaagaggcctccgtcaccgcgtctcccggccgctgtgccttctgtacgtcacgtactcaaagaggccgcccccagagcggcgaggcgacgccggcgcggacgcgtctcctccgaggaaaagccggaaggccgcattccgctctccatggaaacgcggctgacgtctctggaggaattgctgacactggaggatgttactgtggagttcacctggaggagtggcagctcctgggcccttttcagaaggatttgtaccgggattgatgttggagatctacagcaacctgctatcaatgggttatcaagtcagcaaacagatgcactctccaagttggaacgaggagaagaaccatggacaatggagatgaaaggcacagtcgaatctgtccaggtatgtgagaagcagcaagatcactcttcatccctacagccaaaggacccgtcattaacgccccgttcctcagcgactgcgttcaaatacagccccaatcaggacgctccacgcccatcggtacacagacccacaggccgcgagtccatgcccagaactcgaccacccgagcccgaacctctccagacaccactggcagcgacaaaacgccgatccacgtccgaaaacgcttcctattcagacgcgctcctgcgcggactcgggaagctgagcggtaaagaccgtgaagcgaggcgaggaccacggagccgcccgggatcgcgagttcagactgcgggcgccgctctatga

SEQ ID NO: 155360 - DNA, 1664 bp, Homo sapiens
ggaatcgccgcgacctcttaaaagctgaacttacttccctaaacttcttccacttctgggcccctcgcccaactccctccccctctaaacctccagagacggtcagccgcgtttccatggagagcggaatgcggccttccggcttttcctcaggaggagacgcgtccgcgccggcgtcgcctcgccgctctgggggcggccatctttgagtacgtgacgtacagaaggcacagcggccgggagacgcggtggacggaggcctcttaaactgtccgatttccagacacctcagccctggcagaaaatggagagcttatcagaggcttgagttcacacaggcagacacggcgtgggggtaaagtcctctgaacagacacggaacagaaataagttagtcttctcctcgcaggggacagtgaacggcgcaaacttctcaaaggccagaacccattattaccacaaaggcgcggcatcccttcttagcggttatgatggctgtgacgtctcagctcaatggaaaattaaagtcacctctgggcacctcagttcactattgtaaatgcgaagttttttaggaagccgtataaaaaactgaagccagagagactagaacaaaaaaataagcgagcggtgcgttgcaggtaacggagccagagcccttaggggagagcatcatgggggcggccatcttaggggacgttcggtgtccgtacggcagaaccatattctctctgagaagcttgcggtggaactggcccatggaaatgtctttagaagagaagaaccacctggctctgttcttgactctggaaaagaatccttttctagaattatttaggttgttgccagattaatttcctttagagagtttcccttgccccccacgacttcctatctttaaagcccaacaatagtatgtgaaatccctttcatatttgaaaccactgactattgctgctgcatctctccggtttctcctattcttaagtgcttgggcaatccagaataatctcccaatgctaaagtcagctgattaattaaccttaattacaatgcagagtcctttttgccatgtaacataaccatgggaattactctggggttgtagatctggctatgatatgatgacactaatgaatattttgcaataaaaacatactattttaaaatatatatatacatatatctttatatatgtatatttctacagaattattacaagttatgtcttatgatggtttcttataagaagcaaggaggaaaaggtccttaacattttcaattgtgttttttttaataataaagcatgcattctaatttacaaaaaccacaataaaggtactttcatcatgtcagtcttgaggctgaacaacacttaacattctttttccttttacctgtctgccttctcccttcccctacactctctataccccaccctccaggctctctgttccatcatcttatgcgtatggcccctttcccctgtgccctcttattacttccatctatcacgcagacacacactgtcactcccctaaacactctagtgttaaacaattgctgctgattgttttttgacaagtgccctatggggtaggatgttcacataaataaagtcaagccaaatagagaaatactatgagaatagacctattcagcag

SEQ ID NO: 155361 - DNA, 396 bp, Homo sapiens
atgactggcagtctgtttaggcgaggcccagaaacagaaagcaagtcttgtgaaagtcagaatctgggagctttgcagatgcgtcaagatgtgacccagcacattcacaggtctggtggctacgaggagagaccacttctgcttgagaagaacagagggaagaataaaggggactccgtcttgagcttaggtaccagcttagccacagtgggaaagagcaccaagccagctctttgggtccctgattccagtccttggctcttggatggcatctctggacctattctaggccagagaggagcccactgccctgaagggcctgaatccttgtgccagcagcccacaaagaggcatgccacaggtgagcctcatcatccttctgatggcagcagttaa

SEQ ID NO: 155362 - DNA, 1676 bp, Homo sapiens
ggaagtgcttggccacagtcgcagccccggcgccccgaagcgggaaaaaggctgggtgccgccgtcccccagctgcgcaaccctaggaactctcggatcaacctggatgccttccttcacaataatctcatggaggtaatttaaagaatcccttttttggagagtcagagagaaaagcaaaaaaaaagagcatgaggaatttgaagactgagagatgagttgtgtagcaccaacattttctttctgcctgaccttcatacctgatgaattaaaagggcaataattaaggtggaatttgcctcacatgaagttttattattttagttattaaaatagtttccaacactactgagaagcaaaaagcaattctcgttgttttaagaacataggatgtttggaagagtgagataggggacacattgaaaacagagaggcaatctgaaggctaccttgacgcatctgcaaagctcccagattctgactttcacaagacttgctttctgtttctgggcctcgcctaaacagactgccagtcatccgaaccgtggcaggatggagatgtttgtgtaaggtagactcaagtttgcaagactcaagaagggaaaccaccaaactaattttactttcacttaaaccagattgaaaccaagacttgaagaattataaactttgacattaaccattgattcactccaatgaaataattgtgttatagccagaatcatggtgaaattggaacaaggcttttgatgggatttttaattgagggacttatattaaattggatattttctttaatgaacagcatgtggccaaaattctattttcattaaagtatattaagcatcatgacaactcatattaaacctgcaacaaatgattaatgacatttagagacttcaaatgtcatgagacaccttaaatattaagaatcaaaaagaacacctcaaagttgtttctattcttagtaattatgcttaaaaaaacatctttccttgctttgaaagccagttgctaaaaataaaaactgttccatgaaaaatcacaatgcccaatgataaatttatgtatttgttttttaaagggggaggatggtgagaaaaatagaaagctcctggctgacatcagaggtcacaagatgagttcctcatttgtccaaatgacattcagctgctaaaacaaatcagacttcttttacagggctgttgaaaagacagttagtcaggaggctttcaatacatgactgcaagggaatcagacacaggcttagtcactttaagtttgcttaattgtccgtgtacccttagccccacgacttcaggggctcagcagctttcatccttcctggggcacccaaaccttgacgtaagggattcaaagacacactcataagaatcgtgaatttgtcctcatgcaaaatttgggggactggcctacaaaaccgaaacaaggagatcgtatcccctaagtgaaagggactttatattaattgtcagttataacaatatgtaaaatacataaaagagatagagcactgcaggccatcaaggtcaaacatttgaaacagaattaaactaaattataaggaggattaaatggcttttgtctttgtaaagaaaagaatatgcatgcattgattgcctatgtagaaggattaataaatcttttggcatggt

SEQ ID NO: 155363 - DNA, 424 bp, Homo sapiens
  misc_feature (1)...(424): n = a,t,c or g
ncntttacagaagcatgttttatttcaatcctgttaagggagagggatggaaaacacaaaataaggggaggggtctctttatataatacacacaccaggntcaactacaatgaataatacccattccatccctcccccaccaactcctatgtgggttccaaggccagctgagaatagatgggacaagaattaagacactttggcacagtaacatggccaatgcaccgaaagatggagagaagagantttcccagggagcaaggccctgggctncagctgcttccccagtggaggggtaatgagaaaactttgggctcagcaggaaggcagggggaagatcacagactacgggctgaatagagtcaagatgtctatccagtccattctgttctctgctttctctaagatcacttctcttcaggct

SEQ ID NO: 155364 - DNA, 1041 bp, Homo sapiens
atttttacaaaaacagaagcatgttttatttcaatcctgttaagggagagggatggaaaacacaaaataaggggaggggtctctttatataatacacacaccaggatcaactacaatgaataatacccattccatccctcccccaccaactcctatgtgggttccaaggccagctgagaatagatgggacaagaattaagacactttggcacagtaacatggccaatgcaccgaaagatggagagaagagaatttcccagggagcaaggccctgggcctcagctgcttccccagtggaggggtaatgagaaaactttggctcagcaggaaggcggttgtcaaaaatctgggttaccttaactggactctccgaaaacacaaaataaggggaggggtctctttatttaatacccccccccgggtccactccaaataaataatacccattccatccctcccccaccaactccctatgtgggtttccaaggccagctgaaaaatagatgggacaagaattaagacactttggcaccagtaaacatggcccaatgcacccgaaagatggagagaagagaatttccccaggggaggcaaggccctgggccctccagctgcttcccccagtggaaggggtaatggagaaaactttgggctcagcaggaaggcggtttgtcaaaaatctggggttacccttaactgggactctccagatcacagacttacggggctgaatagagtccagatggtctatccagttccattcctgttctctgctttctctaagatcacttctcttcaggcttgcaattattgagggttggcctgcttctcctcttcatcttggaaggcagggggagtaagtgcttattctgcccttcctatatctaggccacttaattactattttcttggctctaaagagacagaagccaactaacaagtccggctctctttgtgaaagtcggcttgaaagagcccttgtgttgcatccctctccattaacaggattgaaataaaacatgcttctgtttttgtaaaaaa

SEQ ID NO: 155365 - DNA, 1219 bp, Homo sapiens
ctttttaattatctttcatgcttaaaggcaaatgtattcagttccatttccatgcagcacacaataaggttatctatgtgccttatttcttttccaaatcaacagtttgggcacakkcctttcaggatccattcatcctccacggtcagccatcttgtaatgtggttctcataagtgtcttggcatgggggtaaaggaaccttcttgttgacctacagactgaccttcttgttgacctacagacctacagactggccaagtagggggtgtactgggaggagagctaaggactattgtcctcttctgccacccatgaagctcatgggtgccacattgacttgtaccagcagatgcttaggagaagccactcagattttgccatgggcaggggaagaagggcatggggagaaggagggagggaggggactcgatggtccccatggatggggagtttaggagggctggctgggctgggaaaaaacccagggaacaatggaacatggaggtcatcttccgttaggatgccatgccaaggcagaaaagcctccggaaaaatccccccagttacttagaacattcttcttcacaaaatgacaccacctccctgcagctttggctcctgacctcagtaggtaatctgattggctcttacggatcttcaagctgctctttgggctttcttcaatgtccttctcccactcgttgccagtcaaactttgatgtacccaagtatggtttgcaagctgaaggagaaaaaatccacctccccacaagctgttgcagccaactttccaaccttctggaatatgaaacctgtgcaaccatccagtgacacctcccaatgaacagcttgggttgccaacgctatactttttctgctgaaggtccagattcctgcccgaacagcttacgccaccatggctgcttcttagcaaattccgcaaggtccagtgactcaaaatttccctcaaagtttccttgactggacgcggccatttcggtgagcttgtctcgcgaggacacacgtagaggatctgcgcggtaggccgcggagtggcgcgcagttgtcagccaccacttggcttccggcacgtggggcagatgtttccattcccacggcggcagcggaagagggagggccgggcgcgccgcggctgcttgcagtctccgcaagcggctacctcacagagctcagcgtgcggtgtcacaggccccgcgg

SEQ ID NO: 155366 - DNA, 1152 bp, Homo sapiens
atgggtagtgaggccggctgcctggtgcgggcagagaggtttcagttgatcgtagagagggacgtgagaagcagcttcccttcctggaaggagctgagcatgccaggcttcatccagaagcagcaggccagagtctatgtccagttctttctggctgatgccctgatcctgcctgtgcccagaccctgccttcattcagcaacaccctcaacacctcagacagatcccaccggcccagagggaccccacctaggacagagccggctcttcttgctctgccacaaggaggccctcatgaagcgtaatttttgtgtccccccaggagcaagtccagaggtgcccaagcccgccctcagtttctatgtgttggggagctggcttgggggcacccagaggaaggagggtactggatgggggctgcccgagccccagggaaatgacgacaatgatcagaaggttcacctcattttctttggctcttcagtccgctggtttgagttcttgcacccgggacaggtgtaccgactcatagctcctggccccgctacaccaatgttgtttgaaaaggatggttcatcctgcatatctcggcgtcctctggagttggctggctgtgcatcctgcctcactgtccaggacaactggactctggagcttgaaagctcccaggatatccaagatgtgctggatgcaaacaagtcattgcctgaatcctcactgaccgacctgctcagtgacaaatctcacaatgtttattgttgtttccggtcatccacttatgtgcaggtcctgagttttccccctgagaccaccatcagcattcccctgccccacatctacctggctgaacttctgcagggtggtcagtccccattccaggccactgcctcttgccatatcgtctctgtcttcagccttcagctcttctgggtgtgtgcttattgtaccagcatctgccggcagtcttcagccagggttgacgagcccatgaccatgttcctctggacactttgtactagcccctctgtcctccgtcctattgtgctttcttttgagctggaaaggaaaccgtcgaagatcgtcccattaggaactcctagtcgttcatcatcatttcagccctttgccgccagggccaaaggtggaaagtga

SEQ ID NO: 155367 - DNA, 728 bp, Homo sapiens
tttttttttatattggtgtagcagtttgtgaatctggagtccttggttcaatcacagaacaagtagggagaggagccaggacctaggccttcaggttttcagcaaggaaggactctcaggccatccttgcagttcagttaacaggaggaagcaaggatccccagagagctggagtactctgactctcggatagaaaggcaggacaatcggagcctggggttcacgtgagtcaagaaagggagctctccacactggaatcgctgtagccgaggaggttctaatgggacgatcttcgacggtttcctttccagctcaaaagaaagcacaataggacggaggacagaggggctagtacaaagtgtccagaggaacatggtcatgggctcgtcaaccctggctgaagactagaaagagaaggtcaaggttaactggctcctaaaccctttgccaaaagcccaggaatttgggtatccgagtccctccctcccagccacattacacctcaagttgggctccaggccctgcaaactgcaagaccactctgcctggcacttggacgaaatctaggagggaggcccactctataggacacagccctagtgctgctgccacatggtgattcatacaggtcaccacggcttcggcagtcccatcctccaccaggagcctatggggagcaggaggaaatactcgcgcctatagcagcccaggtcgactggtcctcaaac

SEQ ID NO: 155368 - DNA, 2385 bp, Homo sapiens
tttcgtcttcgcttcgacgatttcgtcccctctacctgtgggctaccaatgccctggaggagctggcctgcaagctgtgtccccatgtgctgagacaccaccagttcctgcaacattcctctcctgggagccccagcctgggactgcaactcctggctcctaccctggatcttctagctccgccaggcagccctgttcggaatgcacacaatgagatccttgaagagccacatcactgtcccctccagaaatacactcggctgcagactccctcctccttccccactctggccaccctgaaagaagaaggacagcgtaaggcctgggcctcctttgaccctaaggcccttctgcccctcccggaggcctcctacctgcccagctgccaactcaatcgccgcctggcttggtcctggctctgtctgctgccctctgccttctgcccagcccaggttttacttggggttctggtggcttcatctcataaaggttgtctgcaacttcgggaccaaagtggttccctgccctgcctgctgctggccaagcactctcaacccctcagtgacccacggctgataggctgcctggtgcgggcagagaggtttcagttgatcgtagagagggacgtgagaagcagcttcccttcctggaaggagctgagcatgccaggcttcatccagaagcagcaggccagagtctatgtccagttctttctggctgatgccctgatcctgcctgtgcccagaccctgccttcattcagcaacaccctcaacacctcagacagatcccaccggcccagagggaccccacctaggacagagccggctcttcttgctctgccacaaggaggccctcatgaagcgtaatttttgtgtccccccaggagcaagtccagaggtgcccaagcccgccctcagtttctatgtgttggggagctggcttgggggcacccagaggaaggagggtactggatgggggctgcccgagccccagggaaatgacgacaatgatcagaaggttcacctcattttctttggctcttcagtccgctggtttgagttcttgcacccgggacaggtgtaccgactcatagctcctggccccgctacaccaatgttgtttgaaaaggatggttcatcctgcatatctcggcgtcctctggagttggctggctgtgcatcctgcctcactgtccaggacaactggactctggagcttgaaagctcccaggatatccaagatgtgctggatgcaaacaagtcattgcctgaatcctcactgaccgacctgctcagtgacaatttcacagattccttggtgtctttctccgctgagattttgtcacggacactatgtgaaccccttgtggcgtctctctggatgaaactggggaacacgggggccatgagaaggtgtgtgaagctaacagtcgctcttgagactgctgaatgtgaattcccccctcacaaggatgtatatatagaagacccacacttgcctccctcactaggactacttccaggagcccgggtccacttcagccagttggagaaaagggtttccagatctcacaatgtttattgttgtttccggtcatccacttatgtgccgggccttgagttttccccctgagaccaccatcagcattcccctgccccacatctacctgggctgaacttctgcagggtggtcagtcccccattccagggccactgcctcttgccatatcggctctggtcttcaggcttcagctcttctggggtgtgttgcttattgtaccagcatctgccggcagtcttcagccagggttgacgagcccatgaccatgttcctctggacactttgtactagcccctctgtcctccgtcctattgtgctttcttttgagctggaaaggaaaccgtcgaagatcgtcccattaggaactcctagtcgttcatcatcatttcagccctttgccgccagggccaaaggtggaaagtgatttggaagagaagagcttttcgtccagcagaagaaatggtaccaaaatcagtctgtaaaggaagtaaattggggagttggcggcaaggcagagagcatagctatgatggtctcagtcagtaaggctgggccctgcaggaagtcaaatatgaatgcctagaggtgttcacaagcacaaagaaggtgtagggggaggcaagtgccaggcacaagcaggggcaggtgaggactctgggtgactgtgctatagggccccaggctacggttagccctgtaggtttcccaagggcctggcctaaggcagatccttgatcgatataccttgagaccagaaggtgctccgaaatcacaaccgtacaattaggggatctaggaacaattctttggagataccaatgaa

SEQ ID NO: 155369 - DNA, 1437 bp, Homo sapiens
caacaaatgtttacctgttgccttgtaattaactctactcaatttcaatagaatttccattatttaaaaaaagcctctaaaattaggaaagaattcccacatgtggtttttaatatatctcatgcttacttcgaaatataatctgcactagtctttgttaaagtctgagggagtcataaaataatgtccctctcctctcctgacctttgaaccacttgagacacagacagatggagattccaatattttaagtttactgctgaaaaaggcctaggttagaggatgtactttaagtttatgcccaacaatagcccaccagatattgaacttagaattagacagacctgcttactaaggcatgggcagttctgcacaagcacaaatctccctttgcagaggcaaagaactttcactgcaaggttcacaatgtagctggcaagagaccacaacatcggttctctgcagttacgacaaatccacaaaagggaaaaaagaggctagcatgcccagttctatatcttaaactccctcctatcctggtgaagtgagagaaagagattagaattcccttggtaaatggatagcctaagaagctctgtgagaggaagccatccttacccgccgctgccttctgaccaaagtagttcatatatagtgcacattagggcatgattcatgttacagtagctttagggccaaaacttcctcctcccgaagtaccccatatttaaattgccaagtgacctaaggtaaatgactttagggataacctcctttatttcattttatttctgttttataatttatatatttcaatatcttattattggtaagaaaaacttaactttctcagtcctaaaattctttattatcaaatacatcagtttaataataatctctaaggaagaaaaaaacacatttaagatatcccattggatttggaagataattattatggaactatggttccttatgtcaactcacatctcatttagatattaatacatgtatcatgaacatcatagctcagaattgctggtccagagtcactttagaatggctctgattcaaggaaattaaaagaaatgattgttaattttcttagtgctgggaaaggcagtgaaacaagcttttgaatcattatgtaattttcaaacaactaaaagggctatactgttcagttataatcttaaaaattctagctgagacagagcttttaaaaaatctttatagttttaccatacggcatcaattcaaaagattgtcatactgaaaccactgccataaaattttgtatgtaggccccagttgcagtagatctggctcctgtgagctataacttgcatggcttttcaatgtttatgtagtgtctgttaatatatttaagataaatactctataaccaaacagcctgttttctagagaatgatatatgat

SEQ ID NO: 155370 - DNA, 1368 bp, Homo sapiens
gtccgaggagagtgaggaagaagatgatgatggtctgcctaagaaaaagtggccaacggtagacgcctcttattatggtgggagaggcgttggaggcattaaaagaatggaggttcgttggggagaaaagggctccacagaagaaggtgctaagttggaaaaggcaaagaatgcaagagtcaagatgccggagcaggaatatgaattccctgagccgcgaaatctcaacaacaatatgcgtcggccttcttccccccggaagtggtactctccaatcaagggaaaactcgatgccttgtgggtcctactgaggaaaggatatgatcgtgtgtctgtgatgcgtccacagccaggagacacggggcgctgcatcaacttcaccagggtcaagaacaaccagccagccaagtacccactcaacaacggctaccacaactccacctcccaacagggcacctcctccctcccgccctcctccaaggccttctgtctagagcccaaagttcctgctctgggctctctcagaaacttcaggagatgttagaacaagtctttccagttagagaagaggagttgtgataaagcccactgaccttcacacattctaaaaattggttggcaatgccagtataccaacaatcatgatcagctgaaagaaacagatattttaaattgccagaaaacaaatgatgaggcaactacagtcagatttatagccagccatctatcacctctagaaggttccagagacagtgaaactgcaagatgctctcaacaggattatgtctcatggagaccagtaagaaaatcatttatctgaaggtgaaatgcagagttggataagaaatacattgctgggtttctaaaatgctgccttcctgcctctactccacctccatccctggactttggacccttggcctaggagcctaaggaccttcacccctgtgcaccacccaagaaagaggaaaactttgcctacaactttggaaatgctggggtccctggtgtggtaagaaactcaacatcagacgggtatgcagaaggatgttcttctgggatttgcaggtacataaaaaatgtatggcatcttttccttgcaaattcttccagtttccaagtgagaaggggagcaggtgtttactgatggaaaaggtatgttgctatgttgatgtgtaagagaaaacagatgtgtgcaaaagacaggggcgtattcatgggagcatcagccagtttctaaaacccacaggccatcagcagctataggtgggtggctttggccagacatggaccctaaatcaacaaacaatggcattgtcgaagagcaacctgttaatgaatcatgttaaaaatcaaggattggcttcg

SEQ ID NO: 155371 - DNA, 546 bp, Homo sapiens
gacgttagtcgagcatttaattacttgtacaagaactggaatgcagtaggtatgcaatacatgtttgtcaaatagttttagaaagtgctatgatgaagcgacataaccaaagacataacgcaattattttgatttcaagtccagcgctcttccgagtaactaggaaaaatgaggggaactgtgtaggcagaatgctgtggaggggtggaaatctgaggtccccaagagtctctaagtgtctctttagatcgaatcgaaggtcttttaaacaacagatataccagatataatgcacaactctttctccccccacccccaatacagtgggactaataacagcatctacctgacaagatattatgaagattagggcaaatgcgttaataaatgcaaactgcttaaaatagtgcctggaagtatgtgctggctatcatcatcatcatcatcgtcaccatcaccaccaccaaacaagcctggaacgctccaagcccaagtgtacacttggacacatggcactctggcattccgaaaaatactcctcgtgcc

SEQ ID NO: 155372 - DNA, 1700 bp, Homo sapiens
ggaaaggtagctcttcccaatcagagaatctggatgctgggctgggctctgcaccaaccagctgggccgcttcacccgctgggccccaaactactcatctgtgaagcgaaggcaccgcgcttgatgccttctgcaacgttcttcagtttggaaatccttctgtttcgttggggatatttcacggcctcttctcaaggttgcacttttgccagctgccagggatcgtctcaaaacaggttcttagtgcattcatagcttgagctgctgtcttgaaagtagtacattcctttttctgccaacttttttctgagaaagtttttgaatgcacacgtgcacccaacagagtgagagtggctgttaagagagagggcgccatttcctttgccctccagcctgtccctgtgcaccctgggaggggcccgttttttccaccgcttaggataaaatctaggggcaagttcctgaacttctcttgtctctctcaggtaacaaaaattcttttggggctcctttagttcacaaaggtattcacgatttcaggtattaaagtgcccagccctgggtgattgtcaaaattctgaacttgatttaaagtggcacctcctctcacagtcttccggagggagagaccggagccaggagtgcagcgtgtttgctggggtctgtcgtggcccactccacacctgctgggtggatccggctggtgccccatgggcgcctctgagatgcccctccccaccccatcagtggcgctgtctcacctgcaggctgcttctcacaggtggtcccccctcactcctcctgcagccccagttcctggctgttcattcttattgggacccgtcaccctcctggaggcggtcccagccgagcccccttaagacagcaccaggctggctccacttggcccccgctggttcagggaagtgctgctgcagccgtttagtttgacaaaggaggcagcgaggccgtctcattggtagccctctcctggcttgcccagccaccacctcacctcgattcctcccaggccttgggtccagcaccagcctaggaagagggtgccccattgctgtctagctcttcttcgggatggggggctccaggttccttggtattttgcctttgccctttggagcctcagtcaaaactgaggaaaggtgtcattttcacatctcgtcacacgtacagtgactgcaactaaaagcacaggctttgtagaaacagacatgggttcaggccccagctccaccattcacaaggtgtgtggcttcctgcaaggtaccttcatctctgagttacctgactccatctgagtttccttcttgtaaaactggcatccatgaaagtggctacctcgaagggcgtgaagatgaaatgaggtggaaagtaggtagcccccgaatgagggaagcattgagtgagagctggccctctgacccttctaaaagaacacagccaactttttaaactgtctttccagaaagagatggaaaacttcgaagcccctttccactgccttgccaagcggttccaccagctgtaccgggagaaggtggaggttttccgggccctggcatgacgagctggagcagatcgtgctgcacaaccggagaagacagaattacctctgctcttttaatatataatgatggctttaaataaaattaggagaaaatgtcaaaaaaaaaaaaaaaaaa

SEQ ID NO: 155373 - DNA, 1116 bp, Homo sapiens; identical to SEQ ID NO: 135400

SEQ ID NO: 155374 - DNA, 904 bp, Homo sapiens
agcagggtgggagagagcaggctggaaagtggagctcagttgtctatgtctgtccgtctgtccgtctgcctatctgctagagccagaactttggggtcacaggccagggcctggcaacagtgaggcactctacaaacagcatgaggtgtgacaaagtctgctgccgagctctataaacagcactgagcgctgaaacaagcgccaggttctgtcaaaaatgaaggggtcagcaaaatgcaccaggctgtgcaaccagcccagttccctctagctccagcacagactcttatctccagccctgactgccgaaaccctccagccccagctccagcccctcaggaggggactgcgtgggaggaatgactccagcaagccggcagctgacccgtctcctgcctgcacgcctcccgctgtggtccactgccggtggtcttcagctctctcctcgtcccacccccatggtctgctgacagcccagctcagtgcatccctgccatctctgctctaccgctggtcctcccaacaaccaacttacagctggggctcagctatccctgtgtccccagtccagagcctgcctctcagccctcccaaggcggccttgagcgctgctcctgctcctccaggggagaggtcagctggggagagcaacagggagaagaggacagggagaggttggttaacaaatacaaacttacagctagataggagtaatgagcacacctatgacaccaagctgggaatcgacaagtgtgacaactcctccacgtccctgaagatgggatacacgcagggcgctcatcagagcggccaggccttcggcatgggcctacagatatacgaccccaggtactactggggaggcccagtggcccacggcgctccctcgggctccggcccctga

SEQ ID NO: 155375 - DNA, 470 bp, Homo sapiens
  misc_feature (1)...(470): n = a,t,c or g
agagtgactctcctatgaaggtaaaggccacccctcttcagttccagtgactgagatacatttttccaatcctgggggcaaatacagacacagcaagttccttcttccctttggaaatttggcagaaatcctcactggacggcttcctgtttcctgtggttcattatctgattggctgcagggatgaaagtttttaagttcataggactgatgatcctcctcacctctgcgttttcagccggttcaggacaaagtccaatgactgtgctgtgctccatagactggttcatggtcacagtgcaccccttcatgctaaacaacgatgtgtgtgtacactttcatganctacacttgggcctggggttgccccccaaaccatgttcagccacacgcctaaccagtttcacctaccgtgttactgaatgtgggcttcagggccaaagctgttttttcaggacatggttatttaa

SEQ ID NO: 155376 - DNA, 2249 bp, Homo sapiens
atgtggatttcagcttttgtctgtcatgctttttctgttccagctgccttcaccagtgagcacaaagccacatttcaaaggaaactgacaaattatccccagctgccagaagaagtgcagttctgggcacatactgaagatctgttagttaaagagcagtacagactcaaggaatctgtcaccagttcagcagctgacgagctcagctcaggggacactttagtctatagttctgcttcaacatctcacaagctacacgagtatgatccactcattcaacaaagacaacgtattaaaatcctaatccaaaggtggcttcacggcccctcaggtttaacagctgagactttgtttccagactcacagggagaaagacgttctgcctgtgtttatgtgtcagttgcagaatttgtgggtaacaggaaatcagccggttcaggacaaagtccaatgactgtgctgtgctccatagactggttcatggtcacagtgcaccccttcatgctaaacaacgatgtgtgtgtacactttcatgaactacacttgggcctgggttgccccccaaaccatgttcagccacacgccttaccagttcacctaccgtgttactgaatgtggcatcagggccaaagctgtctctcaggacatggttatctacagcactgagatacactactcttctaagggcacgccatctaagtttgtgatcccagtgtcatgtgctgccccccaaaagtccccatgggctcaccaagccctgctccatgagagtagccagcaagagcagggccacagccaggaagggatgaggaaatgctacggaggtgtttcagcttgttcacagtccagttcaaagggcccaacttgcggttgtccaccttgtgtctttcagtgaagaagagcatacccagatgaggaaactgaggctcagagaagtggagattgtaccattaggaaatgacatcactggaactcaaacccagaggatgtgttccaagtgtcagtcccagatggatgtttgtgaagccaacatgttagatatgagctcaacaacccttggtcagcaccaagaacaccaaatggtgcctaagccaactcttgaggatgttagccatcatctttaccgccagcacagcaccttgttctcacttcttccggttccttttttcccttctcaggtactccctgtaagcaccgagcaaaaagcttcgctcagccaccttgcgccgtcccggcagctcaaaggacaccgccagaggacccgtgagcgtggggtggtgtccgtcccaggagcctctgggtgcgcgctgcgctacctcgtgcccttggctttgccgtttgccatcctccgttttttctccccgagccctcgctattcgtctcggtggcggctccgggagcctctccgccggctgcgccgctcgcctccaagggagcgttccgtgctggcccctcgctcggctccgctccgcctccgccacgccgctctccgagcttcggcagcagccagcgccccctccacgctgcgaccccggctctcggctctccgtccctgtagctccgtgcccagcacctcgcgccccgcaacctcgccgtctcccaagtcccgggccccgcttctgtcgctgtccgtcgctgtccgtgtgtcgctcgctcggtctgtctctccgcctccccagcccttccttcctccctgtctccctcgctggcttgcacgttcgctcgctctcggacgcggcgaaacagcttcgcaggcaaatcccagaaacctttgcaaaaagcttgcaatgaaatttaagaagttcttcgatttcggcgccattttcgagtggagccagagcttccccctttctccccgtcctgtacggttccccctggagccagaaggaagcccggtgccagccagccttcctgaaagaccaagcccgcgccatccggcttcctccagtggacgcctgcaggacccaggcctcatactgtgttccttatgtcattacctgttcatcagaaccgactatgcagtagtgaccagagcaggaaatggaggtgaatgtgtttggttacaaaaattcccggtgaaactggctagtcttatgatgagctttggcctatacattggacacttcctgggtgtgcctcctgcaaatccgcaggaagcaccaagaaccaggtccttcttcacccccaaatctgtcatggagcccagcgctgttcccggcacagcagagcgggtgctccatccaggttga

SEQ ID NO: 155377 - DNA, 1220 bp, Homo sapiens
atcagaccatcagaaggatttgtataaagagtgactctcctatgaaggtaaaggccacccctcttcagttccggtgactgagatacatttttccaatcctgggggcaaatacagacacagcaagttccttcttccctttggaaatttggcagctgccttcaccagtgagcacaaagccacatttcaaaggaaactgacaaattatccccagctgccagaaggaaggaaatcctcactgggacggcttcctgtttcctgtgggttcattatctgattgggctgcaggggatgaaagttttttaagttcatagggacttgatggatccctccttcacctctggcgtttttcagccggtttcagggacaaagtccaatggactgtggcttgtggttccataggactggtttcatgggtcacagttgcacccctttcatggttaaaccaacgatgttgttgtgtaacatttttcatggaacttacacttggggcctggggtttgccccccaaaccattgtttcaggccacacgcctaccagtttcacctaccttgttactgaatgtggggcttcaggggccaaagctgttctcttcaggacatggttattctacagcactgagatacactactcttctaagggcacgtccattctaagtttgtgatcccagtgtcatgtgctgccccccaaaagtccccatgggctcaccaaggccctgctccatggaggagtaggccagcaagagcagggccacagcccagaaggatgagaaaagcctacgaaggtgttcaagcttggtcaaaagtcccagtcaaaaggcccccaactgcgattggtcccacccttgtgtccttccagtgaaagaaagaagccatacccccaggtccccttgttcacccaaagcagggtcttcagggaggcttcaaccttcttgcagcccatcctcacttttctttgatatttcttgagggattgggtctctttcacacagatgatatgattggggtcccatgtgatccctcaggtttggggtctccctgaagatgcctatttcctagaattagtatatagtgtacaaatgtctgacaaataagtgctcttgtgaccctcatgtgagcacttttcgagaaagagaaacctatagcaacttcatgaattacgcctttttctatatttttatattcgatgtgtaaacaaaaaataaaataaaattctgatcgcat

SEQ ID NO: 155378 - DNA, 2189 bp, Homo sapiens
aatgtgtgtgtcccagaaatgcctggtggcctgcgggggtctttaaccaaggggatgctggcttgaacccaggcctacctttcccctaagaagccagccaggagctgagtgaaggcaacagggatgcccccatccccttctggccagcgagctgctcctatgatgtcaccctctgtccaccgtgacaaagacagacacatcctgcagaagaatctgggtcgcaagcaggtgacctgcctccagcaggaagcaaaaccaaggcggtggaggcaggagagcacggagacagacgccccgaagctctctccctgttcctccccaaacgctaggcgatgggaaagacggggacaatgcagagtaaatgtgtgccgtgacacctcagtatgcgacacaagccaagaattctaagtggattcacgagccacgccacccagccttgggtcttccctcttcagccgtcagagccaggatcagtctctggctttgcaccaagggcttgctgtcccctcacacgggtgtcttgcgtcttcgcttgggcaggggtggcttgccccacgtccccattctggacaagccaacgccctcccacccagtgctgagagctgcatgcgagtcccatgagcaccctctgtgcacacaccttccagaacttagagccccaacaaaagcgggagtgggggcagcatggtcccaacaatccccagggacgctcctctgtggctcccatgcaagtgcccatttgggctgcacgcttccctgaccggacgctgaaggccggcctgccacgactggccatgcccctcaaacgaccgagatgtcttctagtccctcagcccagagcagcagatgagaggctgaagttagcgggggaaacaagaggaaccctgtggcttcctgtgcatgggggctccctttggacataagctgccacagtccctgcctgcccaccttggctgacaaggcgctgcattgggagtgccccagacctagtttcaggtacttctgtgaggagaggggtagagagcccaggtgctcctcctcaccaccccctccacactcctggggaagtcactggccgcacatacatctgtggaaatcgggcccaggtggccttgggaacgtggcttttgtgcctcaacaacaaaaagaggtggcaatgtttagctcaaagcagtgaaggggaactgggctgcttttgccctgcgttcaacacagggaacggcccagggcaccaccatgctttccctccacccccaattacgtgaggagctgacccaggtgagcataccctagaaaaggggggcggggtcagtaaatgggcccgtttcctcatcagctggggccccaggtctggggtagtttgggaacgtttctgccaaacctcagctaaaaacgaaaacacagatgtcaccttccagccaaccctgggcctacagggcccaggcacagctccaaccagaagagacaaaaattcatcatccaacattcacagaaaacacgcctgaaaccctgggtttgttctccgatttgtgttcctcaaaaggcggtaaaacttgcaaggttaggtgtttaaaaacaccttcgttggccattgagaactggagacagtgagccacccgtccccagagggagctcggaagccgaagggccactcccgtctccaaccactgcaggcgggcacgggcagggcagctgcagacgcccgggaaaggtgtccatcaggccccctggaatacaccacagatcctatttcttaaagtgtaacgagccccaagggctgtctggcatgcgcgccctctgcaccccactagctctcgcctggggggtgcctagtgtcaggcttcctggccgcagaggccacagcccagccatgcaagtttgaggtgctggggggcagaggtggccaggagaagagcttttcctggggcagtgggaaggctgggctagggtggtggtgcatcctctgcaggcacagcgcctctgggtcagagaagaacagagaaggatgtcctttcgagggcaccagcagcccgccattccttcaaagtgccccacctcgcccacatccccatgaacactcctgctggtggcctccatggctgggatgaaacgattccacttcaacacccaacacaccaaccccaaccccaagtgcacctggcaccttccagctgtcccggacgcgtggg

SEQ ID NO: 155379 - DNA, 355 bp, Homo sapiens
agggccctggagcgaagcaccacagccgtctgctcggtggtacatgcttttgggcagcaacgtcatgcatataggcgcacaagcttcaagcgcacagtgaaaacacgtgatgactacctgctcagacagatgttaatgagtcacatggtccagctggtgcaaagtagcaaagcttcccaggaagagtccatccagaggttctgtgatcctgctgccgcgggactgcctgcggcccggagtccggcactaaaaaggttccgagggcccacgtctcccgagaggctgtggcgcagtctggacccaagccattgtgagagcggcggcgatttcgaaggtccccaagacccactaggta

SEQ ID NO: 155380 - DNA, 437 bp, Homo sapiens
tttcgtggtactgctacctagtgggtcttggggaccttcgaaatcgccgccgctctcacaatggcttgggtccagactgcgccacagcctctcgggagacgtgggccctcggaacctttttagtgccggactccgggccgcaggcagtcccgcggcagcaggatcacagctcttgaggctagtgcgcctctaggcaagatgtccctgcccatcgggatataccgccgggcagtcagctatgatgataccctcgaggaccctgcgcccatgactcctcctccatcggacatgggcagcgtcccttggaagccagtgattccagagcgcaagtatcagcacctcgccaaggtggaggaaggagaggccagtctaccctcccctgccatgaccctgtcatcagccattgacagtgtggacaaggtcccagtggtgaaggc

SEQ ID NO: 155381 - DNA, 817 bp, Homo sapiens
  misc_feature (1)...(817): n = a,t,c or g
gatattcggcacgaggttcagaagagacatcacactcgattattttgtgctgataggacagaaagggtaatctcacctctgttgtaatactgttataaaccaagggtactgctacctagtgggtcttggggaccttcgaaatcgccgccgctctcacaatggcttgggtccagactgcgccacagcctctcgggagacgtgggccctcggaacctttttagtgccggactccgggccgcaggcagtcccgcggcagcaggatcacagaacctctggatggactcttcctgggaagctttgctactttgcagcagctggaccatgttcctcattaacatctgtctgtccgcttagtcatcacatcatttcactgtgctcttgaggctagtgcgcctctaggcaagatgtccctgcccatcgggatataccgccgggcagtcagctatgatgataccctcgaggaccctgcgcccatgactcctcctccatcggacatgggcagcgtcccttgggagccagtgatttcagagcgcaagtatcaacacctcgccaaggtggaggaaagagaggccagtctaccctcccctgcatgaccctgtatcagccattgacagtgtggcaaggtcccagtggtgaaggtaaagctacccattcatcatgaattctcggtcacaaacagacccaggaaagcattctcattttgagcgacaggcagggctgagagattgctgctaccaccccacaagggcctcacccacgaggagacaagtaccttcgagtggccgagccctcacanactaaagtacagagggggagg

SEQ ID NO: 155382 - DNA, 1900 bp, Homo sapiens
  misc_feature (1)...(1900): n = a,t,c or g
agtgctgcctgcccgctgggtggtactgctacctagtgggtcttggggaccttcgaaatcgccgccgctctcacaatggcttgggtccagactgcgccacagcctctcgggagacgtgggccctcggaacctttttagtgccggactccgggccgcaggcagtcccgcggcagcaggatcacagaacctctggatggactcttcctgggaagctttgctactttgcagcagctggaccatgttcctcattaacatctgtctgtccgcttagtcatcacatcatttcactgtggtggcagggactcagctcggaattctgtataggaaaaagcacctggattcccagtcttttcaatgggcttcaaagacaaccagaagttgcctgctccttgaaggctaagttgcgccctctaaggcaagaatgtcccctgcccatcgggattataccgccggggcagtcagctatgatgataccctcgaggaccctgcgcccatgactcctcctccatcggacatgggcagcgtcccttggaagccagtgattccagagcgcaagtatcagcacctcgccaagtgtggaggaaggagaggccagtctaccctcccctgccatgaccctgtcatcaagccatttgacagtgtggacaaggctcccaagtgggtgaaggctaaagctacccatgtcatcatgaattctctgatcacaaaacagacccaggaaagcattcagcattttgagcgacaggcagggctgagagatgctggctacacaccccacaagggcctcaccacccgaggagaccaagtacctttcgagttggccgaagcactccacaaactaaagttacagagtggagaggttaacaaaagaaggagaggcagcctgcatcagcccagtccaccccaagcaccactccgcactcctttacctaagcagaggcccaggggctggttcacttctggttcttccacaggcttacctgggccaaatcctagtatcatggactctggaagttgggggattaaggacaagaaactttgttcagataagtggagcctctttggaccgagatcccttcagaagtacgattctggaagttttgccacccaggcctaccgaggagcccagaagccctctccattggaactgatacgtgcccaggccaaccgaatggctgaagatccagcagccttgaagccccccaagatggacatcccagtgatggaaggaaagaaacagccaccacgggcccataacctcaaaccccgtgacctgaatgtgctcacacccactggcttctagagccctctttccagggattctggtaaaggtggtttcttgcatcccactccccttttaccttggctttgacataggaaaggtatatttmamcmacttaatcagctgggcgtscgtggctcacgcctgtaatcccagcactttgggaggccaaggtaggtggatacctgassgtcaggagttcaagaccagcctgggccaacatggtgaaaccccgtctctactaaaaatacaaaaattagctgggcgtggtggtgggcgcctgtagtcccagctacttgggaggctgaggcaggagaatcgcctgaacccaggaagcagatgttgtaccgagctgagatcatgccattacactccagcctgggcgacagaacgagacgccatcaataaataaataaataaagtaaagtaaaaaacctattaaattgaggctagagctggagatgtaattggtttttgagaaacattagtataaagcttgcccttgttgtgtggaagaagccattttgtactgctttaaagttaggactaatattcttcaggcacgggtgtatgggacncataccnatttttcagcangacccnttttnattttttttt

SEQ ID NO: 155383 - DNA, 681 bp, Homo sapiens
aagtatgcaggatgcctgcttttttatgcagttgtggaaagaatgtaaaatgttttaatatattctttgttaatctgagaacttgatactgaatcgtttatgtgggagaaggaaggagtaacataaaacatgtttttatcactcaaagtaagcaatggaggtaacaaatattgtgcattttaacagtaatatttgaagatttgtagaatattcacctttaaaactagttagtatgcatttataattttaccagaatatacaactaacaattcaacagtgatgttctttgcatttgtggggagatgtgtgatgttcttggttttctggtttggaatggaacgtttatagccttgcctgtaaaaatgtgccccagcacttaatgagtgaccgtttgaatccatatgtagtcccattggtgctaatgagagtagctgctgtgaaacaggaataaaatgtgtctgttcacggaggtgccggtgtggatgcacctacaaggccaactctctgatccagggtgagggagagatggaagaattaacagatctaaaagttggcctttgttgtctcaaattggggttttgtacacacatgccatgcatgtgtgtatacaactgtaatctggaaccttcaggaagtaaaaatttatttggaagtttccttagtaaaaaggtaattagggta

SEQ ID NO: 155384 - DNA, 1744 bp, Homo sapiens
tttcgtctgacttctggctggccagaggctgcggtccgtcaagggcttgcctcgcttcagaatcagtaacatagatcttaagtgcagttgattaataagcagtgagttactgtagcttcctttagctctaccgaactctttttaaaaactcaaacttgagcagccttagaaaaggggttggggggtgggaaccacaggccatttctctaagtgggctgctgtgaagttttaaatgaaagctctagctttaggagcttgagccatttcctgactgcactggcctggcagtctggctgctgcacaagagtttttaaagaggggtcggagcccgcccgtgagagcgggtcttctcaccatgtgggggctgtactacgtgggtggtcttggtttctctttcacagaaatgctctctcaccaactttgccccacttgtcccaactcctctcctctttagaggaaaaaactgtggattacctcaacttgaatatggaaactgtggatttgaaaaaagtcaaaacggtgaagaaggcatcaaagccaaaaaggcaaaactggctgaggcctctgttgatgctcctcagcctactcgggaacgtgaagggggcagctggcgaaagggcattcctggggccacttgctctgccccactgataaggcacacccgcggtgcactgtgagctctttgaggactgaggccaggggatgcctcctggaacctgccaggcctctctgttctgtgaaggtcagtatccacttgattcctccaggcggcgctccaggtgggaggagcagggtcttctgctgtttccaaaggaatggccatgacactgcttttgaccttagaagtggatccagggacccagcaaagagcgggggtgggttcccagggacaggcagtcctcccggggcttacatgctttttgctaactttcctattagcagcttcagtttatatcacccagagtgcgtgggataatgttgaagtcgctgaagttacgggttattttatgtttttacatgggatttttctgtttttgattggaagaaggagacagaaattggaggaaatgggattattatcctagggaagggccgttggcaaggagttgagccggcccctctgagccctgggggctatctgacctgaagcctggacactgggcccttcaggtcgcaagaaaaagttccctcctaaattctattaggattttggagaatttttgcacagtaagaagctctgggttgctccttgggcctctccaaaagggaaaagttcaattcaaagattggtaaaacctaccgaagtattccccagcccgtgttgccggatcctaggttgggataggttggtcccctcaaaaaaggtagggtgagaactgggcttccctcattggccccccagatgtcaaatacctaatggaccataaggaggcctccctaccgtgcccaaaattccacttttatacctagtttttccagtgctttaatattttgtaactttaaatttttaaaactcgtatttacaaacactactgttaacttcagtgaaactgaattgtgccgattgaagctttttgcttatcatagtatttattacactacttaattcagtaaatatataaaagtagccttcaatttatttttatattattttacatgtttttacctgccagttgtgtatgtgaatttaccttggtaatcgaggatgtcatgctaaggaccaataaactatcactggaacagg

SEQ ID NO: 155385 - DNA, 381 bp, Homo sapiens
  misc_feature (1)...(381): n = a,t,c or g
caaaaaattaagtcttcaaaactcttttgaagtccactgggtgcagaacatcccccactgtgcctgaaaaccaaggaacttcaaaagagttttgaagacttaattttttgtaaaacacttacttgagattttgggttatccataatagaatgtatttcattagattctctgattctatataagaatgtgaaaagatcgatatattgttgttagaaataatgctatttctttccaannnnnnnnnnnnnnnnnnnngaaagggagttttgttttgccacccaggttggagggcaggggggggatttcggttcattgaaccctttaactcccaggttaaagtttttctcttgccttacccccccaataagctggattacgggg

SEQ ID NO: 155386 - DNA, 475 bp, Homo sapiens
  misc_feature (1)...(475): n = a,t,c or g
cnaacccaggacaggggtgcattagggccaggctgatgcgctgtagagtagtcgtaggtcatgaggctgaaaccatccagcacgggggccagctgctcaaactccttgtgcgtgaacatgcccagctggtcggtcacgcgcttctggttagcagctggttccagacctccaccacgaagccatcgaaatgctggttctttgccacctggaccacggtcttgctcagctcctctatctcatcctcactgtctaagacgttccggaaatcatcgtaagtccagtcctcaaacaggagccgagnactatgtgcagnccttggcatgcttcctgacagctcgcatccacccttggtcacgtcgtggaggcccgtgacctcaaacatctcacggccacgtctcttcagctgcagccagacgggtgagatctgtgtgaacttgctcccaaagaccttggtgacatcgtagccatggctgtt

SEQ ID NO: 155387 - DNA, 1539 bp, Homo sapiens
accggcaaactgtttccgggtcgacgatttcgtggccgtccggcctccctgacatgcagatttccacccagaagacagagaaggagccagtggtcatggaatgggctggggtcaaagactgggtgcctggggagctgaggcagccaccgtttcagcctggccagccctctggaccccgaggttggaccctactgtgatttcacctaccatgcgtacactcttcaacctcctctggcttgccctgggcctgcagccctgttcacactaccctgtcaaagtcagatgccaaaaaaagccgcctcaaagacgctgctggagaagagtcagttttcagataagccggtgcaagaccggggttttggttgtgacggacctcaaagctgagagtgtggttctttgagcattcgcagctacttcttcgggcaaaggcccggggacagacactttgctggggatgtactggggctatgtcactccatggaacagccatggctaacggatgtcaccaaggtctttgggagcaagttcacacagatctcaccccgtctggctgcaacctgaagagacgtggccgtgagatgttttgaggtcacgggcctccacgacgtggaccaagggtggatgcgagctgtcaggaagcatgccaagggcctgcacatagtgcctcggctcctgtttgaggactggacttacgatgatttccggaacgtcttagacagtgaggatgagatagaggagctgagcaagaccgtggtccaaggtggcaaagaaccagcatttcgatggcttcgtggtggaggtctggaaccagctgctaagccaagaagcgcgttggggctcatccacatgctcacccactttggccgaggctctgcaccaggcccggctgctgggcctcctgggtcatcccgcctgccatcacccccgggaccgaccagctgggcatgttcacgcacaaggagttttgagcagctggcccccgtgcttggatggttttcagccttcattgaccttacggattacttttacagcgcattcagcctggccctaattgcacccctgtcctgggttcgagcctgcgtcccaggtcctggacccgaaagtccaaagtggcgaagcaaaaatccttcctggggcttcaacttcttatggtatgggactacgcgacctccaaggatgcccgtgagccttgttgtcgggccccaggtacatccaagacactgaaggaccacagggccccgggatgggtgtgtgggacagcccaggtctcagggcccttcttcgagtacaagaagagccgcagtgggaggcacgttggtcttctacccaaccctgaagtccctgcaggtgcggctggagctggcccgggagctgggcgttggggtctctattctgggagctgggccagggccaggactacttttacgacctgctttaggtggccatttgcggcctccgctggtggacgtgttcttttctgagcacatggagtgagtgagacaggtgtgaaatgacaggcctggcactccgtttgctgtg

SEQ ID NO: 155388 - DNA, 711 bp, Homo sapiens
tgacacgccaagcttggcacgaggataaatttcacgatccttttctaaagcgtgtctccaaatgttagtaggcagttctaaaaataattggtttcacttatggctttaaaagaaaatcctcaaaaaggaataacttatttcaggaatgtaatgtgggctctttaaaataagtaacacaccaatgttagtttctagtattgacaccacaagttttaagtggatcccaagatgtaattgctcttactgcttgtgcttaagttgttcgagccattgtctaaacacctatcattgtctaaatggcaattattttgccattgtaaaaaaacactatcagcttggccttatagtggggtcctaggatatctggaaagcatccaattggaattaatatagtgctggaagggaaagcctggatgcacttttttgctgttggctggtgtcttcagtcaaatcagatatctggaaagcatccaattgaattaatatagcgctgaaggaaagcctggatgcactttttgctgttgtctggagtcttcagtcaaatcatcatgctttttattaacaaacaacttctttaaaaatgtatactatttctgattactgtttcagagttaaaggggaacagtacagcttgaggttgcacatcagggtagggcagctatgacattctttattatggtattttattttaaactaagctaacacattggg

SEQ ID NO: 155389 - DNA, 388 bp, Homo sapiens
  misc_feature (1)...(388): n = a,t,c or g
nnnnnnnnnnnnnnnnnnnnnnnnnnnnnnnnnnnnnnnnnnnnnnnnnnnnnnnnnnnnnnnnnnnnnnnnnnnnnnnnnnnnnnnnnnnnnnnnnnnnnnnnnnnnnnnnnnnnnnnnnnnnnnnnnnnnnnnnnnnnnnnnnnnnnnnnnnnnnnnnnnnnnnnnnnnnnnnnnnnnngggggggcccttttaaaaaaacccttggggggcccaaatttaacgggggatggaaaggaaaaattttttcccttaaggggggggttttaaaaaccacctggggatttttggaaaaaaaccttttttttggggggggaaaatatgggcccaacccccccccaaaatttaaaggctttagggnnnnnnnnnntttttaaggggaaaagg

SEQ ID NO: 155390 - DNA, 3306 bp, Homo sapiens
  misc_feature (1)...(3306): n = a,t,c or g
gaattcttcagcgcccaggaccaggactatcccctgctcaagctgtgattccgagacccctgccaccactactgcattcacggggatcccaggctagtgggactcgacatgggtagcccccagggcagctccctacagcttgggccatctgcacttttcccaaggccctaagtctccgcctctgggctcgttaaggtttggggtgggagctgtgctgtgggaagcaacccggactacacttggcaagcatggcgctactgaaagtcaagtttgaccagaagaagcgggtcaagttggcccaagggctctggctcatgaactggttctccgtgttggctggcatcatcatcttcagcctaggactgttcctgaagattgaactccgaaagaggagcgatgtgatgaataattctgagagccattttgtgcccaactcattgatagggatgggggtgctatcctgtgtcttcaactcgctggctgggaagatctgctacgacgccctggacccagccaagtatgccagatggaagccctggctgaagccgtacctggctatctgtgtcctcttcaacatcatcctcttccttgtggctctctgctgctttctgcttcggggctcgctggagaacaccctgggccaagggctcaagaacggcatgaagtactaccgggacacagacacccctggcaggtgtttcatgaagaagaccatcgacatgctgcagatcgagttcaaatgctgcggcaacaacggttttcgggactggtttgagattcagtggatcagcaatcgctacctggacttttcctccaaagaagtcaaagatcgaatcaagagcaacgtggatgggcggtacctggtggacggcgtccctttcagctgctgcaatcctagctcgccacggccctgcatccagtatcagatcaccaacaactcagcacactacagttacgaccaccagacggaggagctcaacctgtgggtgcgtggctgcagggctgccctgctgagctactacagcagcctcatgaactccatgggtgtcgtcacgctcctcatttggctcttcgaggtgaccattacaattgggctgcgctacctacagacgtcgctggatggtgtgtccaaccccgaggaatctgagagcgagagcgagggctggctgctggagaagagcgtgccggagacctggaaggcctttctggagagtgtgaagaagctgggcaagggcaaccaggtggaagccgagggcgcaggcgcaggccaggccccagaggctggctgagggccctggggcccctcccctcccgaacactgagaaatagtgcactccaagaaacgtggatctccccctcatccaactccgaaagtctgaatctcccaaggagggcaccatcttacagagactctccctgacggtggaatttaagtttagggtccctaaaagcatttgacacacagttgttgaatgactgacccaaaatgtgaatgaagctaatgtgaatgtgagtgaagctcccttcaggcccgctgccctaggatatgccctcctggtgactcgggggctgtctcagacgactagcccaggacccatctttctcacacggatttagtcccaccctatggccactggccgtatctgagggctgctccccttttagaatttacctcttatgagctccatgttgcttcactctatccaaagtgtcacttggtgcataagcacagaaatctgaaaaatggccatgttgtctttttttttttttttttttaatgccaagattgacaggttggccgtttgcttaatgccagaagttgggggaaagttacacttttctaagaataatggactcttaaggcattgagggctctaaacaggattctttaatcatggagcaagagaatttcaaggcaggggattttatcccccaccaaaaacacagtgaaaggcctgcttttgtgtcccattcacatgccctcggtcactgagtctggagtgaaccacgggttgaggaagtcaggctgttggcgtgtcccagcaccacaccatccctaaagtgccaggtgatctcctgtggctcatcggtggaagcagtggggtaggctgctgccctgctgtggaagaggagcaacaatcagacatgagtccaccctttggagaccaagcctcagctctttggtggggcccagggacacgccacacaggtggccatcacagccccatggacaacactaattgtccacagcaaagggcaaggaatcctctgggagcttcttccgtttcttcccccaagatacccatcttgaaaaacactatttctggaatgcttctgcatcaaaggagattctttgagatagcccatcttcctgagcttagcaaatacaggagttttcactttctttaggaaagagaagctttcaggggaaggagagaatgattttgctgacttcccaagccctggtgaccagacccaaggcagggcccagcataattccctccagttggatgaacattcaaagagagctcgttccctaccctggctggagaacccgaggccagaaggcaaaaaccagaaagggaacagtccataacttacctctgcttctgaccgatggtgtttggggaataggttactttgggactgagttttggggtcctttggtgtcctaaggaactttagtgtagagaaaataagacttctggtgctgctggggtatgttcttgggcttaattcccccaagcagaagaccagatccaagatgtttggacaccctgtcagacgttggtcccaagtttaattagatttctgaatctcgttgaggccaaggaatgatccatactgaaaaaatgctgagccagccatctttggcaaaggtccctgagctcttgctatctctcaagagtgctgagaaccacggtgaaagtgctgctctaggcccacaagtgtaactatgctgttaacagctgtcaatagataattaaaattcatactgtgtgnnnnnnnnnnnnnnnnnnnnnnnnnnngggggggcccttttaaaaaaacccttgggggggccaaatttaacgggggatggaaaagaaaaatttttttccttaaggggggggtaataaaaaccagggccgggcccggtttttaaaaagggggaaagggaaaaaaccgtaacttgggaatttttgaaaaaaaacttttttttggggggggaaaaaattggaacaaccccccaaaaaaaattaaaggctttagggnnnnnnnnnntttttaaggggaaaagggggaaaaacaaccggaaaagcctgg

SEQ ID NO: 155391 - DNA, 1181 bp, Homo sapiens
ttctggtcacggttagccaggctcgccgggaaagttgccagtaactggctgaacacaccgttgatgatctgcgctacctgctgtacctgcggcttttcgtcgtactgttccggcatgttgttggcgatcagacgcatctgctcacggtcaaagttgaccatctgtgcggcgatgtttttcatagatccaccccgtaaatccagtctgtgtttgtcaggtcgagttttggtttgctggctgtcacgcctgcctgttgcttgttacggttgatttcgagttgggtccacttatcgcggagtttggccgggctcagcacgttaccggaccagaagttgtcctggcatgcccagcggaacagcacacacatgtcgcggtggttacgtccgtcacgttcacgcatcaggcggatatcgttagcccacccagcaaaattcggttttctggctgatggtgcgatagtcttcaccatgtcaaacatccactctgcggcggtcaggtcttctgctgtcccccacttgctgccgctctgaattgcagcatccggtttcaccacagaaaggtcgttttctggctggtcagaggattcgccagaattctctgacgaataatcttttcttttttcttttgtaatagtgtcttttgtgtccccctgttttgagggatagcaatcccccaatttgagggatgttttatccctcgttttaggggattttccctcgttttgagggatgcaccattctgagatgtttttatttggtccaaacatgccgccttgctgcttgataatattcattctgacgagttctaacttggcttcattgcaccgtttgacaggtaactttgtaatctcgctaagttgagaatcggtgattctgtccattggtttattccacccataggttttacgcagaatggcaagcagcactttaaactgtcgcttggtcagatctgcgcccgaataagcctcaagcagcatatttgatagtctggcgtaaccatcatcgagatctgccacattacgctcctgtccggcaaagttacctctgctgatctgcgacttatcaacgcccacagcttccgctgtcttctcagttccaagcattgcgattttgttaagcaacgcactctcgattcgtagagcctcgttgcgtttgtttgcacgaaccatatgtaagtatttc

SEQ ID NO: 155392 - DNA, 1794 bp, Homo sapiens
ttacgatactgacacagggattcgtattaacgcatggccatacggattggtgatttcttttgtttcactaagccgaaactgcgtaaaccggttctgtaacccgataaagaagggaatgagatatgggttgatatgtacactgtaaagacctctggatggactgtgcgcacgtttcatccccaaggaaaaattcatagccttttcatcgccggcatcctcttcagggcgataaaaaaccacttccttccccgcgaaactcttcaatgcctgccgtatatccttactggcttccgcagaggtcaatccgaatatttcagcatatttagcaacatggatctcgcagataccgtcatgttcctgtagggtgccatcagattttctgatctggtcaacgaacagatacagcatacgtttttgatcccgggagagactatatgccgcctcagtgaggtcgtttgactggacgattcgcgggctatttttacgtttcttgtgattgataaccgctgtttccgccatgacagatccatgtgaagtgtgacaagtttttagattgtcacaccggtgccgggcagccacatacagcgcaatgtgtaccactaggcgctgacttgaggtaaccagcttctttctttttgaaagcattgactctggctctaaaaagtaggaatccaggggcccagtgcctaagtaattcagcctggggctagagggcaggataagaaaatatatcgtaggaaagcggaccgttaaaccaagtcttgctcctttcagtccgaacttagctttgatttctgcgatcttcgccagagcctgtgcacgatttagaggtctaccgcccatgacaggaagttgttttactgggccgactgtaggtaactccatcctacttagtttgaaattcatacgtttcactacagaaatattcatatgatttatttctttgggcttccctagttggctgaacacaccgttgatgatctgttctacctgctgtacgggcggcttttcgtcgtactgttccggcatgttgttggcgatccgacgcatctgctcacggtcaaagttaaccatctgtgcggcgatgtttttcatagatccaccccgtaaatccagtatgtcgcggtggttacgtccgtcacgttcacgcatcaggcggatatcgttagcccacccagcaaaattcggttttctggctgatggtgcgatagtcttcaccatgtcaaacatccactctgcggcggtcaggtcttctgctgtcccccacttgctgccgctctgaattgcagcatccggtttcaccacagaaaggtcgttttctggctggtcagaggattcgccagaattctctgacgaataatcttttcttttttcttttgtaatagtgtcttttgtgtccccctgttttgagggatagcaatcccccaatttgagggatgttttatccctcgttttaggggattttccctcgttttgagggatgcaccattctgagatgtttttatttggtccaaacatgccgccttgctgcttgataatattcattctgacgagttctaacttggcttcattgcaccgtaagacaggtaactttgtaatctcgctaagttgagaatcggtgattctgtccattggtttattccacccataggttttacgcagaatggcaagcagcactttaaactgtcgcttggtcagatctgcgcccgaataagcctcaagcagcatatttgatagtctggagtaaccatcatcgagatctgccacattacgctcctgtccggcaaagtacct

SEQ ID NO: 155393 - DNA, 1182 bp, Homo sapiens
  misc_feature (1)...(1182): n = a,t,c or g
atggcctgggccccgggcgtcagccgcgcccgccttggaggcgcggtcctccaagtgcggccctccaagtgcggtcctcggggaggtaactttgccggacaggagcgtaatgtggcagatctcgatgatggttacgccagactatcaaatatgctgcttgaggcttattcgggcgcagatctgaccaagcgacagtttaaagtgctgcttgccattctgcgtaaaacctatgggtggaataaaccaatggacagaatcaccgattctcaacttagcgagattacaaagttacctgtcaaacggtgcaatgaagccaagttagaactcgtcagaatgaatattatcaagcagcaaggcggcatgtttggaccaaataaaaacatctcagaatgggggnacacaaaagacactattacaaaagaaaaaagaaaagattattcgtcagagaattctggcgaatcctctgaccagccagaaaacgacctttctgtggtgaaaccggatgctgcaattcagagcggcagcaagtgggggacagcagaagacctgaccgccgcagagtggatgtttgacatggtgaagactatcgcaccatcagccagaaaaccgaattttgctgggtgggctaacgatatccgcctgatgcgtgaacgtgacggacgtaaccaccgcgacatactggatttacggggtggatctatgaaaaacatcgccgcacagatggttaactttgaccgtgagcagatgcgtcggatcgccaacaacatgccggaacagtacgacgaaaagccgcagtttgttgcatggtgccgggaagaagcatccgttaccgccggactgccaaacgtcagcgagctggttgatatggtttacgagtattgccggaagcgaggcctgtatccggatgcggagtcttatccgtggaaatcaaacgcgcactactggctggttaccaacctgtatcagaacatgcgggccaatgcgcttactgatgcggaattacgccgtaaggccgcagatgagcttgtccatatgactgcgagaattaaccgtggtgaggcgatccctgaaccagtaaaacaacttcctgtcatgggcggtagacctctaaatcgtgcacaggctctggcgaagatcgcagaaatcaaagctaagttcggactgaaaggagcaagtgtatga

SEQ ID NO: 155394 - DNA, 2466 bp, Homo sapiens
atgaagctctgccgagaactctctgatttggttgtgtacacaaactccgtggccgctcaggacattgtggatgacggaaccacaggaaatgtgttatcattcagtgaaacaagagcacatcaggttgttcagcaaaaatcagagcagttcatgatttataatcaaaagcaactcacgaggatttacccctctgcctaccgcattgattccagtaacttcaaccctctcccctactggaacgcaggctgccagctagtggcactgaattatcaatctgaaggacgaatgatgcagttaaaccgagccaaattcaaggcaaatggcaattgtggctatgtcctcaaaccccagcaaatgtgcaaaggtactttcaaccctttctctggtgaccctcttcctgccaaccccaaaaagcagctcatcctgaaagttatcagtggacagcaactccccaaacctccagactccatgtttggagatcgaggcgagatcattgacccttttgttgaagttgaaattattggattgccagtagattgttgtaaagatcaaacccgtgtggtagatgacaatggatttaaccctgtgtgggaagaaacactgacatttacagtacacatgccagaaatagctttggttcggttccttgtgtgggatcacgatcccattggacgagactttgttggacaaagaactgtgaccttcagcagcttagtgcctggctaccggcatgtctatttggaaggactgacagaagcatccatatttgtacacataaccatcaatgaaatctatggaaagaacagacaactccagggtctgaagggactgttcaataagaatcctaggcacagttcttcagaaaacaattcccattatgtacggaagcgatccattggagatagaattctgcgacgcacagctagcgccccagccaaaggcaggaaaaagagcaaaatgggcttccaagaaatggtggagataaaggattctgtgtccgaggccacaagagatcaagatggcgtgctgaggaggaccacacgcagtttgcaagcacgccctgtctctatgcctgttgacagaaaccttctgggagctttgtcgctgcctgtatctgaaacagcaaaagacattgaaggaaaagaaaactctctagcagaagataaagatggcagaagaaaagggaaagcaagtataaaagatccacattttctaaatttcaacaaaaagttatcatcctcctccagtgctctgctccacaaagataccagccaaggggacaccattgtatctactgcccacatgtcagtcacaggagaacagctgggcatgtcaagtcctaggggtgggagaaccacatcaaatgccacaagcaattgccaggaaaacccctgtcccagcaagtctctctccccaaagcagcatttggctcccgatcctgtagttaaccccacacaagatctgcatggtgtgaaaatcaaggaaaagggtaatcctgaggactttgtggaagggaaaagcatcttgtcaggaagcgtcctttctcatagcaacctagaaattaagaacctggaaggtaataggggtaagggccgagctgcaacatccttttctttgtcagacgtctccatgctctgttctgacatacctgacctacattcaactgcaattctgcaggagagtgtaatttcccatcttattgacaatgtcactttaacaaatgagaatgagccgggcagttccatctcagccctgattggccagtttgatgagaccaacaatcaggctctcacagttgtttctcatcttcataataccagtgtgatgtcaggccattgtcccttgcctagcctgggcctaaaaatgcccatcaagcatggtttttgcaagggaaaatccaagtcttccttcctgtgctcatctccggagctgatagcactctcgagttctgagaccaccaaacatgcaacgaacacagtttatgaaactacctgcactcccatctctaaaaccaaaccagatgatgacctttctagtaaggccaagacagcggccttagaaagcaacctgcctggatcccctaatacttctcgtggctggttaccaaaaagtcctaccaagggagaagactgggaaacactgaagagctgcagccctgcctcttcccctgatttgaccctggaggatgtaatagctgatcccactctctgtttcaattctggggagagcagccttgtggaaattgatggagaatcagaaaatctttctctaacaacctgtgaatataggagagagggcacaagtcaacttgcttctcctttaaaactcaagtacaatcagggcatgggacttcctgatagctggactgtagtgattgttattgcttgtctgggtctagccacccagtggggctaccaggctccagcctggtactcaggaatatctgcaaagagtcctgttaagtga

SEQ ID NO: 155395 - DNA, 2245 bp, Homo sapiens
atgacaaatacagcaaaaatactcaacttcggcagaggtaactttgccggacaggagcgtaatgtggcagatctcgatgatggttacgccagactatcaaatatgctgcttgaggcttattcgggcgcagatctgaccaagcgacagtttaaagtgctgcttgccattctgcgtaaaacctatgggtggaataaaccaatggacagaatcaccgattctcaacttagcgagattacaaagttacctgtcaaacggtgcaatgaagccaagttagaactcgtcagaatgaatattatcaagcagcaaggcggcatgtttggaccaaataaaaacatctcagaatggtgcatccctcaaaacgagggaaaatcccctaaaacgagggataaaacatccctcaaattgggggattgctatccctcaaaacagggggacacaaaagacactattacaaaagaaaaaagaaaagattattcgtcagagaattctggcgaatcctctgaccagccagaaaacgacctttctgtggtgaaaccggatgctgcaattcagagcggcagcaagtgggggacagcagaagacctgaccgccgcaagagtggatgtttgacatggtgaagactatcgcaccatcagccagaaaaccgaattttgctgggtgggctaacgatatccgcctgatgcgtgaacgtgacggacgtaaccaccgcgacatgtgtgtgctgttccgctgggcatgccaggacaacttctggtccggcaggcgtgacagccagcaaaccaaaactcgacctgacaaacacagactggatttacggggtggatctatgaaaaacatcgccgcacagatggttaactttgaccgtgagcagatgcgtcggatcgccaacaacatgccggaacagtacgacgaaaagccgcaggtacagcaggtagcgcagatcatcaacggtgtgttcagccagttactggcaactttcccggcgagcctggctaaccgtgaccagaacgaagtgaacgaaatccgtcgccagtgggttctggcttttcgggaaaacgggatcaccacgatggaacaggttaacgcaggaatgcgcgtagcccgtcggcagaatcgaccatttctgccatcacccgggcagtttgttgcatggtgccgggaagaagcatccgttaccgccggactgccaaacgtcagcgagctggttgatatggtttacgagtattgccggaagcgaggcctgtatccggatgcggagtcttatccgtggaaatcaaacgcgcactactggctggttaccaacctgtatcagaacatgcgggccaatgcgcttactgatgcggaattacgccgtaaggccgcagatgagcttgtccatatgactgcgagaattaaccgtggtgaggcgatccctgaaccagtaaaacaacttcctgtcatgggcggtagacctctaaatcgtgcacaggctctggcgaagatcgcagaaatcaaagctaagttcggactgaaaggagcaagcgcaacagtaaccagcataaatcaggccgcggctaaaatggcacgggcaggtcttctggttatcgaaggtaaggtctggcgaacggtgtattaccggtttgctaccagggaagaacgggaaggaaagatgagcacgaacctgatgaacaaactggatacgattggattcgacaacaaaaaagacctgcttatctcggtgggcgatttggttgatcgtggtgcagagaacgttgaatgcctggaattaatcacattcccctggttcagagctgtacgtggaaaccatgagcaaatgatgattgatggcttatcagagcgtggaaacgttaatcactggctgcttaatggcggtggctggttctttaatctcgattacgacaaagaaattctggctaaagctcttgcccataaagcagatgaacttccgttaatcatcgaactggtgagcaaagataaaaaatatgttatctgccacgccgattatccctttgacgaatacgagtttggaaagccagttgatcatcagcaggtaatctggaaccgcgaacgaatcagcaactcacaaaacgggatcgtgaaagaaatcaaaggcgcggacacgttcatctttggtcatacgccagcagtgaaaccactcaagtttgccaaccaaatgtatatcgataccggcgcagtgttctgcggaaacctaacattgattcaggtacagggagaaggcgcatga

SEQ ID NO: 155396 - DNA, 6321 bp, Homo sapiens
  misc_feature (1)...(6321): n = a,t,c or g
atgactaagctggtagccctatggagggaggaagcggaaaacgacctttctgtggtgaaaccggatgctgcaattcagagcggcagcaagtgggggacagcagaagacctgaccgccgcagagtggatgtttgacatggtgaagactatcgcaccatcagccagaaaaccgaattttgctgggtgggctaacgatatccgcctgatgcgtgaacgtgacggacgtaaccaccgcgacatactggatttacggggtggatctatgaaaaacatcgccgcacagatggttaactttgaccgtgagcagatgcgtcggatcgccaacaacatgccggaacagtacgacgaaaagccgcaggtacagcaggtagcgcagatcatcaacgccagttactggcaactttcccggcgagccctggctaaccgtgaccagaacgaagtgaacgaaatccggcgccagggggttctggcttttcgggaaaacgggatcaaccaggatggaacagggaatgcgcgtaaacccgatcggagaaacgaccattttttgccatcaacccgggcagatttggtgcatgggggccgggaagaaaacaatccgttacccgaccggaatggccaaaaccgtggcggtcgtttggacgcattgtttgcggcctcgctcttctcgggtacggccccagcgtcccgcgggttcgctcggttgttccgcagcccttcccccaccctaaccaactccccgacgtatgaactgcgctaccccacgcgtacccgagctacatacccggcggtcggtctctccataccgaacaagaaacacacgcaaccttctccacacatgaataatgtgacaacggactattgtcttgacatcataaagaagtttgaagtttcagaagaaaataaggtgaaaaatgttcttggcatagaaggcttcacgaacttcatgcgtagtcctgcctgtgacatatttaacccattgcaccatgaagtgtaccaagacatggatcagcccctctgcaactactacattgcttcctctcacaatacatacctgactggagaccagctcctttctcagtccaaagtggatatgtatgcacgggtgctgcaagagggctgtcgctgtgtggaagttgactgttgggatggcccagatggagagccagtagtacatcatggttacactctcacttcaaaaattctcttcagagatgttgtggagaccatcaacaagcatgcctttgtgaagaatgagtttcctgttatattgtctatcgagaatcactgcagtatccagcagcaaaggaagattgctcagtacctgaaaggaatattcggagacaaactggacctgtcatctgttgatacaggggagtgcaagcagcttccaagccctcaaagtttgaaaggcaaaattctagtgaagggtaagaagttgccttatcaccttggggatgatgcagaggaaggggaagtttccgatgaggacagtgcagatgaaattgaagacgagtgcaaattcaagctccattatagtaatgggaccactgagcatcaggtggaatctttcataaggaaaaaactggagtcactgttaaaagaatctcaaattcgagataaagaagatcctgatagtttcacagtgcgggcactactgaaggccacgcatgaaggcttaaatgcacacctgaagcagagtccagatgtaaaggaaagtggaaagaaatcacatggacgatccctcatgaccaactttggaaaacataagaaaactacaaaatcacggtctaaatcttacagtactgatgatgaggaagacacacagcagagtactggcaaggagggtggccagctgtacagattgggtcgccgaaggaaaaccatgaagctctgccgagaactctctgatttggttgtgtacacaaactccgtggccgctcaggacattgtggatgacggaaccacaggaaatgtgttatcattcagtgaaacaagagcacatcaggttgttcagcaaaaatcagagcagttcatgatttataatcaaaagcaactcacgaggatttacccctctgcctaccgcattgattccagtaacttcaaccctctcccctactggaacgcaggctgccagctagtggcactgaattatcaatctgaaggacgaatgatgcagttaaaccgagccaaattcaaggcaaatggcaattgtggctatgtcctcaaaccccagcaaatgtgcaaaggtactttcaaccctttctctggtgaccctcttcctgccaaccccaaaaagcagctcatcctgaaagttatcagtggacagcaactccccaaacctccagactccatgtttggagatcgaggcgagatcattgacccttttgttgaagttgaaattattggattgccagtagattgttgtaaagatcaaacccgtgtggtagatgacaatggatttaaccctgtgtgggaagaaacactgacatttacagtacacatgccagaaatagctttggttcggttccttgtgtgggatcacgatcccattggacgagactttgttggacaaagaactgtgaccttcagcagcttagtgcctggctaccggcatgtctatttggaaggactgacagaagcatccatatttgtacacataaccatcaatgaaatctatggaaagtggagccctttaatactcaaccccagttatactatattgcactttctaggagctacaaagaacagacaactccagggtctgaagggactgttcaataagaatcctaggcacagttcttcagaaaacaattcccattatgtacggaagcgatccattggagatagaattctgcgacgcacagctagcgccccagccaaaggcaggaaaaagagcaaaatgggcttccaagaaatggtggagataaaggattctgtgtccgaggccacaagagatcaagatggcgtgctgaggaggaccacacgcagtttgcaagcacgccctgtctctatgcctgttgacagaaaccttctgggagctttgtcgctgcctgtatctgaaacagcaaaagacattgaaggaaaagaaaactctctagtacaaatctgaataggaaacaacttaagcagaagataaagatggcagaagaaaagggaaagcaagtataaaagatccacattttctaaatttcaacaaaaagttatcatcctcctccagtgctctgctccacaaagataccagccaaggggacaccattgtatctactgcccacatgtcagtcacaggagaacagctgggcatgtcaagtcctaggggtgggagaaccacatcaaatgccacaagcaattgccaggaaaacccctgtcccagcaagtctctctccccaaagcagcatttggctcccgatcctgtagttaaccccacacaagatctgcatggtgtgaaaatcaaggaaaagggtaatcctgaggactttgtggaagggaaaagcatcttgtcaggaagcgtcctttctcatagcaacctagaaattaagaacctggaaggtaataggggtaagggccgagctgcaacatccttttctttgtcagacgtctccatgctctgttctgacatacctgacctacattcaactgcaattctgcaggagagtgtaatttcccatcttattgacaatgtcactttaacaaatgagaatgagccgggcagttccatctcagccctgattggccagtttgatgagaccaacaatcaggctctcacagttgtttctcatcttcataataccagtgtgatgtcaggccattgtcccttgcctagcctgggcctaaaaatgcccatcaagcatggtttttgcaagggaaaatccaagtcttccttcctgtgctcatctccggagctgatagcactctcgagttctgagaccaccaaacatgcaacgaacacagtttatgaaactacctgcactcccatctctaaaaccaaaccagatgatgacctttctagtaaggccaagacagcggccttagaaagcaacctgcctggatcccctaatacttctcgtggctggttaccaaaaagtcctaccaagggagaagactgggaaacactgaagagctgcagccctgcctcttcccctgatttgaccctggaggatgtaatagctgatcccactctctgtttcaattctggggagagcagccttgtggaaattgatggagaatcagaaaatctttctctaacaacctgtgaatataggagagagggcacaagtcaacttgcttctcctttaaaactcaagtacaatcagggtgtggtagaacactttcaaagaggtttgagaaacggctactgtaaagagaccctccgcccttctgtccctgaaatattcaacaatattcaagatgtcaaaactcaaagtatttcttatctagcctatcagggtgctggctttgtgcataatcatttctcagattcagatgcaaaaatgttccagacctgtgtgccccagcaatctagtgctcaagatatgcatgtccctgtacccaagcagttggcacatcttcctttgcctgctctgaaactgcctagtccttgcaaatccaaaagtctgggggacttaacatcagaggacattgcctgcaattttgagagcaagtaccagtgtattagtaagagttttgttacaactggcattagagacaagaagggcgtgactgtgaagacaaagtcgttagagcctatagatgccctgaccgagcagcttcggaagcttgtgtcctttgaccagggaggnccaactgccaagtgctatattcaaagcaggatgccaatcagctccccccggcactggtcaggaagttgtcatccagaagtcagagcagagtgcgcaatattgctagtcgtgccaaggagaaacaggaagccaacaagcagaaagttccaaaccccagcaatggggcaggagtggttcttagaaacaaaccctcagcacccacccctgcagtgaatcgccactccaccggctcctacatcgcaggctacctgaagaacacgaaagggggtggccttgaaggccggggcatcccagaggggggcatgcacggctcttcactatggccacgttgaccagttttgttcagataattctgtttttgcagactgagccaagcagtgatggattaaacccagaaatttattttcttttgagactgtgaattatttaaaactgcattcttaaggttttcaaggtattctgtagaatgtcagagttttcagtaaataagttccttggctttggaatgattttcaaatgtatttttaaacttgtatttgggtctccctttgacttcatgtgttctccctgttaatgcgtttgtatatagatttggtgacatttcccatgtacctattatgatctttctcccttgagttgttgtaaactgtatcagtatgaaatatgtggcatgccctaggatgtggaaactcctcaggcagctcggggttataatgtgtgtgtgtttcacccaaggatgtcctttactgtgtccctcaggattggcagtcacaaatgtaggtccatttttactctctaaccgttgaggtgattaagagactttgcaaacgacaaagggatgaattccttactttaatctgttatcatttttcctatgtttccctctttgtgcagaagcccagatgcatttttataactcagttttaaaaactttaaaatagttaccttgccttttaggatgttcttatcccacccataatgagagttgaaaggggatggatagctgctccccatgcccttcccactttttggaataggccgtgagggtgtgaggaagaaggctgtcttttgtacataaggacaaaattgtttgttttacataaattttgttacatatttttgctaaatggctttgtatgtaacaaggaagcgagttgcccaaactacctgttgtacttttgaattttctgattgaattacagactgcgaacaacggctttccagaatgagggacttcccatcagactcccaatgataatagtagcacaaattgaaaacttccccaaagctttcacagaatattttctcataataaaatccaagtgaacagataattagaagaaacccttttccttcagggaaccaagcaactctattttagtactgacatgcattattttcactgtgaattcacttttttattgcatgttcagatgtccctctttgtttttttttttttgtaacattaactgcaatgatgttcttcctggaattcatgaaaatataattaaaacacatttttaaac

SEQ ID NO: 155397 - DNA, 396 bp, Homo sapiens
aacaagaagaagaagcgagatggtgacgaccgttggtttaggctcgttcttagcttcgacgaggagaagaggcgggagaaggcagccattgaggagattaagcagcggctgaaagaggagcagaggaagcttcgggaggagcgccaccaggaatacttgaagatgctggcagagagagaagaggctctggaggaggcagatgagctggaccggttggtgacagcaaagacggagtcggtgcagtatgaccaccccaaccacacagtcaccgtgaccaccatcagtgacctggacctctcgggggcccggctgctcgggctgaccccacctgagggaggggctggagacaggtctgaggaggaggcgtcatccacggagaaaccaaccaaagccttg

SEQ ID NO: 155398 - DNA, 438 bp, Homo sapiens
  misc_feature (1)...(438): n = a,t,c or g
ttttttttttttttaaggagtggctgagaatttaatactggtaaacactataaattgtaaatgtaagttgtaaatgaccttgtcactggagaggggagaaggaactggagtcagacgtcccagcagaaacagcagcggcaacatgcggtaggcacacctggagagcaacaggcactttggtaagtggttcatgcacatggtcttattttagtctcggggcagccctaagaggtaggtatctggtgtcaccttacacatgacgagacaaaccagagaggtcagcacagcaggaagctcatgcaggcgaccaagcaggcagagcctgggntttcaaacccgagccctgctgtgtgcaagaacccctggggacttcagctgttcctgcttcacagcaggctgagcacccagagccacttggagggcccataataggcacca

SEQ ID NO: 155399 - DNA, 936 bp, Homo sapiens
tcttcagggagaggaagccggcggcctcactgctatgggccgcaacaagaagaagaagcgagatggtgacgaccggcggccgaggctcgttcttagcttcgacgaggagaagaggcgggagtacctgacaggcttccacaagcggaaggtcgagcgaaagaaggcagccattgaggagattaagcagcggctgaaagaggagcagaggaagcttcgggaggagcgccaccaggaatacttgaagatgctggcagagagagaagaggctctggaggaggcagatgagctggaccggttggtgacagcaaagacggagtcggtgcagtatgaccaccccaaccacacagtcaccgtgaccaccatcagtgacctggacctctcgggggcccgggctgctcgggctgaccccacctgagggaggggctggagacaggtctgaggaggaggcgtcatccacggagaaaccaaccaaagccttgcccaggaagtccagagaccccctgctctctcagcggatctcctccctcacagcatcactacatgcacacagccgcaaaaaggtcaagaggaaacatccccgacgggcccaggactccaataaagcccccaagggcccctcgtaccagcaaggcccagcgcctctgtttgtgtgtgggtggtggtgtgtggtgggtggtgtggtgtgttggtggttgtgtgtgtgtggtgtggtggtggggggggtgagtgttttctttcttagcttggctgtccctgtagcccagcctgcacctaggtgtgcctaccgcatgttgccgctgctgtttctgctgggacgtctgactccagttccttctcccctctccagtgacaaggtcatttacaacttacatttacaatttatagtgtttaccagtattaaattctcagccactcctttcaaaaaaaaaaaaaaaa

SEQ ID NO: 155400 - DNA, 1257 bp, Homo sapiens
  misc_feature (1)...(1257): n = a,t,c or g
ggacatagaaaagacagtacaaaggttgtaagtgtcctgtcgctaattcccagggccagaatctcacaagaagatcctctcaaagacttaaaagcctggcttacaaaaataaccagaaaccaaacttgtaagcagttacaatttcttccttttgcttcttgaccagctgagatacagaatatcttgaggtctggttcagctgatgaaaaattctgtctcagaaacgatgagtaagaaaccatacaagaaaaagaagtccctcatctatctgcatacacgcaatgtgggagaagtggggtggctaggaaactctgggcctgctgcccccttcgattctttttttttttctttgtgaattgaatgtacgatacaaatggtaggccttcatgtgagccagttactacatgaatcttcatttcccacagtggtttgttcattcatcagcgttaggcttggtcctggctccacctttctcctctccgggcactgaccccacctttccgtgtatttactgtaggctattaaatatgatcatgacccgccttgcattttcattcatcacctgtttatgcccaaatttaaaggaagtttggctctttttggccaaaaaaaaattgtaatagtcggcacgctgggatttgtaggggccagcaaaattgcgggcagtggaaactagtttcacttcttaaagcccttccatttcccacaaggtttaaggctctcggaaaccccatttgatcctttggttcctatttcgatcctccttttggaatctgaaaatcggtctccatgttgtatggcaggattaggaagtttgccttgtttgttaactcttccaacacagggtatcagggagaaagaggccttatctgttcctccatccccccatgttttgacagactgctaaggaattcctcaggacttcctttggttgggggattttactttcccaaaagtctggatctgatttctttcaggggtaggacaagcttggtcctagtgctctgcttcaggtcttatcagaaggaaacccagggaataggaaaaggtaggatgccttgacttttgtccctgttgtgggggacttaaagtgttttttgccagaattgttcaaaagctccggtttcaaactctgtaggagttttcatggggaaaaacaaaacaaaacaaaaaaggtggcttattcgtccccggagatgttgtnagtaaggttcttccagcacggctttggggttttncccaantggggaagccaag

SEQ ID NO: 155401 - DNA, 383 bp, Homo sapiens
  misc_feature (1)...(383): n = a,t,c or g
ntgtacagaatcgaactctgcacttctctctcctttacgagccgaaaaggaaaagcaagccagaatcttatttatattgttataaaatattccaagatgagcctctggccccctgagccttcttgtaaatacctgcctccctgtctcaaatccaatagttcacagctgagctggcttctgtggtgtgtgctcgtttggggggtggggtggaaatactgccaaggctggggggggccacctctccatctggtcagtttgtggggtgggtactctgccagcagatgggaggatatagggaaacagcacacaagtctaaggggggtgcccaagggggttattttcatcatatatatataacataaatatatagtaaaatagacgag

SEQ ID NO: 155402 - DNA, 358 bp, Homo sapiens
  misc_feature (1)...(358): n = a,t,c or g
actccttctccttccccatcggccttctggggggcttcagggagaggctgcattgcctgcnaggtccttcgcanactccggttcctcctcagaggagctcggggagtccgcctnactgctgtcgtcntccccacagaccgctcgggcatgganaattccgcttcggtggagcagctccaggagacgctgctgcgggctcttcgggctctggtgctgaagaaccggcccttgganacttcccgcttcaccaagctgctgctcaagctgccggactgcggacccttcatcagcagcttgggccanaagtgcggaatgttgtgtttgcggtggttgacgtagtgctcgaacgccagcaggt

SEQ ID NO: 155403 - DNA, 2514 bp, Homo sapiens
  misc_feature (1)...(2514): n = a,t,c or g
cctgctcagtgccatgttcgacttcagcgagaagctcaactccctggcgcttaccgaggaggagctgggcctcttcaccgcggtggtgcttgtctctgcaggtaggtcaggctctcgcctgacccgggggaggaggcagacgcagttcaattcaacacacctnnnnnnnnnnnnnnnnnnnnnnnnnnnnnnnnnnnnnnnnnnnnnnnnnnnnnacatgattcagacacagtctagcttgggaaacagactcatgcccgactaattataaaacagtgagataagtgtcacagtagaagcatgaaccaaggaagcacagacaactatttctgcctgggggagctggggaaggaggtgacacttgagttggggcctcaaaggacaagtaagatgttgccaggcagagaaagggggaagggcatcccaggcagagggaactacacagcaaaaagcaagggagtctggccatgtttggcctgctgaggaagggaaggtggtcttacgggatgggaggtgaccagccctgctgagcccacgctcccagctttcaggcacctcctgctcttggggcagaggcctgggagaaggtatggcactccttctccttccccatcggccttctggggggcttcagggagaggctgcattgcctgccaggtcctcgcagacctccggttcctcctcagaggagctcggggagtccgcctcactgctgtcgtcttccccacagaccgctcgggcatggagaattccgcttcggtggagcagctccaggagacgctgctgcgggctcttcgggctctggtgctgaagaaccggcccttggagacttcccgcttcaccaagctgctgctcaagctgccggacctgcggaccctgaacaacatgcattccgagaagctgctgtccttccgggtggacgcccagtgacccgcccggccggccttctgccgctgcccccttgtacagaatcgaactctgcacttctctctccttcatcagcagcttgggccagaagtgcggaatgttgtgtttgcggtggttgacgtagtgctcgaacgccagcaggtacgcctcctgactcttctcgatcttgtccacacacagcaggcccgagcggtctgttgacattagcagcacagcctgcagcagagccacttccgtgtcatccaggttaaaggcagagagtgacttgcccagttcaaagatggcgtcggagactacgcccaggccgccattcttgagctgctcccgcttgacagccatctccccactcagcgtcagggtgtcgctctcagggtcgtagcggacagccgcccgcagggacatgatctccatgcagcaccccttcaggaggatgatctggtcttcgcaaggcagctcggagaacatgggcagttttttggcaaagtccaccacacgggtgatggccggggtgatgatcttggtaaactcgctgaaggcttccaggtccaccttgtctccgtccggcatggagacaatgggtgactggccaatgtcatcgggcaggaatttccgcctctgtttccaatggctgccctgggcattggtgctgcgatgggcctctgtggcaatgtggatcagatcccactcttcaggagtgggctctggtcgctgctgcagtgatcggatcatctcctccttccgccgccgctcccggttctgctcaatcagcttacgcttggccacccgcttcgagtcatctagaaccaagtccatggccatgcccacggcgatgcacttcttgaagcggcacagctggcactgattgcgggtgatcttgtcaatgacacagcagctgtcatatttgcaggaataggtgggatggaggttcttctggattgtgcggcgaaagaagcccttgcagccctcacaagtgatacagcggtagtgataaccagttgccttgtccccacacacgacacactgctcgtctttgtccaggtaactagggatataccctgacatgctggttttcagggaacattggccgttctttctttttcgctttccatctggtgacctggcactgttctcctctgggtctgacccacactccaccttgcttggcttctgttccattcacttcaattccatccaggatgccctccagcacgccaagagactggggtgggcacactggcccccccggcacacccacaggccacccaccccctgccacccaggccctagggcacagcacccatgatacccgcctcagcacttggcctttcacaccatgccctgcgccccaaggggggcgggcggtgggaggggccagggagtggcaggtgggagggctgggggcaagctgggtttgtgggtcccgggctgtgtgctgggggagtagcttcggagtcttgtcctgtccagagatccctggcgtggcgcgccggaccgggctgggcagcgacgcgggggtctcagcgccccgtgctgggggcgtccatggggggccggtggggccgggccgcccgcctcctgcgcccgggg

SEQ ID NO: 155404 - DNA, 2809 bp, Homo sapiens
ccgaggcgctccctgggatcacatggtacctgctccagtgccgcgtgcggcccgggaaccctgggctgctggcgcctgcgcagagccctctgtcccagggaaaggctcgggcaaaaggcggctgagattggcagagtgaaatattactgccgagggaacgtagcagggcacacgtctcgcctctttgcgactcggtgccccgtttctccccatcacctacttacttcctggttgcaacctctcttcctctgggacttttgcaccgggagctccagattcgctaccccgcagcgctgcggagccggcaggcagaggcaccccgtacactgcagagacccgaccctccttgctaccttctagccagaactactgcaggctgattccccctacacactctctctgctcttcccatgcaaagcagaactccgttgcctcaacgtccaacccttctgcagggctgcagtccggccaccccaagaccttgctgcagggtgcttcggatcctgatcgtgagtcgcggggtccactccccgcccttagccagtgcccagggggcaacagcggcgatcgcaacctctagtttgagtcaaggtccagtttgaatgaccgctctcagctggtgaagacatgacgaccctggactccaacaacaacacaggtggcgtcatcacctacattggctccagtggctcctccccaagccgcaccagccctgaatccctctatagtgacaactccaatggcagcttccagtccctgacccaaggctgtcccacctacttcccaccatcccccactggctccctcacccaagacccggctcgctcctttgggagcattccacccagcctgagtgatgacggctccccttcttcctcatcttcctcgtcgtcatcctcctcctccttctataatgggagcccccctgggagtctacaagtggccatggaggacagcagccgagtgtcccccagcaagagcaccagcaacatcaccaagctgaatggcatggtgttactgtgtaaagtgtgtggggacgttgcctcgggcttccactacggtgtgcacgcctgcgagggctgcaagggctttttccgtcggagcatccagcagaacatccagtacaaaaggtgtctgaagaatgagaattgctccatcgtccgcatcaatcgcaaccgctgccagcaatgtcgcttcaagaagtgtctctctgtgggcatgtctcgagacgctgtgcgttttgggcgcatccccaaacgagagaagcagcggatgcttgctgagatgcagagtgccatgaacctggccaacaaccagttgagcagccagtgcccgctggagacttcacccacccagcaccccaccccaggccccatgggcccctcgccaccccctgctccggtcccctcacccctggtgggcttctcccagtttccacaacagctgacgcctcccagatccccaagccctgagcccacagtggaggatgtgatatcccaggtggcccgggcccatcgagagatcttcacctacgcccatgacaagctgggcagctcacctggcaacttcaatgccaaccatgcatcaggtagccctccagccaccaccccacatcgctgggaaaatcagggctgcccacctgcccccaatgacaacaacaccttggctgcccagcgtcataacgaggccctaaatggtctgcgccaggctccctcctcctaccctcccacctggcctcctggccctgcacaccacacgctgccaccagtccaacagcaacgggcaccgtctatgccccacccacggtgtatgcagccccagaaggcaaggcacctgccaacagtatcccggcagggcaactcagagaatgttctgctgggcatgtcctatgaacatgttacccgcatggacgcagtggggcgaacggttgcaggagatctgggaggatttctccatgagcttcacgcccgctgtgcgggaggtggtagagtttgccaaacacatcccgggcttccgtgacctttctcagcatgaccaagtcaccctgcttaaagggggtgcccttttggagggcggaaggccccctttggtttgttgttcaacgtgaaggaccagacagtgatgttcctaagccgcaccacctacagcctgcaggagcttggtgccatgggcatgggagacctgctcagtgccatgtttcgacttcagcgagaagctcaactccctggcgcttaccgaggaggagctgggcctctttcaccgccggtgttgcttgtctcggcagaccgcttcgggcatggaagaattccgcttcggtggagcagctccaggaggacgctgctgcgggcttcttcgggctctggtgctgaagaaccggcccttggagacttcccgcttcaccttgctgctgctcaagctgccggacctgcggaccctgaacaacatgcattccgagaagctgctggtcctttccgggtggacggccccagtgaccccgccccgggccggcctttctgccggctgccccctttgtacagaatcggaactctgcacttctctctccttttacgagacggaaaaggaaaagcaaaccagaatcttatttatattgttataaaatattccaagatgagcctctggtcccctgagccttcttgtaaatacctggctccctcccccatcaccgaacttcccctcctcccctatttaaaccactctgtctcccccacaaccctcccctgggcctctgatttgttctgttcctgtctcaaatccaatagttcacagctgaaaaaaaagaaaaaaaaaa

SEQ ID NO: 155405 - DNA, 2493 bp, Homo sapiens
  misc_feature (1)...(2493): n = a,t,c or g
ggatcccaaagccatccttccacctgggctccctcattggccattcagaaacaacccccactctactgagaaatcgaaggcagcaccgctaaaccctctggcaaactacaggggcgatttggtcagtgctcctcccaccacacccaggatgactgttccccttccctcctaggtgctgatggtgcgctttgcttcgttgttcaacgtgaaggaccagacagtgatgttcctaagccgcaccacctacagcctgcaggagcttggtgccatgggcatgggagacctgctcagtgccatgttcgacttcagcgagaagctcaactccctggcgcttaccgaggaggagctgggcctcttcaccgcggtggtgcttgtctctgcaggtaggtcaggctctcgcctgacccgggggaggaggcagacgcagttcaattcaacacaccttttatggagtacctactctatgccaggccctgcaccgggcactggggtatacagacatgattcagacacagtctagcttgggaaacagactcatgcccgattaattataaaacagtgagataagtgtcacagtagaagcatgaaccaaggaagcacagacaactatttctgcctgggggagctggggaagggaggtgacactttgagttggggcctcaaaggacaagtaaagatgttgccaggcagagaaaggggggaagggcatcccagggcagagggaactacacagcaaaaagcaagggagtctgggccatttgtttggcctagctttaggaaagggaaaggtggtcttacgggatgggaggtgaccagccctgctgaagtcccacgtttcccagtttttcaggcacctcctgctcttggggtcagaggcctgggagaaggtatggcactccttctccttccccatcggccttctggggcggcttcagggagaggctgcattgcctgccaggtcctcgcatgacctccggttcctcctcagaggagnctcggggagtccgcctcactgctgtcgtcttccccacagaccgctcgggcatggagaattccgcttcggtggagcagctccaggagacgctgctgcgggctttttcgggctctggtgctgaagaaccggcccttggagacttcccgcttcaccaagctgctgctcaagctgccggacctgccgaaccctgaacaacatgcattccgagaagctgctgtccttccgggtggacgcccagtgacccgcccggccggccttctgccgctgcccccttgtacagaatcgaactctgcacttctctctcctttacgagacgaaaaggaaaagcaaaccagaatcttatttatattgttataaaatattccaagatgagcctctggccccctgagccttcttgtaaatacctgcctccctcccccatcaccgaacttcccctcctcccctatttaaaccactctgtctcccccacaaccctcccctggccctctgatttgttctgttcctgtctcaaatccaatagttcacagctgagctggcttctgtggtgtgtagcgacccggggggtggggtggaaatactgccaaggctggggggggccacctctccatctggtcagtttgtggggtgggtactctgccagcagatgggaggatatagggaaacagcacacaagtctaaggggggtgcccaagggggttattttcatcatatatttattacataaatatatagtaaaatagacgagcaacaattaccataaaaatatctttctttaaaatcctgacccaaaacacaacggggtgaaaaatcgcacataacagacatactgattgtcaacgtggggcaggagtaggagcccctcaagtcacccctgccggtcccacccctccctggggaagagacctacctccttccctgtttctggccacaacccccctccccccagcccagcaccagcttctcatacattcagtagcgcctctgggcagtgtccccctcccccccgcccaggagttcccagggcaggagttactgtcctccttatggacggtctctctctcacaacgccctgccctctcccagccctgcagacccgccaccaggagaaggggtaggggctcctcccccaccctccccaagtctgagcagggaggaggctggatgaggtatgtgtgttatgagtgatgggaggggcaatactgagatggagaggcgggtggtgagggcggggtagtggtcatggctctggcaaccccttgtcctggcctggccccctcgtcctattcccagcaacccgtcctcccaccgatactgcacctgctgctccaccctgcctgccctagtgccccgggccaatactgggggaggcatgctgagcacccacatcaaggccatccccctcattagcaccaatggcccccaggagagggccctgtcccccacttccacagcagggactgggacagctgccgctctagagcaggtgcgtggcactcctg

SEQ ID NO: 155406 - DNA, 398 bp, Homo sapiens
  misc_feature (1)...(398): n = a,t,c or g
nggggtttccccctaaaaagggcccttattaaaaggcccttgaagggttttttgcccccgtttaaaaaattttccccttcccccgggaaaaaaaaggtttttggaaaaaggaaaaaaaggggatttttggccccgggaaaaagggaaacccccgccttttttgattagccccccccaaagtttaaacccagttttgttttggggttttttttaaaagcccatttcgggaaaaggtggccttttaaaaaaaaagtttcccgaaaaaaaaaggggatatttttccctttttttttgggttggggcaaattcccccgttgtttttggggaaccccgtttccaannnnnnnnnnnnnnaaaaaaagcccnnnnnnnnnnngggcggccgctcgcgatctaaa

SEQ ID NO: 155407 - DNA, 1908 bp, Homo sapiens
  misc_feature (1)...(1908): n = a,t,c or g
catttttgcaacaggcttttattactttttttttaaaaccccatataagcaaagcacatttaaaaagaaaatatcctggcaaacaaacacttaacacactggagcaacacaaccaaagaaggcactaccagccagttactcccaccttctgggagggaacgggtactcgatactatacttttttcagaggtttaggacctcagcataggccttgggtctaactgtgctttatgtaaagtctgaattgtccaataattttctcatttcataaacacccttatctctttatatataggctatatgcctttatgtgtaaaataatacatgaactttttttttcccttcctcaaaaaaataaaataggcccatccccccatagagggaaggttcctccagccagcatttcacagcggttgccagcaggacccatgcccttcctattaatgttagagacatgcaggacgaaggaaaatgactctcccacctgctccctttaatatacagcagggagagagtttctaaagggagggaagtgataaggctgagcatgagatggctaaccagggtcttttgtggtttaaaaaaatcttagagttgcggagcttgtgttgcctttgaagctcttggagactatgcacaagttcatacgacggaggggtcagcattccttctgggatcaaggggcagtatggactcagcctgggtcaggagagggaacttctgaagctacaccgaacaagcttgggcttgaaccgacccaagagggacttgggaaggcagaggatagcaaagaaatggtttctcagaggcctgggttggaaaaccagccctgcctttgaaaattacaagtccttctccctctgcactggagtgtcctctgcagcccctggcctacttgttggaattttttgactaaattaattttaggattcagccttaaacaaggaaacccattgcaaaatgtaagtcaggaaatttgatcctccctgtcaatgtggtgctggtatcacttgattggagtcaaaaactcaggcaccccagcatgggagggnaggtctgtgacccttcaaccccatactgaacgcgggctctcctggcccttgtctcccacaccgccgccattgttcacttcctggccaggagaagccaagcagcagagcttcaaggcaaactcgcccttacttccttatttctctctgacaccataaaggcatctgagatctacgggcaggccaggcccaccggctctcccgagcgcagtgccgggtctggccccatgccttcaaaaacagaaaggactcccaattggccgaaattggaggctcccctctctgtaatcaaggcaactccttgggcagcaccctggagatcccatagtcgcagtgggaggagggaggcagtgctggaggccgatggggaacccaagtagcccaggccctcctctgctctttagctggggaaggctgaagacagcttggacacctttctctagcattgcattgtggctttctcttaactgtcatgatttccatacttagcaggagactttttaaatggtcaatgactggcttcccttgggggaaccacatgacgatgatgacaacattaaattcaaatttgtaacttagcaacgaacattttagttgacaatatatgtggctaagtaccacacatacgcagatatatgcctttgggtttccatgtccaatgtgggccagggccagagccagggccagggcaggctgcagcttctctggagatctttgagccagcctcagctttggtgctccttaccctgagcatctggggccagtagctttataaacttcccttaagtgtgaaccacaggcaccttggggccgcgggaacagtccttttatgagcattaccctgctttcaggggcttag

SEQ ID NO: 155408 - DNA, 612 bp, Homo sapiens
  misc_feature (1)...(612): n = a,t,c or g
gcttcaagggtggcttaacccaggtttggtggggtggtttaaaaccccttactcaaaagggttaagggctnccttgcccaattgccttgcccactttcaaattcaacattgttttcaaacaaggattttcttttatcttcccccttacaaaatcaaacccaagggaaggggcaacagaaatggggaaaacaggaacaacaggaatcctaaaactccaaaggggaactgtcccaccgaatgaaacactcaagaagtggaacaacccatcttcccgtcccacgctgtgcccccagaacagctgtccccatcccatgaaacacagggtaaacactctggccgggctccgcaccagtgggctccctgggcccatgggacagcggcagggctcaccacggacagcaacgtggcccagcagcccggccaccctggcgtccctggggcctcctcccctcctctccctctagaccttgtaaacctccacggagctgcctgtctgggataatttggggattttttttgctgggggataattgcttttgcataacccctaaagagcaagccacaccaggtctgctagctaggtgtaccgcggtgtggtggtggcggccgctc

SEQ ID NO: 155409 - DNA, 693 bp, Homo sapiens
ctgcccagggatgccagcagagagggatgcagactatgggacattctaaatcagtgctgttcaagagacctttccatagacgtggaatgttctctgtgttgtcaaacagggcagccattagccacatgtgggtagtaagtacttgaagtgtgacttaatgtgaccaagggaactgaattttaaattttatttactttaaattaatttaaactgaaaatagcgacatgtggccagtggctaccacattggatacagccttagattcctcccagaccagacaaccttctgtggcctccaaagttgcaacagcaaactcacactgtgggcagccaggcctggagtggggcccagcaagccgcatcctggggtcaggtctggccaactaattatctactgtctatggtcacattagtgctacaatggcagcatcgagcagttgcaacagagatggtgtggcctgcaaaactgaaaatattcatatttactatctggccctttacagaaaaacatgctgacccctgcactacagcaattagttttggagagaacattcctgataaaagcttacatcttctctcaaaacatgacacgcaatagcagtggattctcgaggagtccttctagaatccaccccagaatcctatcctacagaatattctggggcccgtttacccctcgtgcaaagcgtggcga

SEQ ID NO: 155410 - DNA, 468 bp, Homo sapiens
  misc_feature (1)...(468): n = a,t,c or g
ggggtnaacgagngccggnnttaccgatnaccttttgactngnanaancanannnnaagnnnggcacgagggctctatcctggcacggagcagcctgatgtgccaggaccatgggaggaacgccatctggctggcactgctgcacacccgccgagccttcctgtagccccagactttgtggtacccattatcatcacgcctgtcatcattgacccatcttcttggtggggcaaggatgatgcatgatgaaggaaggtcctttccccctgcagcccccttacgcctggcagcagacaagcagagtggcctctttgagagcacagaggatggtagcaccctacctgcaaggaggccgggcagggaccctaaatgccacgaggcctgttttgctcaccaacttggtgggcatttcatgggtgcttatgttctaggactttaccgtaaataacacctcctccctgatttcan

SEQ ID NO: 155411 - DNA, 458 bp, Homo sapiens
  misc_feature (1)...(458): n = a,t,c or g
agccttggcgngncnnncctgatactgagttcctcgnncnccagnnnnggacgagggctctatcctggcacggagcagcctgatgtgccaggaccaggggaggaacgccatctggctggcactgctgcacacccgccgagccttcctgtagccccagactttgtggtacccattatcatcacgcctgtcatcattgacccatcttcttggtggggcaaggatgatgcatgatgaaggaaggtccttcccccctgcagcccccttacgcctggcagcagacaagcagagtggcctctttgagagcacagaggatggtagcaccctacctgcaaggaggccgggcagggaccctagatgccaggaggcctgttttgctcaccaacttggtgggcatttcatgggtgcttatgttctaggactttaccgtaaataacacctcctccctgatttcagacgga

SEQ ID NO: 155412 - DNA, 656 bp, Homo sapiens
  misc_feature (1)...(656): n = a,t,c or g
agaatgcctcacttcgctcagttcatcactgcaaaggtggcatgctcctccagcccttcctgcccaggttaacaagccccatgctgcttgtttcaaatggcaactaaaagcaagccagtgttgggctgttctgacacctctgtggtcctcctggaggggaactggctccttgtggggtaaaggganagccccagcccaacatccaaaagctctgcatccaatgcctatccccttgaaagcccaactgccttggtgaaggctgttccctagaagtcccagatgataaggcttcccaaactccttccctatatcctaaataagcgggtattaaaaacaacaaaggcagtggccagtagaaatgtatgggttcccagaaatgaggctgtatttctgggaagatgtaaaggagctgctttgcttttaggggaaagtagatatcaatactttgaagccacaaggacactatgaagaaaaccattactctttcaggtcaagaggtgcaatgactatggattatttaaaaactgaaaagctaagcttgagtggcccaatatcagcacggaagtggttttttttttttgtttgtttgttttcctgagactggagttttgctcttgttgcccaggctggagaaaacaatatataggattttaccc

SEQ ID NO: 155413 - DNA, 441 bp, Homo sapiens
cggtaggcccccgaacccaatgacagcatggaggaccaggctccaggtgtgaggcatcccccattgtccaatgtgaaaattcagggatcagaatagatgcattacctgttcccctgtttggctaagctcctgtaggatgtgacctgcccaagagtcaagaaagtcccagcacaccattacagccccaggttcggcccagcaccatgcacagagcaccagtggcttttcacagcttgggttcaacttcctgtttttaaagatacagtagccctttttcagtatcagcatagactttgggggcattttttaaaaaactgccattaagacaaattccttcagctcagcatgcattggcttggcaacatggtgggcacggcccctaagaacctcgcaatccaaatccagcgtgaggttgtgcttactgtcccatgacattgtgcc

SEQ ID NO: 155414 - DNA, 6995 bp, Homo sapiens
atgaaatcgcggagccgacttgctcggggtccccgcgccgccctcctccctccgccgccctccccccgagtccccaaggtccattatatcacttttatgcctttctgtcctcatagcttagctcccacttataagccagcaccatttgttcaaaagattgtcctttccccagtgagtattcttggcatctttgccaacaatcagttgtctcggcaacgcggtggtggagagctactcggtgctgggcaactgccggccctccgacccttacagcatgaacagcgtgtactcctaccactcctactatgcacagcccagcctgacctccgtcaatggcttccactccaagtacgctctcccgtcttttagctactatggctttccatccagcaaccccgtcttcccctctcagttcctgggtcctggtgcctgggggcacagtggcagcagtggcagttttgagaagaagccagacctccacgctctgcacaacagcctgagcccggcctacggtggtgctgagtttgccgagctgcccagccaggctgttcccacagacgcccaccaccccactcctcaccaccagcagcctgcgtacccaggccccaaggagtatctgcttcccaaggcccccctactccactcagtgtccagggacccctccccctttgcccagagctccaactgctacaacagatccatcaagcaagagccagtagacccgctgacccaggctgagcctgtgcccagagacgctggcaagatgggcaagacacctctgtccgaggtgtctcagaatggaggacccagtcacctttggggacagtactcaggaggcccaagcatgtcccccaagaggactaacggtgtgggtggcagctggggtgtgttctcgtctggggagagtcctgccatcgtccctgacaagctcagttcctttggggccagctgcctggccccttcccacttcacagatggccagtgggggctgttccccggtgaggggcagcaggcagcttcccactctggaggacggctgcgaggcaaaccgtggagcccctgcaagtttgggaacagcacctcggccttggctgggcccagcctgactgagaagccgtgggcgctgggggcaggggatttcaactcggccctgaaaggtagtcctgggttccaagacaagctgtggaaccccatgaaaggagaggagggcaggattccagccgcaggggccagccagctggtcttctaccagcacaagaacctcaaccagcccaaccacgggctggccctctgggaagccaagatgaagcagctggcggagagggcacgggcacggcaggaggaggctgcccggctgggcctgggccagcaggaggccaagctctacgggaagaagcgcaagtgggggggcactgtggttgctgagccccagcagaaagagaagaagggggtcgtccccacccggcaggcactggctgtgcccacagactcggcggtcaccgtgtcctcctatgcctacacgaaggtcactggcccctacagccgctggatctaggtgccagggagccagcgtacctcagcgtcgggcctggcccgagctgtctctgtggtgcttttgccctcatacctgggggcgggttgggggtgcagaagtctttttatctctatatacatatatagatgcgcatatcatatatatgtatttatggtccaaacctcagaactgacccgcccctcccttacccccacttccccagcactttgaagaagaaactacggctgtcgggtgatttttccgtgatcttaatatttatatctccaagttgtccccccccttgtctggggggtttttatttttattttctctttgtttttaaaactctatccttgtatatcacaataatggaaagaaagtttatagtatcctttcacaaaggagtagttttaaattccatttaaaatgtgtatttattggattttttaaaagcgacaatagtaatggtaaaggatgggcaggaaaggccagtagtgctcccccgcccagtctcgctgggtctggcgagccaagcccctcgggcgctggcgaggtcctcagccatctgcccctcgagagccaagcgcggacggtagccacccagttcatccctcccgacatacaccccttccctttggggaagggagcctcaggacagcttctgtcctctctgataggatgggagagtctgcagaaaaccatctggggtcccttttccagtccccggcttggagtcgaagggcagatgcaccccaggccagccccacgagatgctggcatagctttccccagaaaccaggttggaagtagatggcttcaagcttgctagtctccacactgaatcctctgtccgttatttatggagtcacacgatgtcatggttcactaggcagcacctcacgctggagctggagtgcgagggttcttaggggccgtgcccaccatgttgccaagccaatgcatgctgagctgaaggaatttgtcttagtggcagttttttaaaaaatgcccccaaagtctatgctgatactgaaaaagggctactgtatctttaaaaacagggaagttgaacccaagctgtgaaaagccagtgggtgctctgtggcatgggtgctgtgcggaccctggtgctgtagtgatgtgctgggactttcttgactcttgggcagggcacatcctacaggagctcagcagaccagtgtaacaacagttaatgcatctatcctgatccctgaatttccacattggacaatggtggcatgcctcacacctgagcctgctttctccatgctgtcattgggttcgggggcctacacttaacaattttaaagtgcaagagtcaaacattttcaacaggttgctataattttcctccctaattggtgccatttctccatttgatcattttctttttttcctttctcccctcttcatccactttaatatagctgttctgaaattctggtgcattcattcggttctttgaaatgagaatgtggtgcttaatttttgtgacgttgtcgagagaggttgggcctgatgggagcaacactcatcatcaccaagtcaaactttgttggagtgttggtttttcttgtgatattagcagaaatgatctcatgctagccatgtggatgtgtgtgtggtgaatggggggcttcatcaggacacacagaggggaatgtggccacacggtggatgaccaccaagccctgagatgaacaggtatttactgagcagttgtattcagatatgggtcttcatgaatcatgtttaacaatcagatgacccgcctataggcaagttccctgagcttcccgggtgcccttgagtaagagctgagaaccggcctgctgggtgtttactgtatctgtttggaagcactggcggagggtcgttgtaagatgtcctgagcatttatgtggtctggttttaactgtaaatagtgaaagatttttttaagcacttttgcctagatttaaacagcaacttgaaaaaaaaagtatgttttaacatgtaattgtgggagaaattgtaaatagtagctgaatatttaatgtgctttgtctatcctccacttttaccatattctgtaaagttgcatttattttacaggacaaaaaaatgaaatattattgcttttgaaataaatacccaagagcttatcaggacttagaattattcagaactcagatttataggaaaacctctgaccttcagtttgacaagctaaaggaagcagagtctttaatgagcatgctaattttctagttttgaggaaaaattgggtcctttaaatgctattttgcttatcgcatcagtacttttatgcaggtctcatttgactccgtgcttagggtaggatgcgggggtgccttgaaaacttcattttaaatgatcttaaggcaaggaaatacaatattttacggaaacatttggagaatgtgaccgtctgtatgacccgtggaagccccaggttggctgttggtttggaaggtcccgagtgtaacccaggtgattctgatacttggcatgtgtgaatcttcctgatttatgttaaataaactcttcccctcatcaccctttggtaggaaagccattagatgaaaggagaaaccaatacaagctaaaaagcatgcgacgtctgtcccccccagccccaaacagccttggttcatcagtttcctgcagtaggagataggctgctgagaggtgagtcaagaggcagtctccattggatgtcccccactccccgcagaatggcgtttccagagttaggcggtgtggttgccgtgctcaagcccatgctgatttgtacactacatgtctaacctacctcaaatctcagtcattaaaattagcatgctttagacatatatttaaaaagtaactatgcacagctctttatcccccccttgctgctgaagctttcttaaagagaaaaatcaaatttttattttttactggcactatcattttttaagtcctaaagatgattaacagacatttttatcatggagaagaaaaataaagccattgcaactaaagaacctaacagcatgaccaagttcgaagagtcatattatagcaacggaaatcgatggcgtcttagtcatctccccagtgtgccctgtccacggacaccatccacgtgcagggcaaacatttggttccttttctgctctgttttgatttccctgcctgttgcgtgcaagggaagtgctcgtaaagttctgtgctacgagatttttaaaataaaaatcgcttcgcagcaggttctcacaaaataactggtgctagctcaagaaatcatcatctgaccatcagaaatcttgactaaaggtgttgcatggatttgggggtctttcggtttttggttttgggtctggcttttagcagggccaatgtttcccacaccccggcttcatgggtactgctttgccttctcaccaaggtgacgatggtgtgcgtggaaagagatgataccccaccgccccctcttggtccttccaccagcctcttttgggaacagtagtttgcagagcaagggatttttaaagcgctaaaggaaagaagtagcagagcttaactgctttgtaccacacagcagtagatgtgcaaggacggttgacaatgagtcgatgataacctaatttcattgagagaaacccagccagacttgcttctagaggtttaatcaccatgagatctcaaaccaaggcaaagctggtggaaaactatatgatatccctgacgtgcctcaaccagtatctctttccttttgttactgaagtgtgttttatggactaggaagcatttttatgaattgaaatagtctaaataaaatggtgctatggtgttttaatgtgactgtccctgatcctgtcttgctgaggtgctatcaacgttctgaaaccacaaccaaccaaaaacaaggtgggctccagtctcttggctttttttttttttccctcccctcttttggtgctgtcttagacccgtttaccgtgctataatctgctctgagcagtgttgtgttgtgttgtattgttcttcccttggtggccaaacaaagcaagtcgagaaggcagctatctccctttctgtgatcgggagtgggcctgcctggcttggcaggtgctttttggttccacacctgtcttctcaggcttgatgtgaaagaaagggcgaagggttttttgagtttttgtttttgaggaaggggagttgggtacttctgcctctcctagcatgataggcattctcatagccagggacagattttctcctgcagcccagggtgctaagcagacatctctgggagtcccaagggcacaccaagggagaccagatggatctccttcctcccctggcactggctgggaccatggtgggcaggggcttcattctctgacccagcgttgcttctgcctctcattggtaaccccttatgttcggactaaaggaaggagctttctttgctcactcgatgccactgaggctgctttttagttggtgctaacctaaatttcttcttgggtccacagaagttgatgttttaaaaactcaccaggaagctccattttgtgtcatccactgtcacaataatttttttaaatacctcaaaaacaggacatcatgacaacttcagtaaagtagattccatgagggtctgatacctgcaggttgtccgtctgatgacatacttgaccttgaaaaatctggggtcattttgtttttcattcttcagcagttaagatagcggaacgccgaaaggaaggagcgtagttggctgtatttcatgtttaagttttgcttttgaataaaatgtgaatttcctatgcccatctcattgagctttctcagtcattgttgctgtcatttgaaatgactccctcaaaacctagttttattagccagctgcctctgctgtagtacatggccaacttcaacataccctggaccaaaacatttttgaggtgcatacccccaacataagttacacagtcccacatccaggtgcacagagtgcgagtgcactccgcgagtgcggggggaggggcggccccctctggtgctcccagcccttcctcctgcagagctgcaggcaagagcagagcaataggcttctcccctgagcagagaccgcagcacagaaatgcaaggtctaaagttgctttttgcctaagaatcagcgagcgatttggcctacttcctcattggcttctattctgatatcagggatgctttttgtagtggtattgtttgctccctcttcgcgttttgactacccgtcattcaggggtaactcatcactcttcacacggggatttaaattaagaaactaattggctcatgtgaacattccaaattttcttggtttcaataccctttttttttcttttgaggggaaaagaggggagaaaaacaggagtgatgtcatttctttttcatgtattcc

SEQ ID NO: 155415 - DNA, 1866 bp, Homo sapiens
ggcggaggccgagccccgccaggagtctttgccgagccggagggaggcgcatctggcgcttcggtaccagcggcagccgggggtccggagcggctggaggagcgcagtgggaactgggaagagctagcccggctggagggcggacctctgcgtccgggagccgggtctcaggcaccgctgggggcgaagccacgcgtcttttcgggcagccaatttcacacgcgcctgtgtgcggttccgggcatcccatggcggggagcgcacctccgagggggcatgagatcggagaaatcccttacgctggcggcgccgggggaggtccgtgggccggagggagagcaacaggatgcgggagacttcccggaggccggcgggggcgggggctgctgtagtagcgagcggctggtgatcaatatctccgggctgcgctttgagacacaattgcgcaccctgtcgctgtttccggacacgctgctcggagaccctggccggcgagtccgcttcttcgaccccctgaggaacgagtacttcttcgaccgcaaccggcccagcttcgacgccatcctctactactaccagtctgggggccgcctgcggaggccggtcaacgtgcccctggacattttcctggaggagatccgcttctaccagctgggggacgaggccctggcggccttccgggaggacgagggctgcctgcccgaaggtggcgaggacgagaagccgctgccctcccagcccttccagcgccaggtgtggctgctctttgagtacccagagagctctgggccggccaggggcatcgccatcgtctccgtgttggtcattctcatctccatagtcatcttttgcctggagaccttaccccagttccgtgtagatggtcgaggtggaaacaatggtggtgtgagtcgagtctccccagtttccagggggagtcaggaggaagaggaggatgaagacgattcctacacatttcatcatggcatcacccctggggaaatggggaccgggggctcctcctcactcagtactcttgggggctccttctttacagaccccttctttctggtggagacgctgtgcattgtctggttcacttttgagctcctggtgcgcttctccgcctgccctagcaagccggccttcttccggaacatcatgaacatcattgacttggtggctatcttcccctacttcatcaccctgggcactgagctggtgcagcagcaggagcagcaaccagccagtggaggaggcggccagaatgggcagcaggccatgtccctggccatcctccgagtcatccgcctggtccgggtgttccgcatcttcaagctctcccgccactccaaggggctgcagatcctgggcaagaccttgcaggcctccatgagggagctggggctgctcatcttcttcctcttcatcggggtcatcctcttctccagtgccgtctacttcgcagaggctgacgatgacgattcgctttttcccagcatcccggatgccttctggtgggcagtggttacaatgaccacggtaggttacggggacatgtaccccatgactgtggggggaaagatcgtgggctcgctgtgtgccatcgctggggtcctcaccattgccctgcctgtgcccgtcatcgtctccaacttcaactacttctaccaccgggagacggagcaggaggagcaaggccagtatacccacgtcacttgtgggcagcctgcgccggacctgagggcaactgacaacggacttggcaagcctgacttccccgaggctaaccgggaacggagacccagctaccttcctacaccacatcgggcctatgcagagaaaagaatgctcacggaggtctga

SEQ ID NO: 155416 - DNA, 4878 bp, Homo sapiens
atggctgaagctgaggaggggagagaagtgtcagtcaatgaggactcagagggaggggaagcccaggaggagggaaatggccacagtgcatccagagacgaaatgaatagaagggaacttcaggtcaaagcgttgtgctatcaagtgttggcagggaacatcaatgagtttgtggaaccagattcaatgctgtcttctctctccagcagaaaaagtaggagaaggttaagagaaggagtaaacatgacccagaccctggggaaaggggtgaatgaggggaccagagaagggagttgggccaggcagaacgctgtgtttggacagaggagcttccacttggaacacgctgaagaaccaaagctcgagggcagagccttgcccagagtgagatgcccctggctgggcgaggggtgtgatgtgggagtggggtgggagggggcagcaggcggggcctgccacgtcacttggagagtgtgtgttgggaaggaagggcagagcggagagccgagccgctgcagctgcggcggcggcagcgaagccttgagccgtggggaggtgggtccccggctcgggcgccggggcagccccgggcctctgcgaggcctgcggcgcggctcctagggaggaggtggcggctgtggcggccggaaccgcgaccttggccggacccagccccgcggtggacgcagggcggaggccgagccccgcaggagtctttgccgagccggaggaggcgcatctggcgcttcggtaccagcggcagccgggggtccggagcggctggaggagcgcagtggagaactgggaagagctagcccggctggagggcggacctctgcgtccgggagccggggtctcaaggcaccgctgggggcgaagcacggcgtcttttcgggcagccagtttcacacgcgcctgtgtgccggttccgggcatcccagtaagctctagcacccgggcgcgggtaacgggaagcgcagaaccaaatccccagcgcccaggtcacctccccagacccagccttgcagggaccagggctttagggctcacggacccaacggccaggtcagaccgcgaaccgggagagcgcggccccaccctaaagagggcgcacgggagctggggagcgggtgccgcgctccagagattgtgtcgtgggcgccgtcctagtggcggggagcgcacctccgagggggcatgagatcggagaaatcccttacgctggcggcgccgggggaggtccgtgggccggagggggagcaacaggatgcgggagacttcccggaggccggcgggggcgggggctgctgtagtagcgagcggctggtgatcaatatctccgggctgcgctttgagacacaattgcgcaccctgtcgctgtttccggacacgctgctcggagaccctggccggcgagtccgcttcttcgaccccctgaggaacgagtacttcttcgaccgcaaccggcccagcttcgacgccatcctctactactaccagtctgggggccgcctgcggaggccggtcaacgtgcccctggacattttcctggaggagatccgcttctaccagctgggggacgaggccctggcggccttccgggaggacgagggctgcctgcccgaaggtggcgaggacgagaagccgctgccctcccagcccttccagcgccaggtgtggctgctctttgagtacccagagagctctgggccggccaggggcatcgccatcgtctccgtgttggtcattctcatctccatagtcatcttttgcctggagaccttaccccagttccgtgtagatggtcgaggtggaaacaatggtggtgtgagtcgagtctccccagtttccagggggagtcaggaggaagaggaggatgaagacgattcctacacatttcatcatggcatcacccctggggaaatggggaccgggggctcctcctcactcagtactcttgggggctccttctttacagaccccttctttctggtggagacgctgtgcattgtctggttcacttttgagctcctggtgcgcttctccgcctgccctagcaagccggccttcttccggaacatcatgaacatcattgacttggtggctatcttcccctacttcatcaccctgggcactgagctggtgcagcagcaggagcagcaaccagccagtggaggaggcggccagaatgggcagcaggccatgtccctggccatcctccgagtcatccgcctggtccgggtgttccgcatcttcaagctctcccgccactccaaggggctgcagatcctgggcaagaccttgcaggcctccatgagggagctggggctgctcatcttcttcctcttcatcggggtcatcctcttctccagtgccgtctacttcgcagaggctgacgatgacgattcgctttttcccagcatcccggatgccttctggtgggcagtggttacaatgaccacggtaggttacggggacatgtaccccatgactgtggggggaaagatcgtgggctcgctgtgtgccatcgctggggtcctcaccattgccctgcctgtgcccgtcatcgtctccaacttcaactacttctaccaccgggagacggagcaggaggagcaaggccagtatacccacgtcacttgtgggcagcctgcgccggacctgagggcaactgacaacggacttggcaagcctgacttccccgaggctaaccgggaacggagacccagctaccttcctacaccacatcgggcctatgcagagaaaagaatgctcacggaggtctgacccatgcaggcagggcctgcaggaggggagcactgagctaacagtctcttaggcttccttctcatttccactactcactctagcttcagttgacttcttgactctctcccctacacccactacctggcatccaggaccaaatacctggactatcaaccttgttgcttaatccctgcagcattcaaggttaatccatctaagtgacatttttgaaattccagcggtgccacccaatcatgcccagcttctgtcatatgaatgagatatacatttatatgacagaagctgggcatgattgggtggcaccgctggaatttcaaaaatgtcaaggaacagcaaatgtcaacaggatggaaaccagccctatctgagtcttcgctccctccttagtgttctttgctttgggtcatgtgcgtttcctagcttcaggccacttggtaactggaagaagctggaggacagaagcagtactcaacttgctgttattccagtgccctgtaacaaccactggtcctcctgcagatgacccttggtagagtctttatttgcatagcctcaaaataggttattcgttctaaacttggatggaattagagaatacaatcaaactttaccacttggaggacacggggttagtccaggaccaaagaggccaatggatttttcaaagtgtgccccagcacacagaggcactggtgttcggtctacatttagttctccccactctgatcccctgactctccagcttccaggaaggttccttctcagagccaaatactctttgtgcaagtgccttcctgagcagaagaactggagaaagggaaccacagagccaggaggaatgtctgagcagagtcaagcaactggcttgaccacagtctgaagcaaggtgccacttaaacagatactgttttctcaaaggggcagaggaatcgtgttgcagatggcagccttttctccttcattttccccacattttctctggccctctaccttgcttcctgggagtttgatttaggattgctgttgaaggcttcctcaggcaaactccagcttaaagccctagacaggtaaaagcacacattggatggcagcatgggtttcttcccattttatgggcatgaaatatgtggtttagaataaggaacaagcattattcctttgccaacagcctcactctaagaggctttttttgctgagacaagcaaacacttgcctgctctgccccttggagctgcatttgacctgctctcactggtaaggtgacttggtggcgttcccacttgatttagccattttcttccattgtgagaccactgccatctatccacctgcccacctccccttttgtttctcagtaacattgccatttgttttttgcctttgataaactgtgatgtactgttctgagatcttttgggtgcagttctgaaactgaaaggactgttaacatgtttttaattttatatctatgctttcagactctttgatgataatttttttttttaaaaattatctctcgaagagcaacttacgagaggacagccttatgagggtttgcttgagaggcagtgtggcttctgtgactgccagctctaaatctcgatcttgccataactttacagggtaacttgggtccacagtcactctttgtgcctcagtttacccacccattaaatgggaacattactgtcttcccctccctacctcatggggaatgtctgggaagctggggacattgctatgcaaatgtgtgaatcttagtcatggatttgatttttagttatccccatacccccataggcaaggccttcccccagagttcctgctttggatccaaagcctgagaataggccattatggaccattggctccctaaatccctccttggcctcttggactgagcccctcagcctttcttcttacccttcagaaaggagagttctctttagatatgttcagggggatccttccatggctgggaggtcaccttgactgggggcttggcttctccaaacctggaaacacagtaggaagataggagatgttttatggatggcaaaaacctgctctgaggtcagaaagtgctag

SEQ ID NO: 155417 - DNA, 1309 bp, Homo sapiens
  misc_feature (1)...(1309): n = a,t,c or g
caataatctggtgggccataaacactccaggcgtttgagagttttgtcagttatggtccctgtctaatgaccatatataaaacatactcaccaaatcaggtcattttggctcagtaacacagggagcagaatgttatattttaattcaatcaaaccttgttatactgaccgttgaaatgctttgagaatacccaggggtgggctccttgcattttattctgttctttccattaagatctcgatacctatctttttcacaaacaaaagaggtttcttcaatcctaaggaaggtctccaggcagggaagagaggtaggcaatggtgggttaagtccccagtcccaagtagaacttgtcaccaacaccaccacctccctaggaagacccccagtcctgcctgtggcccactgccccttcccccagggtatcctccctttatagcatttgactttaagataaatatttaagaaaattaagggattcagaaaacagctcccaaaatattggtgaagatgatattagcaggtgactggccccaggtgacgaaatgtggtagagatctttgttcttgacagagagaaggcttgcgggccccttccccattatatgataagggcatcaggttaaggggtgggaggcagtagctgacattcctgcagttgaagaatatgacctgttttggcctctaggccttggacaggtaataagggacatgactgggtcagcgccgacaccttttgggggcagatgggacatgcagtccacaggagtggtcatctcctcttaagtaagcaggtgaagcagaacttccagaggctgagacagcagcctcgacatagctctgtgctttctactctagggccaacataataagactcactcctgccttcatccagctatgacaagagctatggcagtgagtgacccaccaggaaggaccccccccatcagtccnccctaatggaagaaccctaagtcccgtgctgtccctatacagcaaccagtagtccaggtgtggcctattgaacactggaaatagggctgggcccagactgagatgttttcctaaagggggaaaatccaccattggattttgaaagacctccatttgggaaaaaagaatgtaaaatatcccagtaatttttatattgattcccatgctgaagtgatactatttttgacatgttaggttaaaatgtagtctaaaaattaatttcactgattttagctgtttctttggactttaaaaaatgtggctactagaatattttaaattgcatatgtggcttggatcatggttccattggatg

SEQ ID NO: 155418 - DNA, 2193 bp, Homo sapiens
atgcctgaacctccccccgccccaggctcctgcgcagcccgagcctccaagacgagcgccgctcctggctccacggcgcccagtcccatccaccgttcaagggctgaggagcgtgggaccacggcgcggaactggcaggcagctccaactgcagccccggtgcgggatccactgggtgaagccagctgggctcctgagtctgctaatctagtgggaatctggagaacttttgtgtctagctcagggattgtaaatgcaccaatcagcaccctgtcaaaacggaccaatcagctctctgtaaaacagaccaatcggctctctgtaaaatggaccaatcagcaggatgtggcccgtggctcggcgacttacagggagggagaacatggctgctggcttttagcacctggtgggtttcgcgccttgcaactcgacaactgccgggacggagtctgcgtgcgcgaccccctgcggcaggtgctgggcgaggcgcctcccctgcaactagcctgccgcttccctcccggcacccccgccgccagccccgagcgcggacctggagcggagaagagagtgtgcggaaaggatgtatcagaagtaacccactgcacacatgatctcttacatgctacattagaagactcctgggatgttagcagccagttagacaggcaacaggaaaactggaagagacatctgggatcagaggcatccacccagaagaaaataattacaccacaagaaaattttgagcaaaataaatttggtgaaaattctagattgaacaccaatttggttacacaactgaacattcctgcaagaataaggcctagtgaatgtgagacccttggaagcaatttgggacataatgcagacttacttaatgagaataatattcttgcaaaaaagaaaccctataagtgtgataaatgtagaaaagcctttattcatagatcatcgcttactaaacatgagaaaacacataaaggagagggagctttccctaatggaacagatcaaggaatttatcctggaaagaaacaccatgaatgtaccgactgtgggaaaacctttctctggaagacacagcttactgagcatcagagaattcacactggggagaaaccctttgaatgcaatgtatgtggaaaggccttcaggcatagctcatctcttggtcagcatgagaatgctcataccggagagaaaccctatcagtgtagtctctgtgggaaagccttccagcgcagctcctcccttgttcaacaccagcgaattcacactggagagaaaccctatcgatgtaatctatgtgggaggtcctttaggcatggcacatccctcactcaacacgaggtcacacacagtggagagaagcccttccagtgtaaggaatgtgggaaagcctttagtcgatgttcttcccttgtccaacatgagaggactcatactggagagaaaccttttgaatgtagcatatgtgggagggcttttggtcagagcccatccctttataaacatatgaggattcataagagaggcaaaccttaccaaagcagtaactacagcatagatttcaagcacagcacatctctcactcaagatgaaagcactcttaccgaagtgaaatcctaccattgtaatgactgtggggaagactttagtcacattacagactttactgaccatcagaggatccatactgcagagaacccctatgattgtgagcaggcttttagtcagcaagctatttctcatcctggagagaaaccctatcaatgtaatgtatgtgggaaagctttcaaaaggagtacaagtttcatagagcatcacagaattcatactggagagaaaccctatgaatgtaatgagtgtggagaagcctttagtcgacgctcatcgcttactcaacatgagagaacccacactggagagaaaccctatgaatgtattgactgtgggaaagcctttagtcaaagttcatctctcattcagcatgagagaactcatactggagagaagccctatgaatgtaatgaatgtgggagagccttccgaaaaaaaaccaacctgcatgatcatcagagaattcatactggagaaaaaccctattcttgtaaggaatgtgggaaaaacttcagccgaagttcagctcttactaaacaccagagaattcatactcgaaataaactctag

SEQ ID NO: 155419 - DNA, 394 bp, Homo sapiens
agctagcaccatgagcttcaataccctatacgtttctgtccgataaaatcttgctgtaagggacgcaactctcttcaaaacaaaatatatgatctgtcattacagaatttcccccctgccaccctgagacaaaatcttgctctgtcacccaggctggagtgtagtggcacgatctctgctccctgcaacctccacctcccgggttcaagtgattctcctgcctcggcctcccgagttagctgggaatgcaggcatgcactgccataaacagactaatttttgtatttttagtagagacggggtttcaccatgttgcccaggctggtctccgaactccctgaccttgtggatctggcccgcctcggggccccaaaagtgctggggatttacaggg

SEQ ID NO: 155420 - DNA, 5197 bp, Homo sapiens; identical to SEQ ID NO: 147897

SEQ ID NO: 155421 - DNA, 1317 bp, Homo sapiens; identical to SEQ ID NO: 147898

SEQ ID NO: 155422 - DNA, 356 bp, Homo sapiens
cgtcgaccaaggaacgaatatatgtgattatcactgtaagccacaaaggcattcgaagagaatgaagtgtacaaaacaactcttgtagtttactgtttttttaagtgtgtaattctaaaagccagtttatgatttaggattttgttaactgaatggttctatatgagatggctgaaaaaataccacatcgtctgttttcactaggtgatgccaaaatattttgctttatgtatattacagttctttttaaaacactggaagactcatgttaaactctaattgtgaaggcagaatctctgctaatttttcaggtctaaaattctctttgaaaaaaaaaaaaaagtcgacgcggccgc

SEQ ID NO: 155423 - DNA, 3216 bp, Homo sapiens
  misc_feature (1)...(3216): n = a,t,c or g
gctgggtttagtaggagacctggggcaaggccccctgtggacgaccatctgccagcttctctcgttccgtcgattgggaggagcggtggcgacctcggccttcagtgtttccgacggagtgaatggcggcggcggctgggatgctgctgctgggcttgctgcaggcgggtgggtcggtgctgggccaggcgatggagaaggtgacaggcggcaacctcttgtccatgctgctgatcgcctgcgccttcaccctcagcctggtctacctgatccgtctggccgccggccacctggtccagctgcccgcaggggtgaaaagtcctccatacattttctccccaattccattccttgggcatgccatagcatttgggaaaagtccaattgaatttctagaaaatgcatatgagaagtatggacctgtatttagttttaccatggtaggcaagacatttacttaccttctggggagtgatgctgctgcactgctttttaatagtaaaaatgaagacctgaatgcagaagatgtctacagtcgcctgacaacacctgtgtttgggaagggagttgcatacgatgtgcctaatccagttttcttggagcagaagaaaatgttaaaaagtggccttaacatagcccactttaaacagcatgtttctataattgaaaaagaaacaaaggaatactttgagagttggggagaaagtggagaaaaaaatgtgtttgaagctctttctgagctcataattttaacagctagccattgtttgcatggaaaggaaatcagaagtcaactcaatgaaaaggtagcacagctgtatgcagatttggatggaggtttcagccatgcagcctggctcttaccaggttggctgcctttgcctagtttcagacgcagggacagagctcatcgggaaatcaaggatattttctataaggcaatccagaaacgcagacagtctcaagaaaaaattgatgacattctccaaactttactagatgctacatacaaggatgggcgtcctttgactgatgatgaagtagcagggatgcttattgcattactctgggcagggcagcatacatctcaaactactagtgcttggaatgggcttctttttgggccagagacaaaacacttcaaaaaaaaatgttatttagaacagaaaacagtctgtggagagaatctgcctcctttaacttatgaccagctcaaggatctaaatttacttgatcgctgtataaaagaaacattaagacttagacctcctataatgatcatgatgagaatggccagaactcctcagactgtggcagggtataccattcctccaggacatcaggtgtgtgtttctcccactgtcaatcaaagacttaaagactcatgggtagaacgcctggactttaatcctgatcgctacttacaggataacccagcatcaggggaaaagtttgcctatgtgccatttggagctgggcgtcatcgttgtattggggaaaattttgcctatgttcaaattaagacaatttggtccactatgcttcgtttatatgaatttgatctcattgatggatactttcccactgtgaattatacaactatgattcacacccctgagaacccagttatccgttacaaacgaagatcaaaatgaaaaaggttgcaaggaacgaatatatgtgattatcactgtaagccacaaaggcattcgaagagaatgaagtgtacaaaacaactcttgtagtttactgtttttttaagtgtgtaattctaaaagccagtttatgatttaggattttgttaactgaatggttctatcaaatataatagcatttgacacattttctaatagttatgatacttatacatgtgctttcaggaagttccttggtgaaacaattgttgaggggggatctaggtaattggcagattctaaataatataatttccagatagtaattttaagagtactcatcgctcttgccaaataagttcagggtattcaaatcttggactagtcctgcaaggtataaagaataaaaatcccagtgagatacttggaaaccacagtttattattatttatctgggcaattattgtgtgtgtgaggatggaagggtagggaataatcgaacatctaaagccttgaataagagaatactaattgttttggtatgatgatactcagaaatggaggatattataggaaaaagaaatcctttggaattttaactaaaatcactgcatatgggaaattaagagatccaggaccatatttgataagagttcctaaaaataatgtaattattaatgctaaagactgctcatgtatcttgatctaattactaaataaattacatatttatttacctgataaatatgtatctagttctacaaggtcacatttatgtggaagtccaaagtcaagtccttaggggataattttgttttgggctcagttgttccctgcttccttttttttttttttttttttttgagatggagtctcgctctgttgcccaggctggagtgcagtggtgcgatctcagctcactgcatcctctgcctcccgggttcaagcaattctctgcctcagcctcccaagtagttgggattacaggcacctgccaccatgcctggctaatttttttgtatttttagtagagacgggggtttcactatgttggctaggctggtcttgaactcctgagcctcgtgagtccacccgccttggcctccccaaagtgctggggattaccngccatgngcccacccgcacctgggccttccctgcttccctctctagaatcccaattaggggatgtttgttaactaattcatattggattaaaacagttaacaaactttttttctttttaaaatgtgaggatccagtgaacctctggttttaggattaatcctgaaaccagggtccctggggagtaataaaattgggtcacattctgtaaagcacattctgtttaggaatcaacttatctcaaattgtaactcggggcctaacctatatgagatggctgaaaaaaataccacatcgtctgttttcactaaggtgatgccaaaatattttgctttatgtataattacagttctttttaaaacactggaagacctcatgttaaactctaaattgtgaaggcagaatctctgctaatttttcagattaaaattctctttgaaaaaaaaaaaaaaaaaaa

SEQ ID NO: 155424 - DNA, 372 bp, Homo sapiens; identical to SEQ ID NO: 147939
  misc_feature (1)...(372): n = a,t,c or g

SEQ ID NO: 155425 - DNA, 416 bp, Homo sapiens; identical to SEQ ID NO: 147942

SEQ ID NO: 155426 - DNA, 386 bp, Homo sapiens; identical to SEQ ID NO: 147943
  misc_feature (1)...(386): n = a,t,c or g

SEQ ID NO: 155427 - DNA, 698 bp, Homo sapiens; identical to SEQ ID NO: 147944
  misc_feature (1)...(698): n = a,t,c or g

SEQ ID NO: 155428 - DNA, 485 bp, Homo sapiens; identical to SEQ ID NO: 144610
  misc_feature (1)...(485): n = a,t,c or g

SEQ ID NO: 155429 - DNA, 557 bp, Homo sapiens
  misc_feature (1)...(557): n = a,t,c or g
ccccctttttaaaaccccggcccgggccaaattaaaattacccccccttaaaaggaataagcttccgcccccttnnnnnnnnnnnnnnnnnnnnnnnnnnnnngttaagacaggaaacacatttattgagagcacagtggggtgcgccaagccctgtgctttggaaccgcatcacagcgcccctcacaacagccagcacccagcggtccgggcccaccaggagagccgggatgagagcgcctgtgtgccagtcacaaagcgtttatttcacacaaacaatctcattgaagcccacaataaccgtgccaggcaggtgtgacgctttccaggttacaaacaacaaactcgcccaggccacacagtcagaaggggttgcgggggcctcgaacccagaccttgagtctcacgagccagcccacggcatgcagcgagaattctcaggggtcacagccgtctcccaagcggacactgtcatgaattaccctgtttctaacgggtgggaaaatcgaggctcagggtgattcaagtaacctacctggtacccatgtaccattctt

SEQ ID NO: 155430 - DNA, 1624 bp, Homo sapiens
aatagatttacgattactattccagagaggaggaattcatcctaactgagcacgcccacggccctggtctggcctgggcaccggccaccgtagcccatcccttgatggcctctgtgtccccaggagggcgggccgggggggttgcccaggggctggagcagtggaactgtggctccatagagttaggccggagggtgtgaaggcaagattcaaagctatccccagggctctgcttcttggtcggagccagccccttctccctctctgccttccccgccccattcctgatgctgaactgttctggacccctggccctgagtctctcaggaccaaagtgggcacgggaacagctgtagtgtgtgcccccccgggctttggccacaggtctccctctcgaggtgtggttgtgactgcgacccttcccttggccgtgatgccttcctcccccggggcttgggtccagctccttcactctcttagcagctgctggggcccacctcccatgccgaggactattaggggtatacctccagggagcatctgcaggctctgcttctgcccggctgctggcttgctctccctggtggctctccagcggccagcttcctcacccacccggcactccgctttgctctgtctcctgaggtgggcctgaccaacctccccttctctgcctcagtccctgggctccagggctcagctccacagccctctgccatagcaggctggttctccctgccacgcccatacctgtggtcacctggccctcctgtggtctgagtaccactcccctgccccaggagccactcccactccagctgcctgtttccagcaggttcccagtgcccctgacaagcccctgctggtgtctccatctcctgccaagcatcctccagtgcctcctcctgtgggcctgggcctcagggctatggacagactcctggtcccatcccagagacccctcgtgatcgttccctgtcaccccactccaccgaaaagtaaactgcaggcacgtggaccgtggcccggctgggtcgactgaacaactagcggatggaagctgcggaaagaagccttgatggggcccaccatcccggacccaaaatcttcttcctgggcggggcctctcgtctcccttcccctggttttgggcggaaacccatcaccctggaatgccctacgtgggaaaagggaccctcgaaaatgtgggaacccccagcccccttctcccaagcttcgaaaatcccctccaacagcccacggggaaaacccctgcaccctattccccacgggaaaaggctgggccccaaaaaactctgggaccccggggccctcccccttgaagtagagacccgcccctctgactgatggacgcccgctgaccctggggtcagaacccgtggggctggaccccctgccccaccccgcaggaacccctgaggcctaggggagctgttgagcctttcagtgtctgcatgtgggaagtgggctccttcaccctacctcacagggctgttgtgaggggcgctgtgatgcggttccaaagcacgagggcttggcgcaccccactgtgctgctcaataaatgtgtttcctgttcttaaccaaaaaaaaaaaaaaaaaaa

SEQ ID NO: 155431 - DNA, 2076 bp, Homo sapiens
ttagatgatgcgcttgagagttgtgacgagcacggatacagaaccgcttccagttcgtgtctccgtaagggagtcatggtcaaaagttcgagcaatagagaattggtatagtcgagatacacagatatcacaatataggtagtacatcagaattcccagactgggcggccgggcagaggggctcctcacatcccagacgatgggcagccaggcagagacgctcctcacttcatttgttttattcagagccagacactgatgcaaagcatcaggacgatgctctgacggaggaggaaacgtagggctgagatcagcttcgtgtgcacattggctttgatcaaactgctgcacagcgaccggcagctccaccctgctgccgctcacctctaggctgtagttgcctcggatggcagtaaagtcgtccagggcttcggccgcgctcccctcgtccaggttcagctcctggcacagggcctgtagcgcctccccggctgcggcgaccaccgccgccccctcagcgtggggcttgtcctcgaacatcccttcaggccccgcgggctgcgcgccacggcccccgacttctttctccctcccaggcgcgctacccacaaccacccggcggcgccattcctccgagcaggtcccgccggagtccgagccgcgggctgacttccgctcgggaaagtggctccaagagcccgccacaggggacgccagggactcgcggcaggctctgagatcagcgatggtgacaaagacctcctggcgcatggaactggacagagaatgcgggcgttcctcttgtaccagtaccttttgtgtttcagctgcttctagaggatttctcttacagacatctttcagatgggaatagtaggataaggcctgtgctttagatgcttggaggctgctgggaggactgtccttccaccagttgaagagcaggctccctgccttcccaaggcttctcctcaggttaaacccctggattccctcgcccttccccatgtgatttggttcccagatcttggtgtgcatcatcattgggactgtgtatagcacggtatttatgatttgttggcggactctaggctggctgattatggataactgggcacagataactcccataatttctggcaccttcaagttgagatgtttggataggcacttcagaacttgagccatgctggccgtggcccgttcccgctcatggtctttgactgactgtaaccaggggaccaagtgaaagaatctgcagattgttcctgcttcagtaggtttgatgtgccagggatctttggagtacacttcttggggcagcttccacttcaggaactgggcacatatagttaggacttgcctgctctcctcagctactgcatcattttcatcctgagaatacagaagtagtgggaccaagctgtccaggacttggttctctatactcttcttatctgggttttttacagactttatggcggctccaaagagagtcacggagaaacgatgaacatcagatctcacatcaccaaataaggagaacagggtcctcatcatggcagccagggtagtgaaatccattgttctaacaagttgcaggagtatctggatggctgacagaacgatcttctcatcggtttcacgcaagctgtctacaatgtatggcaacaggctcttgatgtcttctctctccacaaaaaagcctgcagatgtgagtttatgtttatcattccctcggttaagaagagggactaataagtacatgaccttctgtgcaaggagctgatttctttccagcaatgcgcacaaaggggtgacctctgaaggcacttcctgttctgtgtacaggccacttgggatgtcgacatcagacatggtgaggccgatgctgtgatgaatctggataagcagtgtcatgagaagctgaggaaagagtcggaacgtagctgctcgaagcctgtttcccaaaaacacctcataaagggcatctgttgcctgacccaacaggacccgctcagtgaggccattgttgagaaactgatccagtccatccagaaggttttcaatggtgag

SEQ ID NO: 155432 - DNA, 2490 bp, Homo sapiens
atgctgcgctctctccgcctgcagcaggagtggctggaatgggaggaccggcggcgggcggctgcccagcagtgccggagccgcaggtgcccgtcaagtccccgggcccgactcactaggcctcaccgttcctgccgagacccagctgtccaccaagccctcttctccggcaacctgcagcaggtccaagccctgttccaagatgaagaggccgccaacatgattgtggagactgtgagcaaccagctggcctggtcggctgaacaggggttctgggtgctgacccccaagaccaagcagacggcacccctcgccatcgctacagcccgaggctacacagactgtgctcgacacctgatccggcagggagctgagctggatgcccgtgtcgggggtcgcgctgccttgcatgaggcctgtgcccgagcccagtttgactgtgtgcggctgctgctgaccttcggagccaaggctaatgtgctgactgaggagggcacgactcctttgcacctctgcacgatccccgagtccttgcagtgcgccaagttgctgctggaagcaggagcgacggtgaacctggcagcaggcgagagccaggagacgcccctgcacgtggcggcggcgcgcggcctggagcaacatgtggctctgtacctggagcatggcgccgacgtgggcctgcgcaccagccagggcgagactgcgctgaacacggcgtgcgctggggccgagggcccaggtagctgcaggcgacaccaggctgcggcgcgccggctcctggaggctggagctgatgcccgggcggccgggcgcaagcgccacacgccgctgcacaacgcttgtgccaacggctgcgggggcctggccgagctgctgctgcgttacggggcccgcgctgaggtccccaatggggcgggccacacgcccatggactgtgcgctgcaggccgtccaggactcccccaactgggagcctgaagtccttttcgccgcactgctggactacggggcgcagccagtgcgccctgagatgctgaaacactgcgccaacttccctcgggccctggaagtcctgcttaatgcctatccttgtgtcccatcctgtgagacctgggtggaggcggtgctcccagagctgtggaaggagcacgaagccttctacagctcggccctgtgcatggtgaaccagccaaggcagctgcagcacctggcccgactagctgtgcgcgctcggttgggaagccgctgccggcagggtgccacccggctgccactgcccccgctcctcagggactacctgctgctgcatatgaagcggagccgctgccgcgaccgaccgcagccgccgccgcccgaccgccgggaggatggagttcagcgggcagcggagctgtctcagtctttgccgccgcgccggcgagcgccgcccgggaggcagcggctggaggagcggacgggccccgcggggcccgagggcaaggagcagccgcctgccttggcctcccaaagtgccgagattgcagcctctgcccggctgccaccccgtctgggaagtgaggagcgtctctgcctggccgcccatcgtctgggatgtgagccgcccctctgcctggctgcccagtctggaaacctaggggacaatggacttcctgcaggaaggcaagagttgaagcaggggacccatgaggaaaccactgcgctggcccaggtgagagctgaagggctgcctgtgctggtatggatggagacagaggatttgcaggtgatgagcttccgaatcagcctgagtagacatgggccgaagccctcccaccccaagtcagacagtttcagtttggcgggatccaaatccctcctgccctttaaggatctcaagcacacagtgaatgatgaggagggtcggtggagtgcaatcccagacacagatggcccaagtgcaagggctggaggccagacagacccagaacaggaggaagggcctttggatcctgaagaggacctctctgtgaagcaactgctagaagaagagctgtcaagtctgctggaccccagcacaggtctggccctggaccggctgagcgcccctgacccggcctggatggcgagactctctttgcccctcaccaccaactaccgtgacaatgtgatctccccggatgctgcagccacggaggagccgaggaccttccagacgttcggcaaggcagaggcaccagagctgagcccaacaggcacgaggctggccagcacctttgtctcggagatgagctcactgctggagatgctgctggaacagcgctccagcatgcccgtggaggccgcctccgaggcgctgcggcggctctcggtctgcgggaggaccctcagtttagacttggccaccagtgcagcctcaggcatgaaagtgcaaggggacccaggtggaaagacggggactgagggcaagagcagaggcagcagcagcagcagcagcagcagcaggtgcctgtga

SEQ ID NO: 155433 - DNA, 2893 bp, Homo sapiens
atcatcagtccagtgcggtggaattcttcatacatgccgacacagcctgagtgcaacattattaccaggaacacctacgcacgagacccacgcttctggaagcaccagcctttatctcttctccttcaagtcccctttctcaagaatcctctgttctttgccctctaaagacttggtacatctacgacccaggcatcttgctttccagccacaaagagacagatgaagatgcagaaaggaaatgttctccttatgttgggcctactattgcatctagaagctgcaacaaattccaatgagactagcacctctgccaacactggatccagtgtgatctccagtggagccagcacagccaccaactctgggtccagtgtgacctccagtggggtcagcacagccaccatctcagggtccagcgtgacctccaatggggtcagcatagtcaccaactctgagttccatacaacctccagtgggatcagcacagccaccaactctgagttcagcacagcgtccagtgggatcagcatagccaccaactctgagtccagcacaacctccagtggggccagcacagccaccaactctgagtccagcacaccctccagtggggccagcacagccaccaactctgactccagcacaacctccagtggggctagcacagccaccaactctgactccagcacaacctccagtgaggccagcacagccaccaactctgagtccagcacaacctccagtggggccagcacagccaccaactctgagtccagcacagtgtccagtagggccagcactgccaccaactctgagtccagcacaacctccagtggggccagcacagccaccaactctgagtccagaacgacctccaatggggctggcacagccaccaactctgagtccagcacgacctccagtggggccagcacagccaccaactctgagtccagcacaccctccagtggggccggcacagccaccaactctgagtccagcacgacctccagtggggccggcacagccaccaactctgagtccagcacagtgtccagtgggatcagcacagtcaccaattctgagtccagcacaccctccagtggggccaacacagccaccaactctgagtccagtacaacctccagtggggccaacacagccaccaactctgactccagcacaacctccagtggggccagcacagccaccaactctgagtccagcacgacctccagtggggccagcacagccaccaactctgagtccagcacaacctccagtggggccagcacagccaccaactctgggtccagcacgacctccagtgggaccagcacagccaccaactctgagtccagcacagtgtccagtggggccagcacagccaccacctctgagtccagcacgacctccagtggggccagcacagccaccaactctgagtccagcacagtgtccagtggggccagcactgccaccaattctgagtccagcacaacctccagtggggccaacacagccaccaactctgggtccagtgtgacctctgcaggctctggaacagcagctctgactggaatgcacacaacttcccatagtgcatctactgcagtgagtgaggcgaagcctggtgggtccctggtgccgtgggaaatcttcctcatcaccctggtctcggttgtggcggccgtggggctctttgctgggctcttcttctgtgtggtgagtgcctgtgtacctctgtgtgagtgcagggatgccttgaaaatgccaggtggcctagagcagttattaactgaaagccgcatagtgcactggggtacggaaggtcggccaatagccactgcagagggttgggtgcttcttttggcaatgaagatccggctagcagcagaagccaaaattaaatgtttcctagatgggatggcggccgggctgagacgctcctcactttccagactgggcagccaggcagaggcgctccccacatcccagacgatgggcggccaggcagagacactcctcagttcccagacggggtcgcggccgaacaggggccttttttcacatctcagacgatgggcggccgggcagagacgctccctcacttcctagatgggatggcggccgggaagaggcgctcctcacttcctagatgggatgggcggccgggcagagacacttccttcactttccagactgggcagccagggcagaggggctcctcacatcccagacgatgggcggccaggcagagacgcttcctcactttcccagacggggtaagcggccgggcagaggctgcaatctcggcactttggggggccaagacaggcggctggggaagtgggaggttgtagctagccgagatcacgccactgcactccagcctgggcaccatttgagcacttgagttaacaagactccgtcttgcaatcccggcacctcgggaaggccgaaggcttggcggattcactcacgggttaggagctggagaccagcccggccaacacagcgaaaccccgtctccaccaaaaaaatacgaaaaccagtcaggtgtggcggcgcgcgcctgtaatcgcaggcactcggcaggctgaggcaggagaatcaggcagggaggttgcagtgagccagagatggcgggagtacagtccagcttcggcttggcatcagagggagactagggaaaggggagaggggagaggttagtattttcaaaaatcatcatatagtacgtggttacacaactctgaatatactaaaacacattgaattgtatactttaaaggagtgaactatatctcaatatataaggggtgagttatagctcaataaagctgttaacaacaaaacaaaaatgccataccaaaaaaaaaaaaaaaaa

SEQ ID NO: 155434 - DNA, 983 bp, Homo sapiens
cataaatgtagtttttttggagcatatttcatagaatttaaacacttagaaaagtcaagtgatttgtgtgctattttgatttgcttcctgtgcttactttcatttgtttattatttattttagtttcaacgaaccaaacttttaaatggaccgggagatgttgaaacgggtacaagcataacagtacctcagaaaaagtggttgcatgttatttcacccatttttgttcaaagttctaacattaccattcttagcaaaatggggtgatcgtctccaactactacaaattgaattggcagctagagaggtgagtgatatttgagaggagactgtttaaaatgaaacgtatttattattactttgttccagaaaaacactggacacactgaagtgggcccacagcattccttcatatgcaagactgttttacatctgataattcagctgctctctaaaattggccttctcccagttcctgctacctgcaggacccctatggtgtagccgtgggtggaactgtggggcactgcctgtgcacgggattggcagtaattggaggaagaatgatagcacagaaaatctctgtcagaactgtgacaatcataggaggcatcgtttttttggcgtttgcattttctgcactatttataagccctgattctggtttttaacaagctgtttgttcatctatatttagtttaaaataggtagtattatctttctgtacatagtgtacattacaactaaaagtgatgggaaaaatactgtattttgtaggcactggattttgtgagtttgaccccttattatgtctggaggatataatcattggattcctatttgtaacaagggagtttttaaaaggaaaccctgacttctaagtgtgggtttttttctctcccaaccataattatgttaatatggtcccccattttcttttgggtgcagaaccgttgtgcagtggggtctaccatgcaattttc

SEQ ID NO: 155435 - DNA, 534 bp, Homo sapiens; identical to SEQ ID NO: 147884

SEQ ID NO: 155436 - DNA, 1035 bp, Homo sapiens
agcggccgcggctccggggaacggccgcgcatcggcgccccggctgcttctgctctttctggttccgctgctgtgggccccggctgcggtccgggccggcccaagatgaagaccttagccaccggaacaaagaaccgccggcgccggcccagcagctgcagccgcagcctgtgggctgtgcagggccccgagccggcccgggtcgagaaaatatttacaccagcaggctccagttcataccaatacagaagatcctgctacccaaaactaatttggggatttatccatgcatttgtcgctgccatatcaagttattattggtatctgaattgggtgagtagaacatttgttatagcagccatcatggccatgcgctataaccggcctggaccgtgctgggctggtgcaatgctttgccttggggactaatgacatgcttgttcagcttttgtttggctatgccaccacagtcatccccaggggtctatacatacttatgtttcaacctgtattatttgccatttttggcattagaatgcttcgggaaggccttaaagatgagccctgatgagggtcaagaggaactggaagaagttcaagcctgaattaaagaagaaagatgaagaatttcaacgaaccaaatcttttaaatgggaccgggagatgttgaaacgggtacaagcataacagtacctccagaaaaagtgggttgcattttatttcacccatttttggtcaagctcttacattaacattcttagcagaatggggtgatcgctcttaacgtaactacaattgtattggcagctagagaggacccctatggtgtagccgtgggtggaactgtggggcactgcctgtgcacgggattggcagtaattggaggaagaatgatagcacagaaaatctctgtcagaactgtgacaatcataggaggcatcgtttttttggcgtttgcattttctgcactatttataagcccctgattcctggttttttaacgctgtttggtcatctatatttagtttaaaatag

SEQ ID NO: 155437 - DNA, 546 bp, Homo sapiens
tggggtagaaaaattagtcctttctaaactttatgaagaaggttccaacaaaagactttttaatgttgatcggcatgttggaatggcagtagcaggtttgttggcagatgctcgttctttagcagacatagcaagagaagaagcttccaacttcagatctaactttggctacaacattccactaaaacatcttgcagacagagtggccatgtatgtgcatgcatatacactctacagtgctgttagaccttttggctgcagaatttacatagtacatgacgcagttaaggataaagcttttgaactagaactcagctgggttggtgaattaactaatggaagacatgaaattgttccaaaagatataagagaagaagcagagaaatatgctaaggaatctctgaaggaagaagatgaatcagatgatgataatatgtaacatttactccagcatctattgtattttaaatttctactccagtccaatgtaactatttagccctggattatacatactgtccaattttcattaaatttttgtcttat

SEQ ID NO: 155438 - DNA, 440 bp, Homo sapiens
tcagagattcagttgtggaaattctttttgaacaagataataaagagcaatcagttgccactttaatattggattcccttatacagtgtccgatagacaccaggaagcaactagcagagaatttggaaatgatgtttgatgtcgggaaaactcaaccacctctgttgaagagagcattttccactgagaaatagaagtttgattaaaaatcaaccttgcttcatatcaaatatttaaccaattataagcaaattgtacaaagtatgtaggatgttttgttatagaggactatagtggaagtgaaagcattctgtgtttactctttgcattaatatataattcttttgactttgtttctcttgtgtagtggtaaaatggtagctggtgcttattgagatttgctgtatttatatcaataaagtatagtaaagcaaaaaaaa

SEQ ID NO: 155439 - DNA, 516 bp, Homo sapiens
atttgtcgggagagtagatgtttcattttatttcagtccctgtgtaatttgtcttctctaatgttaaatactatgtagaatgtgtctgtgtaattttatagatacttttattatggatggacattctaatttgtactgactttgggtctgtgaactacttcaatgtttggaggttaccaaaatcttacctttcccttttctattctagaatttacatagtacatgacgaagttaaggataaagcttttgaactagaactcagctgggttggtgaattaactaatggaagacatgaaattgttcctaaagatataagagaagaagcagagaaatatgctaaggaatctctgaaggaagaagatgaatcagatgatgataatatgtaacatttactccagcatctattgtattttaaatttctactccagtccaatgtaactatttagccctggattatacatactgtccaattttcattaaatttttgtcttataactaaaaaaaaaaaaaaaaaaa

SEQ ID NO: 155440 - DNA, 1172 bp, Homo sapiens
ggaattaattctgccatggtcctagattgtggatatagggaaagcctggtgttacccatatatgaaggaatcccagttctaaattgttggggagcactacccctaggaggaaaagctcttcacaaagagttggaaactcaactattggaacaatgtactgttgacacaagtgttgctaaagaacagagccttccctcagtgatgggttcagttccggaaggtgtcttagaggacattaaagcgcgtacttgctttgtaagtgatctgaagcgaggactaaaaatccaagcagcaaaatttaatattgatgggaataatgagcgtccctccccacccccaaaatgttgactatccattagatggagagaagattttacatatccttggattcaatccagagattcagttgtgggaaattctttttgaacaagataatggaagagccatcagttggccacttttaatattggggttaccttatacagtggtccgataggacaccagggaaggcaactaggcaggaggaatttgggtaggtcatagggtgggcacttctatgttgccagggatttctccacaggattgcttgcaggaaataagggtatttgggtaggaaaaacccaaaatataaaaaagcactttggcactaaagacatttccgaattccatactcccaccttggcaaaaagcctaattgtggtggcctgggtttggggagggggctatttttgggggcctttccaggatatacttggggagccgttctggtttccaaagggatattataatccagacggggccgtatacctggattggtggtcctctcaataacccacctttgggaaatgatggttgaatggccgggggaaaacccaaccacctctggatggaagagagcattttcccactggagaaattagaagttttggatttaaaaatccaaccttggctttcatatcaaatattttaacccaatttataagcaaattgtacaaagtatgtaggatgttttgttatagaggactatagtggaagtgaaagcattctgtgtttactctttgcattaatatataattcttttgactttgtttctcttgtgtagtggtaaaatggtagctggtgcttattcccctctctgctgtatttatatcaataaagaaaaataaagcaaa

SEQ ID NO: 155441 - DNA, 2344 bp, Homo sapiens
atggggtgtcgccctgttgggcaggctggtctcgaactcctgacctcagcgcgtacttgctttgtaagtgatctgaagcgaggactaaaaatccaagcagcaaaatttaatattgatgggaataatgagtgtccgatagacaccaggaagcaactagcagagaatttggtagtcataggtggcacttctatgttgccaggatttctccacagattgcttgcagaaataaggtatttggtagaaaaaccaaaatataaaaaagcacttggcactaagacatttcgaattcatactccacctgcaaaagctaattgtgtggcctggttgggagcaaggtctttgttgggatataacaggttcctgatgtttcagccatttagaggggaagaaactgtatggtcattactgccaaagatacaagcttactgttgcccttttctccttaagtatgacctgtcagcctctacattctctcctgacggaagagtttttcaagttgaatatgctatgaaggctgtggaaaatagtagtacagctattggaatcagatgcaaagatggggttgttcttggggtaagaaaaataagtcctttctaaactttatgaaagaagggttccaaacaaaaagacttttttaatgtttgatcggcaatgttggaatggccagtagcaggttttgttggcagatgctcgttctttagcagacatagcaagagaagaagcttccaacttcagatctaactttgggctacaccattccactaaaacatcttgcagacagagtggcccatgtatggtgccatgccatataccactctaccagtggctgttagacccttttggctgccagtttccatgttagggtccttacagtgtgaatgcacggtgcgacaactctaccatgattgaccccatccaggtgtttccataccggttaattggggctgtgccatcgggcaaaggccaggggcaagctggcaaagacgggaaataggaggaagctttcagatggaaaggaattgacctgccgtggtatcgtttaaagaagtttgccaaaataattgacatagtacatgacgaagttaaggataaggccttttgaactagaacccagctggggttggtgaattaactaaatggaagacatgaaattgttccaaaaagatataagagaagaagcagagaaatatgctaaggaatctctgaaggaagaagatgaatcagatgatgataatatgtaacatttactccagcatctattgtatcctaaacttctactccacgtccaatgtaactatttagccctggattatacatactgtccaattttcattaaatttttgtcttataactattgaagtttggttaatatctgctttacaaaattggtgggggtaaatgaggacatttactcagtattaaaatatagatttatgactactgaaaaattccctggttaaaatgctgcagaattaattccaagactgtagattaattcaaagccccatcttcatcactcaactagaatttacagatcatattctcctgggcttttgtacaaaaagcacctaccaacttagtggacaaataactgatacggtttcccactttcatatgaagtaactggtggtcatcagtcactgttaatctttagatgtgatacagatgacagatgtttcagttttggataatttttcaaaaactgacccttctcaaaaaagacccttcaatacatgagtcaaggatgtttttgcttttttcctttattgtggtgaggggcggatttaaggatcaataaagtccctattctgtcactaaaaaaatttcttgatctctaaagattaaaataaaaataccaacatcagacagctttcatgttaaaaatcagaatttatgttaaagtgctctgtaaacagaactgttactaagtggaataaacagtactgtggccgataagaataacttgaagctgaaaagcagtactcacagcaggaacaatttgaactcaggccatgtatacacaccctctagtggactcatgccagtgtcactccattgaagtgttgtgctttcctaagaaggtaatctagccactgaatttgggtgcagggtatcgctggactttgagcatttgtgtagtttaaatagcaaatcattatacctgagtattaatagctaactactacacaaacaactcaaaaccagtaatgtcatgtcattaccatggcttcttttatgtaacattatctgctacattttaccactcaaaatatatttaaaatatgtattttaaaatatattagagcatatggctcaagcaatcctcccacctcagcttggtaac

SEQ ID NO: 155442 - DNA, 1099 bp, Homo sapiens
  misc_feature (1)...(1099): n = a,t,c or g
agtacatcgaggatgacatgaatccattccaagggaaccttgaaagaacagagaccaagaaagagtaaaacctttttatgacagggcgctgcagaacaaatcaagcacatcttggctaatttcaaaaactaccaggttctttattggtgaaaacatgatttcagaatggcatgggtgcttctattggactacgtgaagggatgggtgtgccccccatatatgattttctttaagggatggtttagacatggacaaaatgcttaacaaatgtggcaaattattttggatctatcaccctgtcatccataactgggcttctgccttgtcatcccacacaaccacccgggacttaagacaaaattggactgattgtcatcctggagctcttccatttattttggactggggattttatttgggagtgggagggcattgtttttacgaaaaaccatgtccatggtaggttgtctaaaaaataaaaatgccatttaaacctcatttgaggagaatgcccttttaggtttaatgccatatttaaacgtaaattgatcctgtagtgtcccctggagaaagctagagcctgattgtaggctactacttcatcaattaaacttctacaagtggagaactacttctgggactgggaatataaaaaagaatcaaaggttctggattttgagttgcaataaaggggaaagaccatgctcatagcagtgccaacatctgaagtgtggagccttacccatttcatcacctacaacggaagtagttaactggaagagattaccaagagaataaaaagagactcattcagtggaagcnnnnnnnnnnnnnngggggggcccgttttaaaggaacccttgggggggccaaagtttaccgggggctggcaaggtaaaagttttttccttatagggggccgtataaaaacctacttgggaatttttggaaaagaacctttttttttgggggggaaaattttggcccaactcccctccaaaattttaaccctttggggaaaataaaaatttttaaggggaatagggggaaaaaataccttatattctttgtgtttaaaaatttttcttattagaaaaag

SEQ ID NO: 155443 - DNA, 539 bp, Homo sapiens
tgagacgagtctcatctgtcacccaggctggagtgcaatggcatggtctcggctcactgcaacctccgcctcctgggttcaagctattctgcctcagcctcccaaggagccaggactacaggtgcatgccaccacgcccggctaatttttgtattttttagtagagacagggtttcacccagcacattgagacaagctggtttcaaactcctgaccttgtggtccgcccgccccggcctcccagagtgctgggattacaggcgtgacgaccgcgcccatctcccctgcaatgtctttagttagaccttttccaccatcatgtctaactgggctacggtttggggaaagtgtccaaattagtccgtgttatcctaaaaggggtgtgcccgttattagcagggccagggctagggtgagacacatgaggcacctggggcatacatttaagttggtgcttgcttgcaggtgccaagagagtgcttccttgggtttacccccgtggtgcctcctttacctcattctggccccagccctggggt

SEQ ID NO: 155444 - DNA, 4452 bp, Homo sapiens; identical to SEQ ID NO: 130477

SEQ ID NO: 155445 - DNA, 3177 bp, Homo sapiens
ggaccttgcgtggctgtcagcgtgtcctgggtgtgcccctcacatgccatctgcgaggtatggtcttcggggctgggcttcctccacggccataagaacccctctttgggctggagttgtggcaagttgctggtggcaggtggccctccttttattcagcctagtggttcggcaggtgctggtggagagtgggtgctggtggagtgggtgctggtggagcgggtgctggtggagagtgggtgctggtggagagtgggtgctggtggagtgggtgctggtggagagtggatgctggtggagagtgggtgctggtggagtggatgctggtggagtgggtgctggtggagagtgggtgctggtggagcgggtgctggtggagcgggtgctggtggagagtgggtgctggtggagtgggtgctagtggagagtgggtgctggtggagagtgggtgcttgtggagcgggtgctggtagagtggatgctggtggagcgggtgctggtggagagtgggtgctggtggagcgggtgctggtggagcgggtgctggtggagagtgggtgctggtggagagtgggtgctggtggagcgggtgctggtagagtggatgctggtggagtgggtgctggtggagagtgggtgctggtggagcgggtgctggtggagcgggtgctggtggagagttaccactacaacgacctggtgtctccacagtacctgaacctcatcgcaaacctgtcgggctgtaccgcccaccggcgcgtgaacaactgctcggacatgtgcttccaccagaagtaccggacgcacgacggcacctgtaacaacctgcagcaccccatgtggggcgcctcgctgaccgccttcgagcgcctgctgaaatccgtgtacgagaatggcttcaacacccctcggggcatcaacccccaccgactgtacaacgggcacgcccttcccatgccgcgcctggtgtccaccaccctgatcgggacggagaccgtcacacccgacgagcagttcacccacatgctgatgcagtggggccagttcctggaccacgacctcgactccacggtggtggccctgagccaggcacgcttctccgacggacagcactgcagcaacgtgtgcagcaacgaccccccctgcttctctgtcatgatcccccccaatgactcccgggccaggagcggggcccgctgcatgttcttcgtgcgctccagccctgtgtgcggcagcggcatgacttcgctgctcatgaactccgtgtacccgcgggagcagatcaaccagctcacctcctacatagacgcatccaacgtgtacgggagcacggagcatgaggcccgcagcatccgcgacctggccagccaccgcggcctgctgcggcagggcatcgtgcagcggtccgggaagccgctgctccccttcgccaccgggccgcccacggagtgcatgcgggacgagaacgagagccccatcccctgcttcctggccggggaccaccgcgccaacgagcagctgggcctgaccagcatgcacacgctgtggttccgcgagcacaaccgcattgccacggagctgctcaagctgaacccgcactgggacggcgacaccatctactatgagaccaggaagatcgtgggtgcggagatccagcacatcacctaccagcactggctcccgaagatcctgggggaggtgggcatgaggacgctgggagagtaccacggctacgaccccggcatcaatgctggcatcttcaacgccttcgccaccgcggccttcaggtttggccacacgcttgtcaacccactgctttaccggctggacgagaacttccagcccattgcacaagatcacctcccccttcacaaagctttcttctctcccttccggattgtgaatgagggcggcatcgatccgcttctcagggggctgttcggggtggcggggaaaatgcgtgtgccctcgcagctgctgaacacggagctcacggagcggctgttctccatggcacacacggtggctctggacctggcggccatcaacatccagcggggccgggaccacgggatcccaccctaccacgactacagggtctactgcaatctatcggcggcacacacgttcgaggacctgaaaaatgagattaaaaaccctgagatccgggagaaactgaaaaggttgtatggctcgacactcaacatcgacctgtttccggcgctcgtggtggaggacctggtgcctggcagccggctgggccccaccctgatgtgtcttctcagcacacagttcaagcgcctgcgagatggggacaggttgtggtatgagaaccctggggtgttctccccggcccagctgactcagatcaagcagacgtcgctggccaggatcctatgcgacaacgcggacaacatcacccgggtgcagagcgacgtgttcagggtggcggagttccctcacggctacggcagctgtgacgagatccccagggtagacctccgggtgtggcaggactgctgtgaagactgtaggaccagggggcagttcaatgccttttcctatcatttccgaggcagacggtctcttgagttcagctaccaggaggacaagccgaccaagaaaacaagaccacggaaaatacccagtgttgggagacagggggaacatctcagcaacagcacctcagccttcagcacacgctcagatgcatctgggacaaatgacttcagagagtttgttctggaaatgcagaagaccatcacagacctcagaacacagcctagagaccaggtgtacatcccccaggcagctgtcagagtggacagcgtgtggcaggtcctcctccctccacagcctagagaccaggtgtacatcccccaggcagctgtcagagtggacagcgtgtggcaggtcctcctgcctccacaacctagagaccagataaagaaacttgaatcacggctcagtaccacagagtgcgtggatgccgggggcgaatctcacgccaacaacaccaagtggaaaaaagatgcatgcaccatttgtgaatgcaaagacgggcaggtcacctgcttcgtggaagcttgcccccctgccacctgtgctgtccccgtgaacatcccaggggcctgctgtccagtctgcttacagaagagggcggaggaaaagccctag

SEQ ID NO: 155446 - DNA, 5627 bp, Homo sapiens
  misc_feature (1)...(5627): n = a,t,c or g
agccggccgtggtggctccgtgcgtccgagcgtccgtccgcgccgtcggccatgtgcctatcgctccaggggccccgggcgccgctgcctgttggcgctcgtgctgttctgcgcctgggggacgctggccgtggtggcccagaagccgggcgcagggtgtccgagccgctgcctgtgcttccgcaccaccgtgcgctgcatgcatctgctgctggaggccgtgcccgccgtggcgccgcagacctccatcctagatcttcgctttaacagaatcagagagatccaacctggggcattcaggcggctgaggaacttgaacacattgcttctcaataataatcagatcaagaggatacctagtggagcatttgaagacttggaaaatttaaaatatctctatctgtacaagaatgagatccagtcaattgacaggcaagcatttaagggacttgcctctctagagcaactatacctgcactttaatcagatagaaactttggacccagattcgttccagcatctcccgaagctcgagaggctatttttgcataacaaccggattacacatttagttccagggacatttaatcacttggaatctatgaagagattgcgactggactcaaacacacttcactgcgactgtgaaatcctgtggttggcggatttgctgaaaacctacgcggagtcggggaacgcgcaggcagcggccatctgtgaatatcccagacgcatccagggacgctcagtggcaaccatcaccccggaagagctgaactgtgaaaggccccggatcacctccgagccccaggacgcagatgtgacctcggggaacaccgtgtacttcacctgcagagccgaaggcaaccccaagcctgagatcatctggctgcgaaacaataatgagctgagcatgaagacagattcccgcctaaacttgctggacgatgggaccctgatgatccagaacacacaggagacagaccagggtatctaccagtgcatggcaaagaacgtggccggagaggtgaagacgcaagaggtgaccctcaggtacttcgggtctccagctcgacccacttttgtaatccagccacagaatacagaggtgctggttggggagagcgtcacgctggagtgcagcgccacaggccaccccccgccgcggatctcctggacgagaggtgaccgcacacccttgccagttgacccgcgggtgaacatcacgccttctggcgggctttacatacagaacgtcgtacagggggacagcggagagtatgcgtgctctgcgaccaacaacattgacagcgtccatgccaccgctttcatcatcgtccaggctcttcctcagttcactgtgacgcctcaggacagagtcgttattgagggccagaccgtggatttccagtgtgaagccaagggcaacccgccgcccgtcatcgcctggaccaagggagggagccagctctccgtggaccggcggcacctggtcctgtcatcgggaacacttagaatctctggtgttgccctccacgaccagggccagtacgaatgccaggctgtcaacatcatcggctcccagaaggtcgtggcccacctgactgtgcagcccagagtcaccccagtgtttgccagcattcccagcgacacaacagtggaggtgggcgccaatgtgcagctcccgtgcagctcccagggcgagcccgagccagccatcacctggaacaaggatggggttcaggtgacagaaagtggaaaatttcacatcagccctgaaggattcttgaccatcaatgacgttggccctgcagacgcaggtcgctatgagtgtgtggcccggaacaccattgggtcggcctcggtgagcatggtgctcagtgtgaacgttcctgacgtcagtcgaaatggagatccgtttgtagctacctccatcgtggaagcgattgcgactgttgacagagctataaactcaacccgaacacatttgtttgacagccgtcctcgttctccaaatgatttgctggccttgttccggtatccgagggatccttacacagttgaacaggcacgggcgggagaaatctttgaacggacattgcagctcattcaggagcatgtacagcatggcttgatggtcgacctcaacggaacaagttaccactacaacgacctggtgtctccacagtacctgaacctcatcgcaaacctgtcgggctgtaccgcccaccggcgcgtgaacaactgctcggacatgtgcttccaccagaagtaccggacgcacgacggcacctgtaacaacctgcagcaccccatgtggggcgcctcgctgaccgccttcgagcgcctgctgaaatccgtgtacgagaatggcttcaacacccctcggggcatcaacccccaccgactgtacaacgggcacgcccttcccatgccgcgcctggtgtccaccaccctgatcgggacggagaccgtcacacccgacgagcagttcacccacatgctgatgcagtggggccagttcctggaccacgacctcgactccacggtggtggccctgagccaggcacgcttctccgacggacagcactgcagcaacgtgtgcagcaacgaccccccctgcttctctgtcatgatcccccccaatgactcccgggccaggagcggggcccgctgcatgttcttcgtgcgctccagccctgtgtgcggcagcggcatgacttcgctgctcatgaactccgtgtacccgcgggagcagatcaaccagctcacctcctacatcgacgcatccaacgtgtacgggagcacggagcatgaggcccgcagcatccgcgacctggccagccaccgcggcctgctgcggcagggcatcgtgcagcggtccgggaagccgctgcttccccttcgccaccgggccgcccacggagtgcatgcgggacgagaacgagagccccatcccctgcttcctggccggggaccaccgcgccaacgagcagctgggcctgaccagcatgcacacgctgtggttccgcggagcacaaccgcattgccacggagctgctcaagctgaacccgcactgggacggcgacaccatcgtacgtatgagaccaggaagatcgtgggtgcggagatccagcacatcacctaccagcactggctcccgaagatcctgggggaggtgggcatgaggacgctgggagagtaccacggcctacgaccccggcatcaatgcttggcatcttcaacgccttcgccaccggcggccttcaggtttggccacacgcttgtcaacccactgcttttacccggcttggacgagaactttccagccccattgcacaagatcacctcccccttcacaaagctttcttctctccgttcgggattgtgaatgagggcggcatcgatccgcttctcagggggctgttcggggtggcggggaaaatgcgtgtgccctcgcagctgctgaacacggagctcacggagcgccttgttctccatggcacacacggcggctctggacctggcgggcatcaacatccagcggggccgggaccacgggatcccaccctaccacgactacagggtctactgcaatctatcggccggcacacacgttcgaggacctgaaaaatgagattaaaaaccctgagatccgggagaaactgaaaaggttgtatggctcgacactcaacatcgacctgtttccggcgctcgtggtggaggacctggtgcctggcagccggctgggccccaccctgatgtgtcttctcagcacacagttcaagcgcctgcgagatggggacaggttgtggtatgagaaccctggggtgttctccccggcccagctgactcagatcaagcaagcgtagctggcaaggatcatatacgacaacgcggacaacatcaccagggtgcagagcaacgtgttcagggtgctggagttccctcacggctacgacagctgtgacgagatcctcagggtggacctccgggtgtggcaggactgctgtgaagactgtaggaccaggggccagttcaatgccttttccaatcatttccgagacagacggtctcttgagttcagctaccaggaggacaagccgaccaagaatacaagacctcggaaaatacccagtgttgggagacagggggaacatctcagcaacagcacctcagctttcagcacacgctcagatgcatctgggacaaatgacttcagagagtttgttctggaaatgcagaagaccatcacagacctcagaacacagataaagaaacttgaatcacggctcagtaccacagagtgccgtggatgcgggggccgaatctcacgccaacaaccaccaagtgaaaaaaaagatgcatgcaccatttgtgaatgcaaagacgggcaggtcacctgcttccgtggaagcttgccccccttgccaccctgtgctgtccccgtgaacatcccaggggcctgcttgtccagtctgcttacagaagaagggcggaggaaaaagcccctaggctccctggggaagctccttcagagttttgtcttgcttgtgccatcgtgagatcgggtggccgatggcagggagctgcggacttgcagaccaggaaacacccagaacttcgtgacatttcattgacaacgtccaagcttggtgctgtttacagaaaggcagttcaggaaggctttccaaccagagcattctgcggagaaggaaggcacagcaggtgctggaagggaagcaggcaggagtcctagcttcacgtttagacttctcaggtttttatttaattcttttaaaatgaaaaattggtgctactattaaattgcacagttgaatcatttaggcgcttaaattggttttgcctcccaacgccattttctttttaaataaagcaggatacctctatatgtcagccttgccttgttcagatgccaggagccggcagacctgtcacccgcaggtggggtgaagtctcggagctgccaagaggggctcaccgaaatcgggggttccatcacaagcctatgttttaaaaagaaaattgggtgtttggcaaacggaacagaaaccttttgatgagagcgtttcacagggacactgtctgggggttgcagtgcaaagcccccggccttctttccctggggaacctctgaaactcctcccttccctctggggctcctctgtaaacatttcacccacacgtccagcatcttaatcccaaagacaaaacatttcaccgctgctcgaaagcagctgctatagcctgtgactctccgtgtgtcagctcctttccacacctgattagaacattcccataagccacattttagaaacagattttgctttcagctgtccacttggcacacatactgcctagttggtgacccaaatgtgaaaaaaacctcctttcatcccattgtgtatctgatacctggccgagggccaagggtgtgtgttgacaacggcggttcccagccggccctgggttgcgtccacgtcctggaacaagagccgcttccgggatgggntcttttccaaggggaggtaggagctcatagtgtcggggaactgtcaaacttcaaggttgtgtgagtgcgttaaaaaaaaaaaaaagtcgacgc

SEQ ID NO: 155447 - DNA, 307 bp, Homo sapiens; identical to SEQ ID NO: 148112
  misc_feature (1)...(307): n = a,t,c or g

SEQ ID NO: 155448 - DNA, 474 bp, Homo sapiens; identical to SEQ ID NO: 148121

SEQ ID NO: 155449 - DNA, 773 bp, Homo sapiens; identical to SEQ ID NO: 148122
  misc_feature (1)...(773): n = a,t,c or g

SEQ ID NO: 155450 - DNA, 3262 bp, Homo sapiens; identical to SEQ ID NO: 148123

SEQ ID NO: 155451 - DNA, 1587 bp, Homo sapiens; identical to SEQ ID NO: 136447

SEQ ID NO: 155452 - DNA, 3522 bp, Homo sapiens; identical to SEQ ID NO: 136448

SEQ ID NO: 155453 - DNA, 674 bp, Homo sapiens; identical to SEQ ID NO: 136449

SEQ ID NO: 155454 - DNA, 2384 bp, Homo sapiens
atcaaacagaaatgactattgaaggcttgcagcccacagtggagtatgtggttagtgtctatgctcagaatccaagcggagagagtcagcctctggttcagactgcagtaaccaacattgatcgccctaaaggactggcattcactgatgtggatgtcgattccatcaaaattgcttgggaaagcccacaggggcaagtttccaggtacagggtgacctactcgagccctgaggatggaatccatgagctattccctgcacctgatggtgaagaagacactgcagagctgcaaggcctcagaccgggttctgagtacacagtcagtgtggttgccttgcacgatgatatggagagccagcccctgattggaacccagtccacagctattcctgcaccaactgacctgaagttcactcaggtcacacccacaagcctgagcgcccagtggacaccacccaatgttcagctcactggatatcgagtgcgggtgacccccaaggagaagaccggaccaatgaaagaaatcaaccttgctcctgacagctcatccgtggttgtatcaggacttatggtggccaccaaatatgaagtgagtgtctatgctcttaaggacactttgacaagcagaccagctcagggtgttgtcaccactctggagaatgtcagcccaccaagaagggctcgtgtgacagatgctactgagaccaccatcaccattagctggagaaccaagactgagacgatcactggcttccaagttgatgccgttccagccaatggccagactccaatccagagaaccatcaagccagatgtcagaagctacaccatcacaggtttacaaccaggcactgactacaagatctacctgtacaccttgaatgacaatgctcggagctcccctgtggtcatcgacgcctccactgccattgatgcaccatccaacctgcgtttcctggccaccacacccaattccttgctggtatcatggcagccgccacgtgccaggattaccggctacatcatcaagtatgagaagcctgggtctcctcccagagaagtggtccctcggccccgccctggtgtcacagaggctactattactggcctggaaccgggaaccgaatatacaatttatgtcattgccctgaagaataatcagaagagcgagcccctgattggaaggaaaaagacagacgagcttccccaactggtaacccttccacaccccaatcttcatggaccagagatcttggatgttccttccacagttcaaaagacccctttcgtcacccaccctgggtatgacactggaaatggtattcagcttcctggcacttctggtcagcaacccagtgttgggcaacaaatgatctttgaggaacatggttttaggcggaccacaccgcccacaacggccacccccataaggcataggccaagaccatacccgccgaatgtaggtgaggaaatccaaattggtcacattcccagggaagatgtagactatcacctgtacccacacggtccggggctcaatccaaatgcctctacaggacaagaagctctctctcagacaaccatctcatgggccccattccaggacacttctgagtacatcatttcatgtcatcctgttggcactgatgaagaacccttacagttcagggttcctggaacttctaccagtgcgactctgacaggcctcaccagaggtgccacctacaacatcatagtggaggcactgaaagaccagcagaggcataaggttcgggaagaggttgttaccgtgggcaactctgtcaacgaaggcttgaaccaacctacggatgactcgtgctttgacccctacacagtttcccattatgccgttggagatgagtgggaacgaatgtctgaatcaggctttaaactgttgtgccagtgcttaggctttggaagtggtcatttcagatgtgattcatctagatggtgccatgacaatggtgtgaactacaagattggagagaagtgggaccgtcagggagaaaatggccagatgatgagctgcacatgtcttgggaacggaaaaggagaattcaagtgtgaccctcatgaggcaacgtgttacgatgatgggaagacataccacgtaggagaacagtggcagaaggaatatctcggtgccatttgctcctgcacatgctttggaggccagcggggctggcgctgtgacaactgccgcagacctgggggtgaacccagtcccgaaggcactactggccagtcctacaaccagtattctcagagataccatcagagaacaaacactaatgttaattgcccaattgagtgcttcatgcctttagatgtacaggctgacagagaagattcccgagagtaa

SEQ ID NO: 155455 - DNA, 2348 bp, Homo sapiens
cacttttgataacctgagtcccggcctggagtacaatgtcagtgtttacactgtcaaggatgacaaggaaagtgtccctatctctgataccatcatcccagctgttcctcctcccactgacctgcgattcaccaacattggtccagacaccatgcgtgtcacctgggctccacccccatccattgatttaaccaacttcctggtgcgttactcacctgtgaaaaatgaggaagatgttgcagagttgtcaatttctccttcagacaatgcagtggtcttaacaaatctcctgcctggtacagaatatgtagtgagtgtctccagtgtctacgaacaacatgagagcacacctcttagaggaagacagaaaacaggtcttgattccccaactggcattgacttttctgatattactgccaactcttttactgtgcactggattgctcctcgagccaccatcactggctacaggatccgccatcatcccgagcacttcagtgggagacctcgagaagatcgggtgccccactctcggaattccatcaccctcaccaacctcactccaggcacagagtatgtggtcagcatcgttgctcttaatggcagagaggaaagtcccttattgattggccaacaatcaacagtttctgatgttccgagggacctggaagttgttgctgcgacccccaccagcctactgatcagctgggatgctcctgctgtcacagtgagatattacaggatcacttacggagaaacaggaggaaatagccctgtccaggagttcactgtgcctgggagcaagtctacagctaccatcagcggccttaaacctggagttgattataccatcactgtgtatgctgtcactggccgtggagacagccccgcaagcagcaagccaatttccattaattaccgaacagaaattgacaaaccatcccagatgcaagtgaccgatgttcaggacaacagcattagtgtcaagtggctgccttcaagttcccctgttactggttacagagtaaccaccactcccaaaaatggaccaggaccaacaaaaactaaaactgcaggtccagatcaaacagaaatgactattgaaggcttgcagcccacagtggagtatgtggttagtgtctatgctcagaatccaagcggagagagtcagcctctggttcagactgcagtaaccactattcctgcaccaactgacctgaagttcactcaggtcacacccacaagcctgagcgcccagtggacaccacccaatgttcagctcactggatatcgagtgcgggtgacccccaaggagaagaccggaccaatgaaagaaatcaaccttgctcctgacagctcatccgtggttgtatcaggacttatggtggccaccaaatatgaagtgagtgtctatgctcttaaggacactttgacaagcagaccagctcagggtgttgtcaccactctggagaatgtcagcccaccaagaagggctcgtgtgacagatgctactgagaccaccatcaccattagctggagaaccaagactgagacgatcactggcttccaagttgatgccgttccagccaatggccagactccaatccagagaaccatcaagccagatgtcagaagctacaccatcacaggtttacaaccaggcactgactacaagatctacctgtacaccttgaatgacaatgctcggagctcccctgtggtcatcgacgcctccactgccattgatgcaccatccaacctgcgtttcctggccaccacacccaattccttgctggtatcatggcagccgccacgtgccaggattaccggctacatcatcaagtatgagaagcctgggtctcctcccagagaagtggtccctcggccccgccctggtgtcacagaggctactattactggcctggaaccgggaaccgaatatacaatttatgtcattgccctgaagaataatcagaagagcgagcccctgattggaaggaaaaagacagttcaaaagacccctttcgtcacccaccctgggtatgacactggaaatggtattcagcttcctggcacttctggtcagcaacccagtgttgggcaacaaatgatctttgaggaacatggttttaggcggaccacaccgcccacaacggccacccccataaggcataggccaagaccatacccgccgaatgtaggacaagaagctctctctcagacaaccatctcatgggccccattccaggacacttctgagtacatcatttcatgtcatcctgttggcactgatgaagaacccttacagttcagggttcctggaacttctaccagtgccactctgacag

SEQ ID NO: 155456 - DNA, 7341 bp, Homo sapiens
atgcttaggggtccggggcccgggctgctgctgctggccgtcctgtgcctggggacagcggtgccctccacgggagcctcgaagagcaagaggcaggctcagcaaatggttcagccccagtccccggtggctgtcagtcaaagcaagcccggttgttatgacaatggaaaacactatcagataaatcaacagtgggagcggacctacctaggtaatgtgttggtttgtacttgttatggaggaagccgaggttttaactgcgaaagtaaacctgaagctgaagagacttgctttgacaagtacactgggaacacttaccgagtgggtgacacttatgagcgtcctaaagactccatgatctgggactgtacctgcatcggggctgggcgagggagaataagctgtaccatcgcaaaccgctgccatgaagggggtcagtcctacaagattggtgacacctggaggagaccacatgagactggtggttacatgttagagtgtgtgtgtcttggtaatggaaaaggagaatggacctgcaagcccatagctgagaagtgttttgatcatgctgctgggacttcctatgtggtcggagaaacgtgggagaagccctaccaaggctggatgatggtagattgtacttgcctgggagaaggcagcggacgcatcacttgcacttctagaaatagatgcaacgatcaggacacaaggacatcctatagaattggagacacctggagcaagaaggataatcgaggaaacctgctccagtgcatctgcacaggcaacggccgaggagagtggaagtgtgagaggcacacctctgtgcagaccacatcgagcggatctggccccttcaccgatgttcgtgcagctgtttaccaaccgcagcctcacccccagcctcctccctatggccactgtgtcacagacagtggtgtggtctactctgtggggatgcagtggttgaagacacaaggaaataagcaaatgctttgcacgtgcctgggcaacggagtcagctgccaagagacagctgtaacccagacttacggtggcaacttaaatggagagccatgtgtcttaccattcacctacaatggcaggacgttctactcctgcaccacggaagggcgacaggacggacatctttggtgcagcacaacttcgaattatgagcaggaccagaaatactctttctgcacagaccacactgttttggttcagactcaaggaggaaattccaatggtgccttgtgccacttccccttcctatacaacaaccacaattacactgattgcacttctgagggcagaagagacaacatgaagtggtgtgggaccacacagaactatgatgccgaccagaagtttgggttctgccccatggctgcccacgaggaaatctgcacaaccaatgaaggggtcatgtaccgcattggagatcagtgggataagcagcatgacatgggtcacatgatgaggtgcacgtgtgttgggaatggtcgtggggaatggacatgcattgcctactcgcaacttcgagatcagtgcattgttgatgacatcacttacaatgtgaacgacacattccacaagcgtcatgaagaggggcacatgctgaactgtacatgcttcggtcagggtcggggcaggtggaagtgtgatcccgtcgaccaatgccaggattcagagactgggacgttttatcaaattggagattcatgggagaagtatgtgcatggtgtcagataccagtgctactgctatggccgtggcattggggagtggcattgccaacctttacagacctatccaagctcaagtggtcctgtcgaagtatttatcactgagactccgagtcagcccaactcccaccccatccagtggaatgcaccacagccatctcacatttccaagtacattctcaggtggagacctaaaaattctgtaggccgttggaaggaagctaccataccaggccacttaaactcctacaccatcaaaggcctgaagcctggtgtggtatacgagggccagctcatcagcatccagcagtacggccaccaagaagtgactcgctttgacttcaccaccaccagcaccagcacacctgtgaccagcaacaccgtgacaggagagacgactcccttttctcctcttgtggccacttctgaatctgtgaccgaaatcacagccagtagctttgtggtctcctgggtctcagcttccgacaccgtgtcgggattccgggtggaatatgagctgagtgaggagggagatgagccacagtacctggatcttccaagcacagccacttctgtgaacatccctgacctgcttcctggccgaaaatacattgtaaatgtctatcagatatctgaggatggggagcagagtttgatcctgtctacttcacaaacaacagcgcctgatgcccctcctgacccgactgtggaccaagttgatgacacctcaattgttgttcgctggagcagaccccaggctcccatcacagggtacagaatagtctattcgccatcagtagaaggtagcagcacagaactcaaccttcctgaaactgcaaactccgtcaccctcagtgacttgcaacctggtgttcagtataacatcactatctatgctgtggaagaaaatcaagaaagtacacctgttgtcattcaacaagaaaccactggcaccccacgctcagatacagtgccctctcccagggacctgcagtttgtggaagtgacagacgtgaaggtcaccatcatgtggacaccgcctgagagtgcagtgaccggctaccgtgtggatgtgatccccgtcaacctgcctggcgagcacgggcagaggctgcccatcagcaggaacacctttgcagaagtcaccgggctgtcccctggggtcacctattacttcaaagtctttgcagtgagccatgggagggagagcaagcctctgactgctcaacagacaaccaaactggatgctcccactaacctccagtttgtcaatgaaactgattctactgtcctggtgagatggactccacctcgggcccagataacaggataccgactgaccgtgggccttacccgaagaggccagcccaggcagtacaatgtgggtccctctgtctccaagtaccccctgaggaatctgcagcctgcatctgagtacaccgtatccctcgtggccataaagggcaaccaagagagccccaaagccactggagtctttaccacactgcagcctgggagctctattccaccttacaacaccgaggtgactgagaccaccatcgtgatcacatggacgcctgctccaagaattggttttaagctgggtgtacgaccaagccagggaggagaggcaccacgagaagtgacttcagactcaggaagcatcgttgtgtccggcttgactccaggagtagaatacgtctacaccatccaagtcctgagagatggacaggaaagagatgcgccaattgtaaacaaagtggtgacaccattgtctccaccaacaaacttgcatctggaggcaaaccctgacactggagtgctcacagtctcctgggagaggagcaccaccccagacattactggttatagaattaccacaacccctacaaacggccagcagggaaattctttggaagaagtggtccatgctgatcagagctcctgcacttttgataacctgagtcccggcctggagtacaatgtcagtgtttacactgtcaaggatgacaaggaaagtgtccctatctctgataccatcatcccagaggtgccccaactcactgacctaagctttgttgatataaccgattcaagcatcggcctgaggtggaccccgctaaactcttccaccattattgggtaccgcatcacagtagttgcggcaggagaaggtatccctatttttgaagattttgtgtactcctcagtaggatactacacagtcacagggctggagccgggcattgactatgatatcagcgttatcactctcattaatggcggcgagagtgcccctactacactgacacaacaaacggctgttcctcctcccactgacctgcgattcaccaacattggtccagacaccatgcgtgtcacctgggctccacccccatccattgatttaaccaacttcctggtgcgttactcacctgtgaaaaatgaggaagatgttgcagagttgtcaatttctccttcagacaatgcagtggtcttaacaaatctcctgcctggtacagaatatgtagtgagtgtctccagtgtctacgaacaacatgagagcacacctcttagaggaagacagaaaacaggtcttgattccccaactggcattgacttttctgatattactgccaactcttttactgtgcactggattgctcctcgagccaccatcactggctacaggatccgccatcatcccgagcacttcagtgggagacctcgagaagatcgggtgccccactctcggaattccatcaccctcaccaacctcactccaggcacagagtatgtggtcagcatcgttgctcttaatggcagagaggaaagtcccttattgattggccaacaatcaacagtttctgatgttccgagggacctggaagttgttgctgcgacccccaccagcctactgatcagctgggatgctcctgctgtcacagtgagatattacaggatcacttacggagaaacaggaggaaatagccctgtccaggagttcactgtgcctgggagcaagtctacagctaccatcagcggccttaaacctggagttgattataccatcactgtgtatgctgtcactggccgtggagacagccccgcaagcagcaagccaatttccattaattaccgaacagaaattgacaaaccatcccagatgcaagtgaccgatgttcaggacaacagcattagtgtcaagtggctgccttcaagttcccctgttactggttacagagtaaccaccactcccaaaaatggaccaggaccaacaaaaactaaaactgcaggtccagatcaaacagaaatgactattgaaggcttgcagcccacagtggagtatgtggttagtgtctatgctcagaatccaagcggagagagtcagcctctggttcagactgcagtaaccaacattgatcgccctaaaggactggcattcactgatgtggatgtcgattccatcaaaattgcttgggaaagcccacaggggcaagtttccaggtacagggtgacctactcgagccctgaggatggaatccatgagctattccctgcacctgatggtgaagaagacactgcagagctgcaaggcctcagaccgggttctgagtacacagtcagtgtggttgccttgcacgatgatatggagagccagcccctgattggaacccagtccacagctattcctgcaccaactgacctgaagttcactcaggtcacacccacaagcctgagcgcccagtggacaccacccaatgttcagctcactggatatcgagtgcgggtgacccccaaggagaagaccggaccaatgaaagaaatcaaccttgctcctgacagctcatccgtggttgtatcaggacttatggtggccaccaaatatgaagtgagtgtctatgctcttaaggacactttgacaagcagaccagctcagggtgttgtcaccactctggagaatgtcagcccaccaagaagggctcgtgtgacagatgctactgagaccaccatcaccattagctggagaaccaagactgagacgatcactggcttccaagttgatgccgttccagccaatggccagactccaatccagagaaccatcaagccagatgtcagaagctacaccatcacaggtttacaaccaggcactgactacaagatctacctgtacaccttgaatgacaatgctcggagctcccctgtggtcatcgacgcctccactgccattgatgcaccatccaacctgcgtttcctggccaccacacccaattccttgctggtatcatggcagccgccacgtgccaggattaccggctacatcatcaagtatgagaagcctgggtctcctcccagagaagtggtccctcggccccgccctggtgtcacagaggctactattactggcctggaaccgggaaccgaatatacaatttatgtcattgccctgaagaataatcagaagagcgagcccctgattggaaggaaaaagacagacgagcttccccaactggtaacccttccacaccccaatcttcatggaccagagatcttggatgttccttccacagttcaaaagacccctttcgtcacccaccctgggtatgacactggaaatggtattcagcttcctggcacttctggtcagcaacccagtgttgggcaacaaatgatctttgaggaacatggttttaggcggaccacaccgcccacaacggccacccccataaggcataggccaagaccatacccgccgaatgtaggacaagaagctctctctcagacaaccatctcatgggccccattccaggacacttctgagtacatcatttcatgtcatcctgttggcactgatgaagaacccttacagttcagggttcctggaacttctaccagtgccactctgacaggcctcaccagaggtgccacctacaacatcatagtggaggcactgaaagaccagcagaggcataaggttcgggaagaggttgttaccgtgggcaactctgtcaacgaaggcttgaaccaacctacggatgactcgtgctttgacccctacacagtttcccattatgccgttggagatgagtgggaacgaatgtctgaatcaggctttaaactgttgtgccagtgcttaggctttggaagtggtcatttcagatgtgattcatctagatggtgccatgacaatggtgtgaactacaagattggagagaagtgggaccgtcagggagaaaatggccagatgatgagctgcacatgtcttgggaacggaaaaggagaattcaagtgtgaccctcatgaggcaacgtgttacgatgatgggaagacataccacgtaggagaacagtggcagaaggaatatctcggtgccatttgctcctgcacatgctttggaggccagcggggctggcgctgtgacaactgccgcagacctgggggtgaacccagtcccgaaggcactactggccagtcctacaaccagtattctcagagataccatcagagaacaaacactaatgttaattgcccaattgagtgcttcatgcctttagatgtacaggctgacagagaagattcccgagagtaa

SEQ ID NO: 155457 - DNA, 7827 bp, Homo sapiens
  misc_feature (1)...(7827): n = a,t,c or g
gaagagcaagaggcaggctcagcaaatggttcagccccagtccccggtggctgtcagtcaaagcaagcccggttgttatgacaatggaaaacactatcagataaatcaacagtgggagcggacctacctaggtaatgtgttggtttgtacttgttatggaggaagccgaggttttaactgcgaaagtaaacctgaagctgaagagacttgctttgacaagtacactgggaacacttaccgagtgggtgacacttatgagcgtcctaaagactccatgatctgggactgtacctgcatcggggctgggcgagggagaataagctgtaccatcgcaaaccgctgccatgaagggggtcagtcctacaagattggtgacacctggaggagaccacatgagactggtggttacatgttagagtgtgtgtgtcttggtaatggaaaaggagaatggacctgcaagcccatagctgagaagtgttttgatcatgctgctgggacttcctatgtggtcggagaaacgtgggagaagccctaccaaggctggatgatggtagattgtacttgcctgggagaaggcagcggacgcatcacttgcacttctagaaatagatgcaacgatcaggacccaagggcatcctatagaattggagacccctggagcaacaaggttcatcgaggaaacctgctccagtgccatctgcacaggcaacgcccgaggagagtggaagtgtgagaggcacacctctgtgcagaccacatcgagcggatctggccctttcaccgatgttcgtgcagctgtttaccaaccgcagcctcacccccagcctcctccctatggccactgtgtcacagacagtggtgtggtctactctgtggggatgcagtggctgaagacacaaggaaataagcaaatgctttgcacgtgcctgggcaacggagtcagctgccaagagacagctgtaaaccagaattaccgtcggcaactcaaatggagagccatgtgtcttaccattcacctacaatggcaggacgttctactcctgcaccacggaagggcgacaggacggacatctttggtgcagcacaacttcgaattatgagcaggaccagaaatactctttctgcacagaccacactgttttggttcagactcaaggaggaaattccaatggtgccttgtgccacttccccttcctatacaacaaccacaattacactgattgcacttctgagggcagaagagacaacatgaagtggtgtgggaccacacagaactatgatgccgaccagaagtttgggttctgccccatggctgcccacgaggaaatctgcacaaccaatgaaggggtcatgtaccgcattggagatcagtgggataagcagcatgacatgggtcacatgatgaggtgcacgtgtgttgggaatggtcgtggggaatggacatgcattgcctactcgcaacttcgagatcagtgcattgttgatgacatcacttacaatgtgaacgacacattccacaagcgtcatgaagaggggcacatgctgaactgtacatgcttcggtcagggtcggggcaggtggaagtgtgatcccgtcgaccaatgccaggattcagagactgggacgttttatcaaattggagattcatgggagaagtatgtgcatggtgtcagataccagtgctactgctatggccgtggcattggggagtggcattgccaacctttacagacctatccaagctcaagtggtcctgtcgaagtatttatcactgagactcccgagtcagcccaaacttcccccccatccagtggaatgcaccacagccatctcacatttccaagtacattctcaggtggagacctaaaaattctgtaggccgttggaaggaagctaccataccaggccacttaaactcctacaccatcaaaggcctgaagcctgggtgtgggtatacgagggccagctcatcagcatccagcagtacggccaccaagaattgactcgctttgacttcacaaccaccagcaccagcacacctgtgaccagcaacacccgtgacaggagagacgactcccttttctcctcttgtggccacttctgaatctgtgaccgaaatcacagccagtagctttgtggtctcctgggtctcagcttccgacaccgtgtcgggattccgggtggaatatgagctgagtgaggagggagatgagccacagtacctggatcttccaagcacagccacttctgtgaacatccctgacctgcttcctggccgaaaatacattgtaaatgtctatcagatatctgaggatggggagcagagtttgatcctgtctacttcacaaacaacagcgcctgatgcccctcctgacccgactgtggaccaagttgatgacacctcaattgttgttcgctggagcagaccccaggctcccatcacagggtacagaatagtctattcgccatcagtagaaggtagcagcacagaactcaaccttcctgaaactgcaaactccgtcaccctcagtgacttgcaacctggtgttcagtataacatcactatctatgctgtggaagaaaatcaagaaagtacacctgttgtcattcaacaagaaaccactggcaccccacgctcagatacagtgccctctcccagggacctgcagtttgtggaagtgacagacgtgaaggtcaccatcatgtggacaccgcctgagagtgcagtgaccggctaccgtgtggatgtgatccccgtcaacctgcctggcgagcacgggcagaggctgccactcagcaggaacacctttcgcagaagtcaccgggctgtcccctggggtcacctattacttcaaagtctttggccagtgagccactgggagggagagcaagcctctgactgctcaacagacaaccaaactgggatgctcccactaacctccagtttgtcaatggaactgattctactgtccttggttgagatggactccacttccgggcccagataacaggataccgactgaccgtgggccttacccgaagaggacagcccaggcagtacaatgtgggtccctctgtctccaagtacccactgaggaatctgcagcctgcatctgagtacaccgtatccctcgtggccataaagggcaaccaagagaaccccaaagccactggagtatttaccacactgcagccaggaagctctattccaccttacaacaccgaggtgactgagaccaccatcgtgatcacatggacgcatgctccaagaattggttttaagctgggtgtacgaccaagcaacccaggagaggcaccacgagaagtgacttcagactcaggaagcatcgttgtgtccggcttgactccaggagtagagtacgtctacaccatccaagtcctgagagatggacaggatagagatgcgcccaattgtaaacaaaagtggtgacaccattgtctccaccaacaaacttgcatctggaggcaaaccctgacactggagtgctcacagtctcctgggagaggagcaccaccccagacattactggttatagaattaccacaacccctacaaacggccagcagggaaattctttggaagaagtggtccatgctgatcagagctcctgcactttttgataaccttgaagtcccgggcctggagtacaatgtcagtgtttacactgtcaaggatgacaaggaaagtgtccctatctctgataccatcatcccagctgttcctcctcccactgacctgcgattcaccaacattggtccagacaccatgcgtgtcacctgggctccacccccatccattgatttaaccaacttcctggtgcgttactcacctgtgaaaaatgaggaagatgttgcagagttgtcaatttctccttcagacaatgcagtggtcttaacaaatctcctgcctggtacagaatatgtagtgagtgtctccagtgtctacgaacaacatgagagcacacctcttagaggaagacagaaaacaggtcttgattccccaactggcattgacttttctgatattactgccaactcttttactgtgcactggattgctcctcgagccaccatcactggctacaggatccgccatcatcccgagcacttcagtgggagacctcgagaagatcgggtgccccactctcggaattccatcaccctcaccaacctcactccaggcacagagtatgtggtcagcatcgttgctcttaatggcagagaggaaagtcccttattgattggccaacaatcaacagtttctgatgttccgagggacctggaagttgttgctgcgacccccaccagcctactgatcagctgggatgctcctgctgtcacagtgagatattacaggatcacttacggagaaacaggaggaaatagccctgtccaggagttcactgtgcctgggagcaagtctacagctaccatcagcggccttaaacctggagttgattataccatcactgtgtatgctgtcactggccgtggagacagccccgcaagcagcaagccaatttccattaattaccgaacagaaattgacaaaccatcccagatgcaagtgaccgatgttcaggacaacagcattagtgtcaagtggctgccttcaagttcgcctgttactggttacagagtaaccaccacttcccaaaaatggaccaggaccaacaaaaactaaaactgcaggtccagatcaaacagaaatgactattgaaggcttgcagcccacagtggagtatgtggttagtgtctatgctcagaatccaagcggagagacgtcagcctctggttcagactgcagtaaccaacattgatcgccctaaaggactggcattcactgatgtggatgtcgattccatcaaaattgcttgggaaagcccacatggggcaagtttccaggtacagggtgacctactcgagcccctgaggatggaatccatgagctattccctgcacctgatggtgaagaagacactgcagagctgccaaggcctcagaccgggttctgagtacacagtcagtgtggttgccttgcacgatgatatggagagccagcccctgattggaacccagtccacagctattcctgcaccaactgacctgaagttcactcaggtcacacccacaagcctgagcgcccagtggacaccacccaatgttcagctcactggatatcgagtgcgggtgacccccaaggagaagaccggaccaatgaaagaaatcaagccttgctcctgacagctcatccgtggttgtatcaggacttatggtggccaccaaatatgaagtgagtgtgctatgctcttaaggacactttgacaagcagaccagctcagaggtgttgtcaccactctggagaatgtcagcccaccaagaagggctcgtgtgacagatgctactgagaccaccatcaccattagctnggagaaccaagacttagacgatcacttgggcttccaagttgatgcccgttccagccaatggccagactccaatccagagaaccatcaagccagatgtcagaagctacaccatcacaggtttacaaccaggcactgactacaagatctacctgtacaccttgaatgacaatgctcggagctcccctgtggtcatcgacgcctccactgccattgatgcaccatccaacctgcgtttcctggccaccacacccaattccttgctggtatcatggcagccgccacgtgccaggattaccggctacatcatcaagtatgagaagcctgggtctcctcccagagaagtggtccctcggccccgccctggtgtcacagaggctactattactggcctggaaccgggaaccgaatatacaatttatgtcattgccctgaagaataatcagaagagcgagcccctgattggaaggaaaaagacagacgagcttccccaactggtaacccttccacaccccaatcttcatggaccagagatcttggatgttccttccacagttcaaaagacccctttcgtcacccaccctgggtatgacactggaaatggtattcagcttcctggcacttctggtcagcaacccagtgttgggcaacaaatgatctttgaggaacatggttttaggcggaccacaccgcccacaacggccacccccataaggcataggccaagaccatacccgccgaatgtaggacaagaagctctctctcagacaaccatgtcatgggccccagccctttacactgctgagtacatcatttcatgtcatcctgggggctctgatgaagaacccttacagttcatggatactggaactgctaccagcgccactctgacaggcctcaccagaggtgccacctacaacatgataatggaggcactgaaagaccagcactaggcataaggttcgggaagaggttgttaccgtgggcaactctgtcaacgaaggcttgaaccaacctacggatgactcgtgctttgacccctacacagtttcccattatgccgttggagatgagtgggaacgaatgtctgaatcaggctttaaactgttgtgccagtgcttaggctttggaagtggtcatttcagatgtgattcatctaggatgggtgccatggacaatggtgttgaactacaagattggagagaagtgggaccgtcagggagaaaatggccagatgatgagctgcacatgtcttgggaacggaaaaggagaattcaagtgtgaccctcatgaggcaacgtgttacgatgatgggaagacataccacgtaggagaacagtggcagaaggaatatctcgggtgccatttgctcctgcacatgctttggaggccagcggggctggcnctggtggacaactgccgcagacctgggggtgaaccccagtcccgaaggcacttactggccagtcctaacaaccagtattctcaagagataccatcagagaacaacccacaattttaaattgccccaattgaagtgctcatggccttttggatgtacaggctgacagaagaagattccccgagagtaaatcatctttcccaatccagaggaaccaagcatgtctctctgccaagatccatcttaaactggagtgatgttagcacgacccagcttagagttcttctttctttcttaagcccctttgctctggaggaagttctcccagcttcagctccaacttcacaggcttctcccaaggcatcacccctgggaagtttccctgaggggttttcttaataaatgagggctgcaccattggcccttgtttcttgctttcggaaagtatttcaatacccgctcaagtattttaaaatggaaggtgatcccctaagatttgggtttgggggatccaatagggaaaagccatatggccaggcccaacccaagatgcaaatggttttggaaaatggatatgacccaaaattttaaagtagggaaagtcacccccaaacacttcctgctttccaccttaaagtgtcctggccccgcaatacctgtaggaacaagccatgatccttgttacctgtgatattttaaatatcccacagtactcactttttccaaatgatccctagtaattgccctagaaatatctttctcttaccctgttatttatcaattttttcccagtatttttatacggaaaaaattgtattgaaaacacttagtatgcagttgcataagaggaatttggtataattatggtgggtgattattttttatactgtatgtgccaaagctttactactgtggaaagacaactgttttaataaaagatttacattccacaaaaaaaaaaaaaaaaaaaaaatggtt

SEQ ID NO: 155458 - DNA, 389 bp, Homo sapiens
agcatggcagcctccttacggctcctcggagctgcctccggtctccggtactggagccggcggctgcggccggcagccggcagctttgcagcggtgtgttctaggtcagtggcttcaaagactccagttggattcattggactgggcaacatggggaatccaatggcaaaaaatctcatgaatcttggaatcaggttagggcttgacccaaaactactggctaaaatcctaaatatgagctcaggacggtgttggtcaagtgacacttataatcctgtacctggagtgatggatggcgttccctcggctaataactatcagggtggatttggaacaacactcatggctaaggatctgggattggcacaagactctgctaccagcacaag

SEQ ID NO: 155459 - DNA, 554 bp, Homo sapiens
tgcagatgccctgggtcgacccacgcgtccggccagccagtcccgctgcacacgctcgcagtctgtgggcccttcgggtttcggcggaggtcaccgcggggagaggggcgggcgtatgtttggcagcctccttacggctcctcggagctgcctccggtctccggtactggagccggcggctgcggccggcagccggcagctttgcagcggtgtgttctaggtcagtggcttcaaagactccagttggattcattggactgggcaacatggggaatccaatggcaaaaaatctcatgaaacatggctatccacttattatttatgatgtgttccctgatgcctgcaaagagtttcaagatgcaggtgaacaggtagtatcttccccagcagatgttgctgaaaaagctgacagaattattacaatgctgcccaccagtatcaatgcaatagaagcttattccggagcaaatgggattctaaaaaaagtgaagaagggctcattattaatagattccagcactattgatcctgccagtttcaaaagaattggccaa

SEQ ID NO: 155460 - DNA, 1133 bp, Homo sapiens
atggggaatccaatggcaaaaaatctcatgaaacatggctatccacttattatttatgatgtgttccctgatgcctgcaaagagtttcaagatgcaggtgaacagctctgtcccaacctggatgtgaatcatccctttgtccagcgtctccatgctgcagacactccctggcccattagtcacttactagccgcctcagtgatcgggtgttgtgatatcgcgtgcttattttcaggacgggtgtccatttcctccctctgtgttactatatcaagtcaagctgatgaagtgagagccaaagaaaacaagcccatcccccaacaccccaccaagattgcagaaatgctggtagtatcttccccagcagatgttgctgaaaaagctgacagaattattacaatgctgcccaccagtatcaatgcaatagaagcttattccggagcaaatgggattctaaaaaaagtgaagaagggctcattattaatagattccagcactattgatcctgcagtttcaaaagaattggccaaagaagttgagaaaatgggagcagttttcatggatgcccctgtttctggtggggtaggagctgcacgatctgggaacctcacagtttatggtgggaggagttgaagatgaatttgctgctgcccaagagtctgctggggtgcatgggctccaacgtggtgtactgtggagctgttgggactgggcaggcggcaaagatctgcaacaacatgctgttagctattagtatgattggaactgctgaagctatgaatcttggaatcaaggttagggctttgacccaaaactactgggctaaaatcctaaatatggagctccaggacggtgttggtccaagtgacactttataaaccctgtacctgggagtgatggatggcgttccctcggctaattaactattcagggtggattttggaacaacacttcattggcttaaggatctgggattggcacaagactctgctaccagcacaaagagcccaatccttcttggcagtctggcccatcagatctacaggatgatgtgtgcaaagggctactcaaagaaagacttctcatccgtgttccagttcctacgagaggaggagaccttctgagtgtccctt

SEQ ID NO: 155461 - DNA, 491 bp, Homo sapiens; identical to SEQ ID NO: 119905
  misc_feature (1)...(491): n = a,t,c or g

SEQ ID NO: 155462 - DNA, 1179 bp, Homo sapiens; identical to SEQ ID NO: 148159

SEQ ID NO: 155463 - DNA, 384 bp, Homo sapiens; identical to SEQ ID NO: 148199

SEQ ID NO: 155464 - DNA, 1741 bp, Homo sapiens
  misc_feature (1)...(1741): n = a,t,c or g
ccggtcgacccacgcgtgcgctgcctctccctcccttcctcaggcattagagttgagacttcagggagaccagagcccagcttgggaggcactgagctagaagccctgccatggcacccctgagaccccttctcatactggccctgctggcatgggttgctctggctgaccaagagtcatgcaagggccgctgcactgagggcttcaacgtggacaagaagtgccagcgtgacgagctctgctcttgactaccagagctgctgcacagactatacggctgagtgcaagccccaagtgactcgcggggatgtgttcactatgccggaggatgagtacacggtatatgaacgactgggcgaggagaaaaacaatgccactgtccatgaacaggtggggggcccctccctgacctctgacctccaggcccagtccaaagggaaatcctgagcagacacctgttctgaaacctgaggaagaggcccctgcgcctgaggtgggcgcctctaagcctgaggggatagactcaaggcctgagacccttcatccaggggagacctcagcccccagcagaggaggagctgtgcagtgggaagccattcgacgccttcaccgacctcaagaacggttccctctttgccttccgagggcagtactgctatgaactggacgaaaaggcagtgaggcctggggtaccccaagctcatcccgagatgtctggggcatcgagggccccattcgatgccgccttcaccccgcatcaacttgttcaggggaagaccttacctcttcaaagggtagtcagtactgggcgcttttgaggatggtgttcctgggaccctggatttacccccgaaatatctcttggacggctttcgatgggcattccncgggacaaacgtgggattgcagccttgggcctcccttgcccattagcttacagtggccgggagcgggtcttatttctttcaaagggggaaacagtactggggagttaccagtttccaggcaccagccccgttcaggaggagtgtgaaggcagctccctgttcggctgtgttttgaacactttgccatgatggcagcgggacagctggggaggacatctttcgagcttctctttctggggggcagaacgctctggctgggttaccagaacagccccagtttcatttagccggggaatgggcacggtgtgccagggccaagtggacggcagccatgggtnggccgcatcttacatcttcagggcatggcaacccggccccttctttggccaaagaaaaaaaaggtttaggcattcgcaaccggcaaaggctaccgttcactaacgggacgcacagccgtggccgctaaccagaaactccccgccggcccatcccgcgccaatgtggctgtcctttgttcttccaagtgaggagagcaacttgggagccaaacaactatggatgactacaggatggacctggctttgtgcctgcccacctgttgaacccattcaagagtgtttttttttttnttttggagacaagtactaccgagtcaatcttcgcacacggcgagtggacactgtggaccctccctacccgacgctccatcgctcagtactggctgggctgcccagctcctggccatctgtaggagtcagagcccacatggccgggccctctgtagctccctcctcccatctccttcccccagcccaataaaggtcccttagccccgaaaaaaaaaaaaaaaaaaa

SEQ ID NO: 155465 - DNA, 444 bp, Homo sapiens; identical to SEQ ID NO: 148203

SEQ ID NO: 155466 - DNA, 1386 bp, Homo sapiens; identical to SEQ ID NO: 148204

SEQ ID NO: 155467 - DNA, 1110 bp, Homo sapiens; identical to SEQ ID NO: 148205

SEQ ID NO: 155468 - DNA, 418 bp, Homo sapiens; identical to SEQ ID NO: 148219
  misc_feature (1)...(418): n = a,t,c or g

SEQ ID NO: 155469 - DNA, 267 bp, Homo sapiens; identical to SEQ ID NO: 147981
  misc_feature (1)...(267): n = a,t,c or g

SEQ ID NO: 155470 - DNA, 477 bp, Homo sapiens; identical to SEQ ID NO: 144632

SEQ ID NO: 155471 - DNA, 1045 bp, Homo sapiens; identical to SEQ ID NO: 148222

SEQ ID NO: 155472 - DNA, 361 bp, Homo sapiens; identical to SEQ ID NO: 148286

SEQ ID NO: 155473 - DNA, 384 bp, Homo sapiens; identical to SEQ ID NO: 148287

SEQ ID NO: 155474 - DNA, 656 bp, Homo sapiens; identical to SEQ ID NO: 148288

SEQ ID NO: 155475 - DNA, 698 bp, Homo sapiens; identical to SEQ ID NO: 148289

SEQ ID NO: 155476 - DNA, 594 bp, Homo sapiens; identical to SEQ ID NO: 148290
  misc_feature (1)...(594): n = a,t,c or g

SEQ ID NO: 155477 - DNA, 602 bp, Homo sapiens; identical to SEQ ID NO: 148291

SEQ ID NO: 155478 - DNA, 1381 bp, Homo sapiens
aattcccgggtccacgatttcgtggaggctcggggtcgttgtggtgcgctgtcttcctgcttgcgtcagggacctgcccgactcagtggccgccatggcatcagatgaaggcaaactttttgttggagggctgagttttgacaccaatgagcagtcgctggagcaggtcttctcaaagtacggacagatctctgaagtggtggttgtgaaagacagggagacccagagatctcggggatttgggtttgtcacctttgagaacattgacgacgctaaggatgccatgatggccatgaatgggaagtcctgtagatggacggcagatcccgagtaagaccaggcaggcaagtcgtcagacaacccgatcccgtggggtacccgtggtggctactgccgggggccggggctttcttcccgtgggggccgaggaccgggcccgtgggttctctagaaggaggaggggaccgaggctatggggggaacccggttcgaagtccaggaagtgggggctacggaggctccagaagactactatagcagccggagtcagagtggttggctacagtgaccggagctcgggcggggtcctacaaagaacagttacaacagtttcgcttcacaccaacgagtaaaaaccctttctgctcaagatcgtccttccaatggctgtgtgtttaaagatttgtgggaagctttcgctgaaccgttaaatgtgtagtaaatgcaccctccttgtattcccactttcgtagtcatttccggttctgatctttgtcaaaacccagcctggaccgtttctgacgccggggatggccttcgtttacttagactttttctttttttaagggaagtgctgtttttttttttttgaggggtttttcaaaacattttgaaaagcatttacttttttgaccacgagccatgagttttcaaaaaaatcgggggttgtgtgggtttttggtttttgttttagtttttggttgcgttgccttttttttttagtggggttggccccatgaagtgggtgccccactcacttctctgagatcgaacggactgtgaatccgctctttgtcggaagctgagcaagctgtggcttttttccaactccgtgtgacgtttctgagtgtagtgtggtaggaccccggcgggtgtggcagcaactgccctggagccccagcccctgcgtccatctgtgctgtgcgccccacagtagacgtgcagacgtccctgagaggttcttgaagatgtttatttatattgtccttttttactggaagacgtacgcatactccatcgatgttgtatttgcagtggctgaggaattcttgtacgcagttttctttggctttacgagccgattaaaagaccgtgtgaaatg

SEQ ID NO: 155479 - DNA, 251 bp, Homo sapiens; identical to SEQ ID NO: 144904

SEQ ID NO: 155480 - DNA, 520 bp, Homo sapiens
ctcagtcatgatttcactttatttgtatcgatgacaatattaactcttcagatttataaaatgacaaaacttgataattacctggaaacaatttattattaactaggttaaccctaaatccatcaagaaaaaccacctaacatattcagtgttaaaaagagacattacgactagcctggccaatatggcaaaaccctgtctctactaaaaatacaaattttagcagggtatagtggtacgtgcctgtaagtcccagctactcaggagggttggaagagaagtaatccaattagacattgaaaaataagagcgccaatttggaaaatcgaatgtctatgatcattttcttccctaaaacagggaagaaagtgaatgtggaaaaatccgattttcagcaatattcgcaggacctaaggcaacaaccaccatgcctggggcaactatactttccaaatcctgaatattaaaaaggttttcacatggtaatcatcttaatattttctgttttttagatgaagtt

SEQ ID NO: 155481 - DNA, 523 bp, Homo sapiens
tccagctcaaaaaagagaaagtaccagattgtacttttaaatctgtctagcgtattgagaattttaatgggagctgttgatttatttctcagggcatacatgttccaatctgtctccattgttgtctctctctttttttttttttttttgagacagtctcgctgtgtccgccccaggagtgcaagtggcacgatctctgctcgctgccgacctctgcctcccagattcaagcgattctggtgccttagcctcctgagtggctgggacttacaggcacgtaccactaataccctgctaaaatttgtatttttagtagagacagggttttgcccatattggccaaggctagtcgtaatgtctcttttttaacactgaatatgttaggtggtttttcttgatggatttagggttggacctagttaataataaattgtttccaggtaattatcaagttttgtcattttataaatctgaagagttaatattgtcatcgatacaaataaagtgaaatctgactgaggct

SEQ ID NO: 155482 - DNA, 820 bp, Homo sapiens
cgctttttttttttttttctttttttgagatggagcttgctctgtcacccaggctggagtgcagtggcacgatcacagctcactgcaacttccgccacctgggttcaagcaattttcctgcttcaacctcccgagtagttgagattacaggcacgtgccaccacacctgactgatttttgtatttttagtagagacagggtttcaccatgttggccaggctggtcttgaactcctgacctcaagtgatccacccacctcagtctaccaaagtgctgggattacaggttgtgagccactgcacccggcctctgtctgacttttaaatgatggagtatcccagaggtcaggctttagagctcttctttcttccatctacagagtgctcatttctttggtgatctcattcagtctcacggctttgaatgttatatgctgataagtcccaactttctctgtctcgcctaaacttcccctaatagcagaacctgatatcaaagtgcctatttgacatctccacttagatatctaataagcatctttaatgtaaaatttccaaaactgagctcctacaattccctcccacacttgttcagttttccccatctaagctaatggcaacttccatccctccagttgctttggccaaaacttttgagttgtcttttgactgctttttttctcccttcttacattgtgctcatcctttctttcaggcaaattctgtttggtataccttcaaatatatctagaattctatacttctcactacccctcattcccattatctttgaaacacactccaatgaggtttctcgtgcc

SEQ ID NO: 155483 - DNA, 1777 bp, Homo sapiens
gctcgacaattgtaaacgatcactatagggcaaaactttttttttttttttttggagatggggtcctgctctgtagcctaggctagagtgcagtggcatgatcagctcactgcaacctcaaactcctgggctcaagcaatcttcccacctcaacctcctgagtagctgggactacaggtgtgtgtgccaccatccccagctacttttataataaaatttctatgtagaaccagagtcttcctatgttgcccagccttggtcttgaactcctggggctaaggccagtcttcctgcctcggcctcccaaagtgctgggaattacaaggcatgagccaccacactcagccttaaaatgaaagattttgtaaaggaattggagcattcaactaaactccgtttttgtgaagatggtcattttggttttaaccctaacatgggtttagagattatttttatggaactctaaggcattctgggttcctcagttttcttcaaaggaaaggaggactttaggcaagtaggcagggacaagctacccccacaccaaaggccacccggcgacaatacctatggaaataagtccggaggccctccctagaatgcagcccaaataggaaactgttccaaacagaatcagtcttgcatacttctgctcagaaggctccctctcgctttggaaactggaatgaggatccacccaacaggaccctccatttttacacaggagttatgagagttacatcctctagcagagatgcttggtcattacctgtggtacatgagattaccgagctaaaagggaaaaaaaacgatcttaatgttctcccaatgaactcaacttaagctttttatggaggcactgaggccatgcagctccttttccaaaagacacagataaaagccaaataaggtagaggactttggaaattttctctgaaaagttaaattccacataatagtaagactgtttgctgagagaaaactgacaagtaaaaactggtttaagagacagacattcaagacaaactgtattggaaatacaataatgaattttggcctgatagccctcatgctgtcttatagcaaaacactaaaattcatgcaacagagaaattggtgacatgaggactttttctccagacttcctggggaaaaactgtgagaatatacttttttcttcttgtttgctttcgaaatgcattctttcttttgctgactttcccaaactttcccagtcgtttctgatgaaaaattcttcaataggaaaagaccaggtaaacttacatgaaagacatccaagtatcttttgagctccttctctctgcccgaggagcaatcaactggattacacaaaactacccttccacaactaaaacaggtagaattggaacaggaattagttgtcattaatatactccgtaataaaataaagcttgttctgaaacccacaaggggtggtaagaagagactgtataaaagctactgggttctcatagaaaatggatacagtatacagaatgtgagaagatacagaactcacactccagttataaaaatagacatggttctcagacaaaaaagcaaatgagtacaaaagaattctccaaaccgtgaactatttttaaaagatacatctatataaaacaacaagatgtcatctcagagctccaaagagtagtttgttgaaatggctgaaaaggggagatgaattggagacagataggtcaagaacccagaacagatgtgtcctactcttgtgtttggcagtgtacattgg

SEQ ID NO: 155484 - DNA, 727 bp, Homo sapiens
tttgagatggagtcttgctctgtcgcccagggtggagtgcagtggcatgattttggctcactgcaacctccacctcctgggttcaagcgattgtccggcctcagcctcatgagtagctgggactacaggcgcccgccaccacgcctggctaattttttgcatttttagtagagacggagtttcacgatgttagccaggatggtcttgatctcctgacctcatgatccacccgcctcagcctcccaaagtgctgggattacaggcgtgagcgaccatgcccagtcccaaatatttttaaaattgcaaatgacaaagtcaatggggttcaaaactaaattcttaaactaagtaaggagataacagacaacatttaaatttgtctttggaaaacaactatgaaatattaccattttctcctatcagatcaagtcagtatttcattctgaaagcaatgtattaacatgtgattttatgaaataatcaaggtataggcaagctctcttgcggagcatacacattaactcaggatcatcctcattgctgttttttttcccccagcacttgtgaggccttgtaggggacagtggattaaatagccttcagggtcaaaacagttccttgacatttggattttaaactcctggtaattaaaattgattgcataatttactcctattacaggtgtgacacactgtgagattcaggattataattctttgctcgtgcc

SEQ ID NO: 155485 - DNA, 662 bp, Homo sapiens
ttttttttttttggagacagagtctcactcttgtcacccaggctggagtgcagtaactcgatcatggctcactccagcctccacttcccgggcccaagggattctcccacctcagccctccgagcagctgggatcacaagcatgcaccaccacacctggccaatttttttttgtagagacacggtttcaccatggtctggtcctgacctccttacctcaagtgatccacccgctgcagcctcccaaagtgctgggattacaggcgtgagccactgcgcccagcccgtaattttttgtaaaaagttagatttcagtagcacagacattttcaccccaagcaatctgcaacccagaggcttctgggacctcacagctcctcaaggtgagatcgtatcaacctgaaaagattcccgactcctgtgcaggagcaatgcagagggagggtgtggagtgttttagcctccttatgatctccatcataccctgccccccgccaagtctctgataaggatagttgcggttttcttaaccttactataagtttatacaacacctataccaaaattctgggcccactctccattcctggctctgtggactccaaggatgccccctccctccagaaaaaggtcatagcctacgtcgctggtgggaacagaact

SEQ ID NO: 155486 - DNA, 514 bp, Homo sapiens
  misc_feature (1)...(514): n = a,t,c or g
gccgtgacggtgcncccctnaaggccccctgtactgccctggccacctaaggcccaaagggaggggagcaagtgggggaccccctggccatggccccctcaggcaaaaacccctattccaccagcggggtgggggaaancaccaccaacaggctccctgctgactccccccttatgggatcctcagtttgcctccctttttaatgggaccctttaatgggagagagagtaacccctcccacagaatgtctgaattcttgcattctttaccccttcccatcactatattgattctttttttaaaaaacatgaacccaaactcccgccctcacttcgtctctacagaatgttcacagcaaaacacgtttggtctgtttttagattcttgaagaattcaatagtctttcaagatgtttaatgtgtttaaagctgggaacctgttgggagttcacaagtgctgcatatactgggtagcaaaagaaaatggaaaaaaacccacaaaacaaatttttaaa

SEQ ID NO: 155487 - DNA, 1624 bp, Homo sapiens
  misc_feature (1)...(1624): n = a,t,c or g
gaggtgcaattcggcccagcagcagatgaccagctcgcagaaggccctgatgctcgagctgaaatccctgcaggaggaaccggtggagggcttccggatcaccctggtggacgagtccgacctctacaactgggaggtggccatcttcggaccccccaacaccctctacgaaggcggctacttcaaggcgcatattaaatttcctattgactacccctattcaccacctaccttcagattcttgaccaaaatgtnggcaccccaacatttatgaggaatgggagatgtatggcatttcgattcttcatccgcctgtaggatgacccacagagtggagaactgccttctgaaaggtggaatcctactcagcaatgtgagggactaatcctattaaggtgttaatctcactggcttaatgagccccaacacctttctccccagccaatgtccgatgcttcagttatgttcagggaaatgggagagacagtaaagggaaaagacaaaggaatatggcttgaaatttattagggaaaccaagttttcagccacttaaggcccgaaggcaggaaaagggtggggagttgaagggtcccccaccaaccctgggcgggaatactgcatcaaaactgaggtgcccctgcaatgacgaacaggtgcagagtttgctttacgacgaacttggtatgatgaccgacattgatgatgaaagatgaggaaggaggaaagatgccgacttgttatgatgatgatgaattctggggaatgaggaagccgtgacgtgctcccttcagtgcccccctgtaactgcccctggcccatcctccaggcccaaagggaggggagcaaaggtggggggacccctggccatgggcccccctcaggcaaaaaaccccctattcaacaagcgggggtggggggaaaaccacaaccacaggctcccctgcctgacctccccccttatgggatcctcaggttggcctccctttttaatgggcccctttaaatgggagagagagtaaccccctcccacagaatggcctgaattccttgcattcctttaccccttcccatcacctatattgattctttttttaaaaaacatgaaccccaaactcccgccttcacttcggtctctaccagaatgttcacaagcaaaaccacgtttgggtctgtttttaagattcttgaagaattcaataagtctttccaagatgtttaaatgtgtttaaaagctgggaaccttgttgggagttcacaagtgctgcatatacctgggtagcgaaaagaaaatggaaaaaaaacccacaaaacaaactttaaaaaaaaaaaaaaaagcaaatttgccaaggtttagctgctcatttacattagtgtgtgtgcattcgttcagccccatggtggtgaatatctgtttctttcctcttcctaaggggctgggacatggtgggcatcaagggactttgtgctaagcctgatgaaatgtgctccttcaatctccatgaaaccatcgtaacatggaggcctcagctgctctgaggagagaaatcagactttgttttttgaaatcgattgggatcgaaagcctgaaataaatattcatactttccatagaactgaaaaaaaa

SEQ ID NO: 155488 - DNA, 1002 bp, Homo sapiens
gcacttgggaaagctggctacattgataatatgtaactgccatgggcatagttgcctttgtattcttccaggtctgggaagtacaacttagacttcagatctcgtaatgacccaggaggcatataaacctgagcagctagtggccctgtacaagtccttcatcagggaaaaacattgagtattccctgattaaggacttgtacagaggactctgttttccctggtgtttctggtgtgtctcaaaaattgtttgactgtgatgacagggaagtttggaagaagttcactgctaatgcatgtctccaggaagcagggaatgatctcacagtgacacttgaggcacattgctgaggccgtcgatgagaattcatgtaactttctccagcttacagtggactagattgacatgcaagctgatccagtccaattggtagggcatcatggtttctcattactcactgacttaaaatacttttattgccatcctggtgaagcactgcactgggtagataacacaggggcaccttgctgatcagagcccttggccaggtacaaagagctcagtttctaaaactctgtcatttcaataatgttataaattgaatcatacagtatgtaattttatgggattcgctttttttctgttgatctctttttttctgagtcatctcagctgttgtgtgtatcaatagttcatttccttttactgttttgtttggtttaactcattgacctattgaaggatatctgggctcattccagtctgtgaataatgctgctgtggacattcatgtgcaagtttttgtgtgaacattaagttttcatttctttaagataaatgcccaggagtgaaactgatgggttctctgtactctccaactgcccaacctgtttatccacaagagagcgcgccatcccacactcccaccgctgcttttctcttcagttcaacctcgctcccctcaattccttcacctacactcttttaacgcatctcctgcc

SEQ ID NO: 155489 - DNA, 1138 bp, Homo sapiens
gggggttttccgggaggcgcgtggggcttgaggccgagaacggcccttgctgtcaccatacatggagactttgtaccgtgtcccgttcttagtgctcgaatgtcccaacctgaagctgaagaagccgccctggttgcacatgccgtcggccatgactgtgtatgctctggtggtggtgtcttacttcctcatcaccggaggaataatttatgatgttattgttgaacctccaagtgtcggttctatgactgatgaacatgggcatcagaggccagtagctttccttggcctacagagtaaaatggacaataatattaatgggaaaggactttgcatccaagcttcctaatttacaatgggaggttttaggttttcataaatcctggacccgatcgaatgcaccaaatatcccaaaacttcaataggattccttcttctgttccattgggatttcgtctgtggtcctattggagttttttccatgggctagaagtaattccatgaggaatggaaactgcccggggctaatctgatggggttagagtgccctttgagaagaaaatccagtggatacctggatttgctcctggtcaatgaaagttttaaaaggctgtaccaatccctctaatatgaaatgtgggaaaagaaatgaagagcagcagtaaaaggaaatatctagtgaaaaaaccaggaagcggtattgaagcttggactagaatttcttcttgggtattaaagagaccaagtttatcaccaggaattttttttcctgctggcctaattgcctatacccaatgatgtttgagtggcattttctttttagtttttcattaaaatatattcccatatcctacaacgtataatatcaaataaagtgattattttttacaacccccctcttaacattttttggagatgacatttctgattttcagaaattaaacataaaatccagaagcaagatttccgtaagcttgagaactcttggacagtgatcagcttttacctattggtgctttgcctttaacttagagtgtgtgatggtagattatttcaagatatgtatgtaaaactgtttcctgaacaataagatgtatgaacggagcagaaataaatactttttctaattaataccttt

SEQ ID NO: 155490 - DNA, 900 bp, Homo sapiens
tttttaaagagacagcgtttcggtcttgttgcccaggctggactgtaatggcacaatcttggctcattgcaacctctacctcccgggttcaagtgattctcctgcctcagcctcctgagtagctgggattacaggcacctgccaccacacccgcctaattttttgttatttttagtggagacagggttttaccattttggccaggctggtctcaaactcctgactgacctcaggtgatccacccgccttggcctcccaaagtgctgggattataggtgtgagccaccgtgccgggcctggactttgtactttttcaaatcatatttaattatttcttgatctttactcaaagaattattctgcgctaaatttgcaacattaaacaataattaagcctggatccgataagttattgggtgactaggaacctacaacacaatttatttttaatttaaactcttcaagtctggattaaacttggggggggaaaaactgaacattcagggtgatatttttaaattttctttgtgactaaatagatgtcattaatatcatgcttcatcttactgtgcatagatgacccatggcacacaaagtatatgtataatattgcaatattgtacttccatctttaaaagtatgccaaagacttcataatgaattcaccatatttaaggaataaggcaaattaatgtttatccgaaatcaaaatgagattggataattcctggaatctgatttctgtaagtttcagtcctaaagggaccttaaatatctactagaacgaagtacagtgtatttctcagattacatgacattagtcaaccaatttagttgtaacacaaagtgagaaagccttaggtgttgaaggagtgtgaaaataaaaatctcttttcatgc

SEQ ID NO: 155491 - DNA, 910 bp, Homo sapiens
cggacgcgtgggttttaatgtgcgctgggacagaaacgacacaaacttaattcctaatggaagtagcataactgtcaaccagactaacaagagagactatgtttctaagtatatcaattacattttcaacgactctgtaaaggcggtttatgaagaatttcggagaggattttataaaatgtgcgacgaagacattatcaagttattccaccccgaagaactgaaggatgtgattgttgggaaatacagattatgattgggaaaacatttgaaaagaatgcacgttatgaaccaggatataacagttcacatcccaccatagtgatgttttggaaggctttccacaaattgactctggaagaaaagaaaaaattccttgtatttcttacaggaactgacagactacaaatgaaagatttaaataatatgaaaataacattttgctgtcctgaaagttggaatgaaagagaccctataagagcactgacatgtttccagtgtccctccttccctcccctaaatattcctacaatggaaacagttgaaagaagcgcttcaagaagcccatcaacaacaacagagggatttggctgaccagcttgccttgtcccaacagccttattttgttgttgttatcgttgttgttgttgttgttgttgttgtttctctactttgttttgttttaggcttttagcagcctgaagcccatggtttttcatttctgtctctagtgataagcaggaaagagggatgaagaagagggtttactggccggttagaacccgtgactgtattctctcccttggatacccctatgcctacatcatattccttacctcttttgggaaatatttttcaaaaataaaataaccgaaaaattaacataaaaaaaaaaaaaaaaaaaaagatt

SEQ ID NO: 155492 - DNA, 525 bp, Homo sapiens
atctcacatgatgctattgctcaagagtctaaacgatattggcagaatttggaagcaaatgtacctggagcgcaggtacttggtaatcaaataatgcctggatttcttaatatgaagataaagtttgtgtgccgcccccagtgtcctgagaaacggtccaagtccattgaaccagacaaaaacagaaaatattgtagtgcaaaagcaaggcattcgtggacccaaagaccggcgtgcgatgagagtgatgtcctattgaacgtaagaagtggatgaacatccgtcctctccccacaaagaaacaaatgcctttacagtttgatctgtgcaaccatattgcttctgggaaaaaatgtcaatatgttggaaactgttcctttgctcatagtcctgaggaaagagaagtttggacttacatgaaggagaatgggatacaagatatggagcaattttacgaactatggctcaagagtcaaaaaaatgaaaaaagtgaagacatagccagtcagtcaaacaaggaaaatg

SEQ ID NO: 155493 - DNA, 2183 bp, Homo sapiens
acagttcggcagacgctcatacagacacagtaccgttgatcgtattcaagaatgcattctccgtgatggaggttttcttggttcctggctcataattcttagggaagtctgcgttctgctgatcacgatcactttattgtcctaccagtatcactgtatgtactttgttaaataaaaatacaaataacctgaagaggtattatttgaaagctgtgtaactccatggtatggctagtgtgataattgtcttctgataatgcatatgtagtgaattatggccgaggttagtttccagtactggttataagtaagttaaatttctgaaatgttttgggcactgttcagtaacctttggagtagcttgcagtgtctttactgctttcaagtgctgatgtggaggaatcattagtgttgggcagggaaacaggagctgtcagactgagagggccagggatgttcattgtggagattaaatgttctgagtaagtgagtttgtagacattttcttgtaagaaaatgttccatgctttactctgttttggacattttcttttgaaaaattttgagatagaaaccttaatatcatttcatatatttagagcatatagttaatttgagtagagtcaaattaatcttactttagaatttgattactaagtattagcatggataataatgcttcttttgcttaaatgtaaaaattaggccgttttactaggtgtactttgtcttaatcatattcctatttttttatacagctgtgcaaccatattgcttctgggaaaaaatgtcaatatgttggaaactgttcctttgctcatagtcctgaggaaagagaagtttggacttacatgaaggagaatgggatacaagatatggagcaattttacgaactatgggctcaagagtcaaaaaaatgaaaaaagtgaagacataggccagtcagtccaaacaagggaaaatgggaaaaccaaattcacatggccaacaggattatggctggaaggttacagtgggacttttcactggctgggatgtgtgggggaaaaactggcaacagtgagaagcagtggcagggccacatctcctccgagaagcacaaagagaaggttttccacaccgaggaccgaccagtactgctggcagcaccgcttcccaacaggctatttcagtatttgtgataggtatatgaatgggcacctgcccaggaaggaaacagctgtaaattttgcacatgggaaatgcccgaactttcatggaatggggaaggaaaggaaggagattgcccttaaaggtggaagcttcaacaaagcaccgaaaagatcacttaattggcccaaaatgataatgactttgggaaaatatagttttttgtttaaagatttaaactaatatgctggcttttatggtatgatacctaatcagagcattgaccagaaaaatttgaagtgttctgaggcacatagcagaggagctgccagatttcctgcttgtattggcgtatatcgttcctcctgagcagcaacccacagtaggtagggaaattggggctgttttcaacagggcttggccaaacggttctcaacgggaaccactgggcattcaggatgggtggaagtggactgctaacccggttgccattctgttggaacagaacttttgggatggaagtgtgttgggggaaggaggataagggttatattctagggacaaactctttggagttggtcctttcatataaggattcgtggacggtaaagagaataaacaacttgtactggggatcaggaataacatggatgggatggaaattctttaacatgttttagcaggaatggaatttgtttaatataataaagtttgcctacttatcctgtatgtaggttgcctaaaaaggattttccttaactcagattttaagcccaaataacccatttaaccctagtatttggtaaaagggggtatttttctgtatttgtatgtttcactataataagggaattaaggataatgtgcattgagaatattttgaaaaataattgacgtcgaaattttatttcttgggtcttttgctgtttaaatgatgattttgaaagattaaaccgtgtactgttggtattgtgttaagtgtatggaccaatactgcctgtaataaagattttatatatagaaaaaaaaaaaaa

SEQ ID NO: 155494 - DNA, 421 bp, Homo sapiens
cggggcctccctttgtgtgtgtggccccgctggtagggaccccagtgccgctgactggcaagacacactgggagcacccaccattctgtgcggcccccagcagccatctcaaccacctatccctgcgctcccttgaatgggaagaagccccacgttgtccttgaattcctttttcactttgcatctcttcacgtgcaggctgggaccagcggagacaccgcggcgaatgcagatgactgcaccagcctcccacaacccagacacttgcgttcacaagcaacctaaggggcaggtgaagaagcgcagccctgccagacgcgctagattcctctaaggtctctgagatgcaccgttttttaaaaaggcgtggggtgaactgattttgatcttcttgtctagatgcaataaataaatctgaagc

SEQ ID NO: 155495 - DNA, 879 bp, Homo sapiens
atggtgatcatggagcgtagcaagctctcagagctggccgccagcacctccgtgcaggagcagaacaccacggacgaggagaaaacacagcctgtgtctctgctccccattacaataaagctgcttcatgatctctctccacttcctctcctccggaatatcctggcaccagaatttcttctgccaggaacccatgtggcccaacctgagagcttgacagaatctaaagagttggaagattctaggggattttcaagtctcactgcccacccagtcttggtgtggttcccaagaggtgccttcaagactggctcagcctccatctttgatgggtccgccctggctgcctatgatgacgtgctggttgtggtcgtccagtaccggctaggaatatttggtttcttcaccacaggggatgaacacagcccggggaactggggtcacctggaccagctggctgccctgcactgggtccaggacaacattgccagctttggagggaacccaggctctgtgaccatctttggagggtcagtgggaggagaaagtgtctctgttcttgtgatggtgtggatccacagaggggggctgatggtgggcaccgcatcaacctctgatgggcgggtactcgcagcccatgaaaacgtggtggtggtgaccattcagcactgcctgggcatctggggattcttcagaaaccccaatggggaagggctgccccactggccagagtacaaccagaaggaagggtatctgcagattggtgccaacacccaggcggcccagaagctgaaggacaaagaagtagctttctggaccaacctctttgccaagaaggcagtggagaagccaccccagacagaacacatagagctgtga

SEQ ID NO: 155496 - DNA, 639 bp, Homo sapiens
ctagtcaggagtggcaggaaaggacgccgacgagtgttcagcctgtcggaggccgacagtcatggcggccactgggtttagtgctccgaacggcagctgccacggcacctcacgcacagtcaattcaggcaggtctcccctgtgagccgctcgggccgcgacgtccactcgccacgctgcatttccacagtcggcagggtccgcgcttcgcgacagtccttctgagccagacctgtacagcctggaaacgctgtccttctctgtgacgtgtgcaccagtgtcaggctcggcccgggccagaagcagatgctctggccacagccacgggatgtctgtccgctgcttatggaaacgtggccttcctgaatgtcccattaccccctcggctctgtctccccagcccgtggccaggaagtcagacttttctccaaatccctcatttcctgagcctggcctcaacttgtggccctgccttggttggatacccttgtagatcaagttcaggaagcagttcttaaacaacaacaaggccatgtcataggtgatgggtaagaagaggttattttttcccttgacatttgctattttgtgtttcagagcctttgcaggcgatttcttgggcctggtgaactcatgcat

SEQ ID NO: 155497 - DNA, 417 bp, Homo sapiens
tcagatagtggaggggcttaatagggccacataactgtcaaaggccatggctatgagcagcaccatctccacaccaccaatgacgtggatgaagaagatttgagcgatgcagcctccaaaggagatgactttgcgctttctgaacaggtcataaatcatcttgggagaagtgacagagcaggctcctaagtcaatgaaggagagactggtactttgtcttgcaggcttcgccgtggcccagtgcataaaccagcacagctccccgtccctgtcctcacagtcgccaccctccgccagcgggagccccagcggcagcgggagcaccagccactgcgactctggaggcaccagctcgtcctccacccccaggcattctctgagcttcccagacacatcatttttagcttttcttaatgt

SEQ ID NO: 155498 - DNA, 616 bp, Homo sapiens
  misc_feature (1)...(616): n = a,t,c or g
ggctggggagtggtcaagtntgcaggcctattgcaggacatgcaggtgactggcgtgaggaccgacagcggtgccctgaacatcaccatccacaagcttgcgtccagcccccattccaagccattccccatcttccaggccacgttcatcttctcagaccacatccgttgcatcatcgccgagcagcgcctggccaaaggccgcatcccaggcaaggcgcatgaagatgcagagaatagctgccctccctggacctcccaatccagcccaccactgaagtcctggggtttggactcggctcctccacctccactcagcacctgcctttccgcttctacgaccaggggcgccggggcagcagcgaccccacagtgcagcgctccgtgtttgcatcggtggacaaggtgccaggtgagccagccccccgccctgcgccacagctcgttcatcatggtgggcgttcaaggtctttctctctgtggagcctgtgtgagctgcccttcctctctcagaagccccgtcggctggcagcaccagcttcttagaatttgtcaaagcacagcgcaagattaaacacaacacccccccataaattttggctttaccctttaaaaaa

SEQ ID NO: 155499 - DNA, 990 bp, Homo sapiens; identical to SEQ ID NO: 122886

SEQ ID NO: 155500 - DNA, 2780 bp, Homo sapiens; identical to SEQ ID NO: 122887

SEQ ID NO: 155501 - DNA, 6687 bp, Homo sapiens
ccggaacctgctagtggagaccatccgttccatcactgagatcctgatctggggagatcaaaatgacagctctgtatttgacttcttcctggagaagaatatgtttgttttcttcttgaacatcttgcggcaaaagtcgggccgttacgtgtgcgttcagctgctgcagaccttgaacatcctctttgagaacatcagtcacgagacctcactttattatttgctctcaaataactacgtaaattctatcatcgttcataaatttgacttttctgatgaggagattatggcctattatatatcgttcctgaaaacactttcgttaaaactcaacaaccacactgtccatttcttttataatgagcacaccaatgactttgccctgtacacagaagccatcaagtttttcaaccaccctgaaagcatggttagaattgctgtaagaaccataactttgaatgtctataaagtgtcattggataaccaggccatgctgcactacatccgagataaaactgctgttccttacttctccaatttggtctggttcattgggagccatgtgatcgaactcgatgactgcgtgcagactgatgaggagcatcggaatcggggtaaactgagtgatctggtggcagagcacctagaccacctgcactatctcaatgacatcctgatcatcaactgtgagttcctcaacgatgtgctcactgaccacctgctcaacaggctcttcctgcccctctacgtgtactcactggagaaccaggacaagggaggagaacggccgaaaattagcctgccggtgtctctttatcttctgtcacaggtcttcttaattatacatcatgcaccgctggtgaactcgttagctgaagtcattctgaatggtgatctgtctgagatgtacgctaagactgaacaggatattcagagaagttctgccaagcccagcattcggtgcttcattaaacccaccgagacactcgagcggtcccttgagatgaacaagcacaagggcaagaggcgggtgcaaaagagacccaactacaaaaacgttggggaagaagaagatgaggagaaagggcccaccgaggatgcccaagaagacgccgagaaggctaaaggtacagagggtggttcaaaaggcatcaagacgagtggggagagtgaagagatcgagatggtgatcatggagcgtagcaagctctcagagctggccgccagcacctccgtgcaggagcagaacaccacggacgaggagaaaagcgccgccgccacctgctctgagagcacgcaatggagcagacccttcctggatatggtgtaccacgcgctggacagcccggatgatgattaccatgccctgttcgtgctctgcctcctctatgccatgtctcataataaaggcatgggatcctgaaaaattagagcgaatccagctccccgttgccaaattgcggccgagaaggaccaccttacaaccacccgttaggttgaaagattcattcagggttcatggaacaacgtttgcccagccagatgggaagatccggctgggcgacgctgggagcttgaggttgccttgtttcttgaaggcagcaagtcctgatgagtgctggctgcatcatgaaggacgtgcacctggcctgcctggagggtgcgagagaagaaagtgttcaccttgtacgacatttttataagggagaagacatttttttggacatgtttgaagatgagtataggagcatgacaatgaagcccatgaacgtggaatatctcatgatggacgcctccatcctgctgcccccaacaggcacgccactgacgggcattgacttcgtgaagcggctgccgtgtggcgatgtggagaagacccggcgggccatccgggtgttcttcatgctgcgttccctgtcactgcaattgcgaggggagcctgagacacagttgccgctgactcgggaggaggacctgatcaagactgatgatgtcctggatctgaataacagcgacttgattgcatgtacagtgatcaccaaggatggcggcatggtccagcgattccttgctgtggatatttaccagatgagtttggtggagcctgatgtgtccaggcttggctggggagtggtcaagtttgcaggcctattgcaggacatgcaggtgactggcgtggaggacgacagccgtgccctgaacatcaccatccacaagcctgcgtccagcccccattccaagcccttccccatcctccaggccaccttcatcttctcagaccacatccgctgcattcattcgccaagcagcgctttgccaaaggccgcatccaggcaaggcgcatgaagatgcagagaatagctgccctcctggacctcccaatccagcccacaactgaagtcctggggtttggactcggctcttcaacctccactcagcacctgcctttccgcttctacgaccaggggcgccggggcagcagcgaccccacagtgcagcgctccgtgtttgcatcggtggacaaggtgccaggcttcgccgtggcccagtgcataaacgagcacagctccccgtccctgtcctcacagtccccaccctccgccagcgggagccccagcggcagcgggagcaccagccactgcgactctggaggcaccagctcgtcctccaccccctccacagcccagagtccagcagtcaggagtggcaggaaaggacgccgacgagtgttcagcctgtcggaggccgacagtcatggcggccactgggtttagtgctccgaacggcagctgccacggcacctcacgcacagtcaattcagatgcccccatgagtccagaactgcctaagcctcaccttcctgaccagttggtaatcgtcaacgaaacggaagcagactctaagcccagcaagaacgtggccaggagcgcagccgtggagacagccagcctgtcccccagcctcgtccctgcccggcagcccaccatttccctgacccttgtccccccagttgacccccacagcctccgcagcctcaccggcatgcccccgctgtccacgccggctgccgcctgcacagagcccgtgggcgaagaggctgcatgtgctgagcctgtgggcaccgctgaggactgagtcagtgccggggcctccctttgtgtgtgtggccccgctggtagggaccccagtgccgctgactggcaagacacactgggagcacccaccattctgtgcggcccccagcagccatctcaaccacctatccctgcgctcccttgaatgggaagaagccccacgttgtccttgaattcctttttcactttgcatctcttcacgtgcaggctgggaccagcggagacaccgcggcgaatgcagatgactgcaccggccactcagggagctgcctgggctccgtgtctctgagccccgggtggcaggacccaccggcacctctttcttcctctgtcatatggctcctctgtcaccagccccagtgtgcacagaagaattggaccaggtcactgtacgtagaaatttgtagaaaagcagacttagataaacatctcctttggatatttatttccgcttttggcagcaggtgaacatttatttttaaaacttctatttaaaagaagtccaaaaacatcaacactaaggtttgatgtcatgtgaaaagtgtaataataacagttaagatttcatgatcattttcactggacctttcctgatattttgtttcagagttcttagtgtggctttttccatttatttaagtgattctttgttactcactaactctgcaagcctgtggaataatgaagtaccttcctggaaagtttggattattttttaaacaaaaacaagggagatacatgtattctcaggtacacacagagctgagagggctgaatggttttctgctatagcagccgagaggcctcccatcatggaaagatttctccaggaaaaggaggaatgtagccagctccccactcaggacgcttcctcatttctcttcaccaaaaccaaacagagacagcttccagcaccttcttcagtgttaccatctctaagaaggaaccagttgggaccgtgaagactcccgaccctgtggccatgatggaaatcaaaggaagacaccctctacgtcacctgccctcgactgtgtgtgcccacatgtgccgagagatggcccagagccagttcccctccagctgcaagggcatggtgtccccagagctctgagtctgtcactctccctctgctactgctgctgatctgaatatggaaaccccatggttcccttccccattcggactgggtgtgtacaagcaaggacccagatgcatcagacacagcccccaagatgttcctttctactcggccagctcgggagccagacacagcactcacagcccaggccgtgatccaccctccccaagtccaccagggccagcggcccctcacctctctggtcactggtgagaccttccacaactttcctccagacctgccagcagatgtgcccaccaggggcattaggtatccgccggagcctggccatagggtagtctcgggagccgcgctgagatcttttgccacctgcattttagaagaacatggtctctgtctcctcggcccagccagctgtcccggcaaggcctgccgagggcagttttcaacctcatgaaggaaacacagtcctgccaaggagggggagtggcgcccatggggacaggcctcagtccttagaagccctctgggtagctgtgcccacccagccttcatggctgcaggtacaaggacctttgcttccatagagaaaacgcacagctcagaaagggggccacatgggcagaaacccaaaggaaggacaaaccacgaccaccgtggccatctggcagaatccctggaagaaaacgaaggcagggtggagcggggggaagaccatcatggagagaaggaccacagcatcaggagacgggacacgccacacccagcaggcagcctgtgtgttgcttaattttttaagagcaagaggggtagagaggatcaagctggccctggctggagatggctagcccctgagacatgcacttctggttttgaaatgactctgtctgtggggcagcagaaactagagaaggcaagtggctgccccaccccaaggcgtgaccaggaggaacagcctgcagctcactccatgccacacgggtgggccaccaacctgctgtcagaagactctgggctccaactggtcttgtaaccactgagcactgaaggagagaggtcttggtcagggctggacagcatgcccgggaggaccaccataggattaaaggtgactgggaggaccagcggaggataaaagacactgctcagggcagggcttctaccctgcatccctggccaagaaaagggcagtccccatgtgggcttgcagggtcactctcaaggggcctcttttcagctggggctgggcaacttgcgtctgggggacacctccaggtttgtggggtgaggattttcctataaaccagggctcccagaagctttgcttatgtaaggaagttttgggagccagcccattggaggccaccagccattttggcttcaaaggaccccacctcacccaggtctcagcggcagcgggcacagctatgtcttcaggagctcccgtcaaacctcatagctggggcgctcccagacaggccagtccagacaggacacgctgggcccctggcatccagaggaagagccaggagtgtgggaaggcccacagtgggggctgtggcttctgacactcaggtcatagcctcagaggtctgaggtcagcccccacagacccatccggcccgccccccaagtccctgcagagagcacttatagttatggcccaggccctggtccaccccttcccctgtgcacctccggctgggtttgccaagtcagggagcagggctggccgcaggaactcccaaaccttggctttgaatattgttgtggaaggtgtgcctcgtcccctttctggaacgtgcaaaggtaacctgtccccagcaggtcagattggggccaagctgaggcgctccccccaggcaggaaagggccaagccttcaccatcgacgtgggatttgggaggagggggcctccgtgagcagcccctcctctggccgctgtcccagcccagtccctctcccggagccttggcagcctcccacaacccagtacacttgcgttcacaagcaaccctaaggggccaggtgaaagaaaccgcaagcccctgcccagaacgcgcctagaattccctctaaggtcctctgagatgcacccgttttttaaaaaagcgcgtggggtgaacctgattttgatccttccttgtcctagatgccaataaataaatctgaaggcatttaatgttagtcaactttgacattggggcctacactgttacggagttccttatgtttcccttgagcctaaaaatatgtaaaataatttttgtcccagtgaggaaccgaggggttaggaaaacctcggtggcctttgaggcctcggggaccgctctagggaagtacctgctttcgcccagcatgactcatgcttcgtgggtactgaacacgagggtggaaatgaaaactggaacttccttgtaaatttaaacttggcaataaaagagaaaaaaagtt

SEQ ID NO: 155502 - DNA, 2215 bp, Homo sapiens
aaattatgcataccctggagttcttctgattggcactgactcccacacccccaatggtggtggcctaggaggcatctcgattggagtagggggtcgtgatcgtgtggatgtcatggctgggatcccctgcgagttgaagtgtaccaaggtgattgcgatgaagctgacaggctccctctctggttggacctcacccaaagatgtgatcctgaaagtggcaggaatcctgacagtaaaaggtggtacaggtgccattgtagaataccatgggcctggtgtcgactccatctcctgcacgggcatggcaacaatctgcaacatgggtgcagaaattggggccaccacatcagtgttcccatacaatcacaggatgaagaagtacctgagcaagactggccgagcagacattgccagtctacgtgaagaattcaaggatcacctagtgcctgaccctggctgccagtatgaccaagtgattgaaattaacctcaatgagctaaagccacatatcaatggaccttttacccctgacttggctcacccagtagcagaagtgggcactgtggcagagaaggaaggttggcctctggacatcagagtgggtttgattggcagctgcaccaattcaagctatgaggatatgggacggtcagcagctgtggccaagcaggcactggcccatggactcaagtgcaagtcccagttcaccatcacaccaggctctgagcagatccgcgccaccattgagcgggatggctatgcacagatcctgagggatgtgggaggcattgttttggccaatgcctgtggcccttgcattggccagcgggacagaaaggacatcaagaagggggagaagaatacaatggtcacttcctacaacaggaacttcacaggccgcaatgacgctttccctgagacccatgcttttgtcacatccccagagattgtcacagccctggccattgcaggaacccttaagttcaacccagaaaccgacttcttgacaggcaaggatggcaagaagttcaagctggaagctccagatgcagatgagcttccccgatcgagctttgacccagggcaggacacctaccagcaaccccccaaggacagcagtgggcagcgggtagacgtgagccctaccagccagcgcctgcagctcttggagccttttgacaagtgggacggcaaagacctggaggacctgcaaatcctcatcaaggtcaaagggaagtgcaccaccgaccacatttctgctgcgttcccctggctcaagttccgtggacatctggacaacatctctaataacctgctcattggtgccatcaacattgaaaacggcaaggccaactccgtgcgtaatgctgtcacccaggagtttggccctgtgcctgacactgctcgatactacaagaaacatggcatcaggtgggtggtgattggagacgagaactatggtgaaggctcaagccgggaacatgcagcactggagcctcgccaccttgggggccgggccatcatcaccaagagctttgccaggatccatgagacgattaagaaacagggcttgctgcccctcacctttgctgacccctctgactacaacaagatccatccagtggacaaactgactattcaaggcctgaaggactttgcccctggcaagcctctgaaatgcatcatcaagcaccctaatgggacccaggaaaccatcctcttgaaccacaccttcaatgagacccagatcgaatggttccgtgcaggcagtgccctaaacaggatgaaggagctgcagcaataaggaaggtcccggcaagctggctgtcatgtcccactctggacccactctggaccctgctggatgtcagaagtacaggtccgtgtgcatcctcagagccagagctggtctatccagcatggcctagctctgagatgacgaccagacctgcttcctgctctctccatcctcagccactgagtgatccaccgtggagggcacttgagattaagtcccagcccctgcctttcagcttggttcttccttcaaaaatgccatgcaacctgtatttatttttaatgacagcactccctctaaaaaaaagttttcatcctgcctgatcatttcactggtggctgaaggattttagagaacctttgttctcataagaaaaaaaaaaagccaaatccattgacaaaaaaaaaaaaaaaaaaa

SEQ ID NO: 155503 - DNA, 1240 bp, Homo sapiens
gttagtgagagatatcttaggatatctggccctagacaaagacaaggaagggggccgactcaggaagtcagaggccaaaagctcagagagggggctacacggggcctcacagtgagcaggcagagagggtctgaggtgattggactttttctgctttgagaaacaaacagaaccagggctgaacccaagtcctggcccagccgggtgaaaggactctggcaacccccttggtggcttgggtggggcagagggtgcttcccaaggaagggggcgccttgagcttcacagatgcatcttgtgtggggcccggaggccgtccctgtctcacccaacctcccttccacacacaccttgcctctgccaagcaccaatgggtggcttctgtcttctttgccactgcaaacaaccacgtgcctctgtcccctcgggggcctcgtttgggtctcattcacgcaggcttcacttgcccttaggcagcaggcgaggaagggcccctccagcccctttaccgggagcctcaggatgcccaggcgccaggtgggtgaggccaggcaggtagggccagacaggtgaggtcggtgccctcctctgccttaataaccttacccccgcttgcctgacagaaacatggcaatcaaggtgggtggtgatcggagacgaagaactacggcgagggctcgaagccgggagcatgcagctctggagcctcgccaccttgggggccgggccatcatcaccaagagctttgccaggatccacggtgagctggagtctgtacccaggccatcctcatcccatccatagtgatcaaggtcactctccctgcccgtggctgagttgggcctggttctaggctgtgtccactgcagcccacaggcccgtcagcctcttgccccttcttaggctcacacagtgcacatccgacgctcagcttcccggcttcccgcaggccctgcttccaggcttgtagatctgagccgctgagatctaggacatgtgccagggggttctttctgatcatgaatgtgcagcaggaaggcctcgcagacctcagcaccagcgcacacttgctaggggcacccctagtgaaagggagcagaccagggccccatagtcactgcccgggcattgtcccaggcagcaggattaggggcatctcccagagccccagatgggttcagaaaatgaagctctccaggctagtcaggcccccgatgaccgaatgccgcctgctttcccc

SEQ ID NO: 155504 - DNA, 2763 bp, Homo sapiens
catctttgtcagtgcacaaaatggcgccctacagcctactggtgactcggctgcagaaagctctgggtgtgcggcagtaccatgtggcctcagtcctgtgccaacgggccaaggtggcgatgacgcattttgagcccaacgagtacatccattatgacctgctagagaagaacattaacattgttcgcaaacgactgaaccggccgctgacactctcggagaagattgtgtatggacacctggatgaccccgccagccaggaaattgagcgaggcaagtcgtacctgcggctgcggccggaccgtgtggccatgcaggatgcgacggcccagatggccatgctccagttcatcagcagcgggctgtccaaggtggctgtgccatccaccatccactgtgaccatctgattgaagcccaggttggggacgagaaagacctgcgccgggccaaggacatcaaccaggaagtttataatttcctggcaactgcaggtgacaagtatggcgtgggcttctggagccctggatctggaatcattcaccagattattctcgaaaactatgcgtaccctggagttcttctgattggcactgactcccacacccccaatggtggcggccttgggggcatctgcattggagttgggggtgcagatgctgtggatgtcatggctgggatcccctgggagctgaagtgccccaaggtgattggcgtgaagctgacgggctctctctccggttggacctcacccaaagatgtgatcctgaaggtggcaggcatcctcacggtgaaaggtggcacaggtgcaatcgtggaataccacgggcctggtgtagactccatgtcctgcactggcatggcgacaatctgcaacatgggtgcagaaattggggccaccacttccgtgttcccttacaaccacaggatgaagaagtacctgagcaagaccggccgggaagacattgccaatctagctgatgaattcaaggatcacttggtgcctgaccctggctgccattatgaccaactaattgaaattaacctcagtgagctgaagccacacatcaatgggcccttcacccctgacctggctcaccctgtggcagaagtgggcaaggtggcagagaaggaaggatggcctctggacatccgagtgggtctaattggtagctgcaccaattcaagctatgaagatatggggcgctcagcagctgtggccaagcaggcactggcccatggactcaagtgcaagtcccagttcaccatcactccaggttccgagcagatccgcgccaccattgagcgggacggctatcgacagatcctgagggatctgggtggcattgtcctggccaatgcctgcgggccctgcattggccagtgggacagaaaggacatcaagaagggggagaagaacacaatcgtcacctcctacaacaggaacttcacgggccgcaacgacgcaaaccccgagacccatgcctttgtcacgtccccagagattgtcacagccctggccattgcaggaaccctcaagttcaacccagagaccaactacctgacgggcacggatggcaagaagttcaggctggaggctccggatgcagatgagcttcccaaaggggagtttgacccagggcaggacacctaccagcacccacccaaggacagcagcgggcagcatgtggacgtgagccccaccagccagcgcctgcagctcctggagccttttgacaagtgggatggcaaggacctggaggacctgcagatcctcatcaaggtcaaagggaagtgtaccactgaccacatctcagctgctggcccctggctcaagttccgtgggcacttggataacatctccaacaacctgctcattggtgccatcaacattgaaaacggcaaggccaactccgtggggcaatgccgtcactcaggagtttggccccgtccctgacactgcccgctactacaagaaacatggcatcaggtgggtggtgatcggagacgagaactacggcgagggctcgagccgggagcatgcagctctggagcctcgccaccttgggggccgggccattcatcaccaagagctttgccagggatccacgagacgaacctggaaggaaacagggcctgctgccttttggacctttcgctggacccggctgactacaacaagattcaccctgtgggacaagctgaccattcagggcctgaaggacttcacccctgggcaagccccttgaagtgcatcatcaagcaccccaacgggaccccagggagaccatcctcctgaaccacaccttcaacgagacgcagattgagtggttccgcgctggcagtgcccttcaacagaaatgaaggaacttgcaacagtgagggcagtgcttccccgccccgccgctggcgtcaagttcagcttcacgtgttgccatcagttggatccgattccttccagccatggcttcctattccaagatggtgtgaccagacatgcttcctgctccccgcttagcccacggagtgactgtggttgtggtgggggggttcttaaaataactttttagcccccgtcttcctattttgagtttggttcagatcttaagcagctccatgcaactgtatttatttttgatgacaagactcccatctaaagtttttctcctgcctgatcatttcattgggtgggctgaaggattctagagaaccttttgttcttgcaaggaaaacaagaatccaaaaccaaaaaaaaaaaaaaaaaa

SEQ ID NO: 155505 - DNA, 408 bp, Homo sapiens
cagccccccggggttcttggatggtggtggcggaggaccctgcgtgcagtgtgacgctctgtcctgaatcccttagcgggtacctaccaggaggatcagggcaaggtccctctccagctgcaggtgaggcctgcggaactcagcttggatggcagcctttggtgggccgctgtggcccgcacgtctctgttctctccaagtaacatgcgacggtgtctggtgtcacgtctcgcctgagaagcccgtcttaggaaagcttagcttgaacacagtgctcgggaggaagatccagaaattgtgaacaatgtttgatttagtagcgtgacttgcctttccctttaaaaacatcttttacaaatctgtcttggaataaagtctattttctgccttttggtttttaaaaaaaaa

SEQ ID NO: 155506 - DNA, 453 bp, Homo sapiens
  misc_feature (1)...(453): n = a,t,c or g
ccttcacctgcttgggcggcccggtcccgggaccactggcactcttggcnagaggccagcgcgtggccagccccccggggttcttggatggtggtggcggaggaccctgcgtgcagtgtgacgctctgtcctgaatcccttagcgggtacctaccaggaggatcagggcaaggtccctctccagctgcaggcaccagccccagcctcccaccacgctcactgcctggcttggaaaagttaagaagcccctcaggaagagaatcgaggctaagttcctctgcgccgagggccccgagcatatccgccaaggctcagctgcagtgccaggcggaggaggaagatccagaaattgtgaacaatgtttgatttagtagcgtgacttgcctttccctttaaaaacatcttttacaaatctgtcttggaataaagtctattttctgccttttggttttt

SEQ ID NO: 155507 - DNA, 465 bp, Homo sapiens; identical to SEQ ID NO: 147699
  misc_feature (1)...(465): n = a,t,c or g

SEQ ID NO: 155508 - DNA, 1856 bp, Homo sapiens
cattcgtggtggacttcgacagacctcatgagacacgggtgctgcaagtctcctgcggccgagctcactctcttgtgttgactgacagggaaggagtcttcagcatgggaaacaattcttatgggcaatgtggaagaaaggtggtcgaaaatgagatttacagtgaaagtcacacagtccacaggatgcatgacttcgatggccaggtggaccaggtcgcctgtggtcaggatcatagtctgttcctgacggataaaggtagaagtctattcttgtggatggggtgctgatgggcaaacaggtctgggtcactacaatatcaccagctcgcccaccaagctgggtggagacctggcgggagtgaacgttatccaagttgccacctacggtgattgctgcctggccgtgtccgccgacggaggacatttttggttggggaaacctcgagtacctgcagctggccctcctgtcactgactccacacaggtgaatgtgccccgctgcttacacttctcaggagtggggaaggtgcgacaggcctgcatgcggtggcacgggctgtgcagtgttaaaccggagaaggacatgtttttgtctggggctatggaattcttgggaaaaggtccaaacctaagtggaaagtgcccgtccctgaaaatgattccacccactctctttggctttgacggatttcaacccagaaatccagggtttcccgcattccgatgtggaattcaagccactttgctgcactgaccaacaaaggagagctgtttgtatggggcaagaacatccgagggtgcctggggaatcggtcgcctgggaggaccagtatttcccatggagggtgacgatgcctgggggagcctgtgggacgtggcatgtggcgtggaccacatggtgaccctgggccaagtcatttcatcttaaacctccctcaccttgctttggggcggccccgtcccgggaaaccacttggcatttcttttggcagaggccagccgcgttggccaagccccccggggttcttggatggtggtggcggaggaccctgcgtgcagtgtgacgctctgtccttgaatccctttagcgggtacctaccaggaggatcagggcaaggtccctctccagctgcaggtgaggcctgcggacgctcagcgttggagtggcagccgtttggtgggccgcgtgtggccgcagcacgttttctgttctctccagagtaacatgcgtacggtgtcgtggtgtcacgtcgtcgcctgagaagccgcgtcttaggaaagcttagcttgaacacagtgcttcgggaggtttcttgctctgtctgtcatggcagtctcttggtttgtgtctgggccaaggccatgcgtgtgccttgggaccgagccccagtttagggcgagggaagtcaaggctggcttcggcccctcgggttttcaattcaggcccaccctgcctcaatggcccttccctggccgccctgccacaaccgcaagctcgctggggggacactagaagcaccgtggccctgggattcccatctggaagctgtccgcatggcaccaagccccagcctccccaccacgctcactgccctggcttggaaaagttaagaagcccctcaggaagagaatcgaggctaagttccctctgcgccgagggccccgaggcatatccgccaaggctcgagctgcagtgccaggcggaggatggaagatccagaaattgtgaacaatgtttgatttagtagcggtgacttgcctttccctttaaaaacattcttttacaaatctgtcatggaataaagtctattttctgccttttggtttttaagctctgaaaaaaaaaaaaaaaaa

SEQ ID NO: 155509 - DNA, 834 bp, Homo sapiens; identical to SEQ ID NO: 121803

SEQ ID NO: 155510 - DNA, 1391 bp, Homo sapiens; identical to SEQ ID NO: 121804

SEQ ID NO: 155511 - DNA, 304 bp, Homo sapiens
  misc_feature (1)...(304): n = a,t,c or g
ttttgaggccaagtctgtattgccgagactggagtgcagtggtatcatctcagctcactgcaacctctgcctccagggttcaagcgattcttgtggctcagcgtccaggcgtgcgccaccatgcccagctaatttttgcatttttagtagagatggggtttcaccatgttggccaggctggtctccaactcttgaccttaggtgatccacccacctcggcctcccaaagtgctgggattacaggcgtgagccaccatgccctgcctgcctggctaatntttgtatttttagtagagacagggtt

SEQ ID NO: 155512 - DNA, 6283 bp, Homo sapiens
atttttttttgagacagagtcttgctctgtcgcccaggctggagtgcagtggcaagctctcagttcactgcagcctctgcctcctgggcgcaagtgattctgctgcctcagcttcctcagtagtggggattacggcacgtgctatgccataatttttgtattttgtgcaacgtcataatctcagctcactgcaaactctacctcccaggttcaagcaattgccctgcctcagcctcccgagtagctgggattaaaggcatgcaccaccattgcctggctaatttttttgtatttttagtagagacggggtttcaccatgttggtcaggctggtcttgaactcctgacctcaggtaatccacccacctcggcctcccaaagtgctgggattacaggcgtgagccaccatgcctggccccaagtatgaatattaaataccactggtggtgccttgaagccctttcccatggggattgaagaaaaaccacagttaagactcaaagtaggggacaaatagcttggttgtaggccattgacgtgatccctgaaagattgtttgaacaatgttacccacaaccatccaaacttattaggaaggataaagattttctaaagctatattgaggtgaagagaagagactattcctccaactcaacgtggggatgaaaaaaaggtaaaaaccagagtttacaaaaattcacttttaatattcaaatgaaagcaacccccttctcctgcctctctgaacatggccagcatttcagacaccctaccacctcccaggctctggctgcctgataaaaaaatcccaatttttgccaaaacctcaaataccacaaaacactaaaagaacagatgtgagcaacttatttaagttctacatttagtagctgatggacacataaggctttcaagaagacactcttctcttcacaacatattaaataagtcctagcacaactgactgcttccaaaactaccacccaagcgtgccaccactcttggctgaacagaaactcttcctcatgacaagggcactatgctgatttcagcagaactgaaggaccacgactctcccagaatatctgtatttttacctctcagacttctcctgcaatgtcctaatgatcatgtaaatagtcttcaatgagaaacaggacatcaaaccttccaaacaggcagaaaatgctctgctaataccatgggagagggtgatcagtttttggcagaacaaaatggcatcaccaccttagtactgaaattagtaggagtaatagaacaatttctcctcaaatataatggctaggatcatacctaaaacccactggcctctaccatgagtgaaagaaaaggagacaataggcttgattgtacaatcccctcagtatacgtgtgtcaggtacacagagaaaagactgctaaccagtaacgtttcaatactaagagaagctattaatgtggcaaacaaccaagaggtaatatctagtttctaggtttaaaaaaaaacaatatatatatatatttataataaagttttaaatacaaagtgctttttatatatcgagaatgatacagtgttgtgaataaatccctgtttgtaatcttgcttacaagagttaactggtaaataagtattttctttcctctttccagacaatgttcaacaagtaaacaccctggtgttaggagcttgagaatcagaggccattgccagcaatgtctattacattacagcaaagccaaacttttcaaataaaatttcaccccaaatccaagaaaaattatttttattttaagaaaaaaagtttctatttagaagtaaataacccagtacgattgtggaaaagatgacatggtagtagcaccctgtcctaccctggtgataacctcaggtatgttacacagcttaaaagcatgtgcaatattacctttctttttaacctaaatcatctaactgatgggcagaaaaggtctcagaatagttgcttttcttgtttgtttttttaattttttttttctggtcggcgtagctttgtggacttttaagtttaagcagctttatctataatgtgggagcatggttctgtagactaccttgctaaacttaggactccttttacaaacacattccagtgctcataaagaactggtagtattagctcagtgtaccctctaaagagtatctcccccaccttgaaagagtgtattctcaagattcttcttgggcagttttgtcccccttaagtataaccactcatagaatcctgcctatctgccctctcactctggttggtggagtgtcaccttagcactctatgaactactcaagttcacagggaactctcagccacaacttgtggctccttctcactaagtgtggtcatggaccactctctttgtaaagcaccataatctaagacagagcaggggctgtggcagcccgtggtaccgtggtcagtcacagcagcttggtgtctaccagccacagagaagaccccactgtatggaggctacaattaaccaaacaggatttgggaaagcaaaccaatgagaaatacctatctctggcaccctagagaattacaattagataaaattgtccaaactcaatgttagaactaaaatacaaaacactgccttatcaagagtctgaaacaccttgtgacagtagtggcatcttacagaaactgacaagggcactatgtcagccttgtaccgtaaattatctgtttcatatttagaaagtcactctcttagcatctccatagttttagttaaaatatcctttagaaagactaaaaccagacaacagagctctgttaaccaatttctcatcctaggaatcacattatttctagcttttatataagtagcacttccttcagtgaaatagctaccaaaacaaatccacattacctaagtatctatagcaagagcaaaataaaatttcagcatgaccttgtaataatgagtgatccaaagctgctgccacccaaaatggaactggtgggtggagtccagttccaagtgcaggtgtctctgtccacctgtttcgatcacaaccagtcagaaggtttcccttgccagctgggcggtgggttaactcaccccattacccattccaggccaggactggaacacacaaatttgaggaattagatttttttaattggcctacttagagctggtctttcagaaatatcttcctttttttttttaagcttctctcataatagcaagtagcacgcatcatctgtgcccagatttgcattaattaccatagtttatttttgtgcatgccactcaagggccagatcctatttttagttagcctcagttgtattctgctcagcctttgcagcttcgtaggacttagtacaagaagtcacatgccggtggaaactgtccctccacataaacctctttgcacagatattacactcatacggctttatgcctgtgtgaattttcatgtggcccacgagatggtgcttcattttgaatttcttaccgcagaccccacagccgtaaggccgaagaccgaggtgcatgctcatgtgccgatctctctgactcttgtgagtgaaacttttcccacactgacaaggatacagcttgtcagtggctgagaatcctaagtgggaagcttcttctttaatccctgttaccatttcaatattctcactgtaacctgctgcgagggcagcctcctgtctgtgcccaattagattcccatctgacctctctccggaaaactcttccatggaagagccatagaaatccacctgctcatcataattgctttcatcagcctgttcatcaaactcagcttccactttcttctccccgatgtggaagtcctcctccactcccgaaggctgcaccgtgtgctctgtctgcacggtgttgatggactctgtgacctggtgctcgtcgtaggtcgcgtgcacatccatgccctcgcaagcctgttctaagcgctcgggcttcacgtggatccagcgtttgtgagccatgatgctgggcttgctgtacatgggccgggtgtagtggaactcggcgctgtcgctggcgccctcctccccatcctggcttgccatttccgtgctcaggcggtcatgctctgtggacgagttgctgggcaggtattcgtgctcggtgagctgggatgacagctcgtctttggtgctctcctcttcattttcaccatctctcagttcttgggctttgggaaaatcagtatgacccccagagcccagctcaaagctctctaccaggccattataactactgctgcttggtgactggtggtcactgccatgatttagcttctgacaaaggactgtagggtttccctctaaaacttcagtgcatttgtctaccacatgccacatctggaggaagcttgccgctgtcaagtaactaacaatttctggagcgggcattactagacgtcctgtataactagataggagaatgttctcaaacactcttgggttcatcacatcaggcaaaacaattctcctgctgtttttcaggagtacctggtcacaaaagtagggtgaactggcagcaagaacggctttgtgtgcccggaaaatgtggccttggacaacaatggagacgtcacataattgtccttgctggcgctgctggttcagtttctgtagaatggtgctggaaaaatcaggaaattctacccgaaaagagtttgttccaggctccatttcatcacaaatcttgttcggtgctacaagagaaagaaaaattagtacaaattccagcccaaagataaacttattttatcccctcctccattgttaagacaagttccaaagttccacaaagtcctctagcctatgggccccactgggtaagggattcaatccctagagcaaagcttgcaggtgcgtgtttgccaaaggcaggactcaccaccactccttgtggaactcctgattttggttctgtgtctgtgggtaagagaactgaatccatagggacaagatttgtaagctatacaaatctcccaagtaaaaccaagtactgtaaatatttacagttaaaacaaacaagatacccattcaaataatataatttttttttaaacgagatggggtcttgctctgttgcccaggctggagtgcagtggcacaatcatagttcactgcagccttgaactcttgggtaatcaagctatcatcctgcttcagcctcctgagtagctgggactgtatgtacatgccaccatgtccagctagttttttttttttttttttgagatagagttttgctcttgttgcccaggctggagtgcaatggtgtgatctcggctcactgccacctccaccttctggtttcgagcgattctcctgccttggcctcccaagtagctgggattataggcgcccgccactacacctggttaattttttttttttgtatttttagtagagatggggtttcactatgttggccaggctggtctcgaactcctgacctcaagtgatctacccacctcagcttcccaaagtgctgggattacaggagtgagccaccatgccctgcccagtctttataaatgaagcttgactctggactgtgatagcagaaacaaatacaggcagtgcctcagagaatacaaaatatcaagcaaatcctaagtgttgaagctagaacccaggtgagtgcactctgcattactgagaatgtgctccctgccaaaaggctcctaccctattccaaccaagccggaaatggcaacagaccaaacgtgaggagtgagtgcctctgtgctccttgaggctgtttcattacagataacaaggttacctagggcagttgtgaagatgaaatgaggatgtgtgtggaagggcagagcagatgcttgatgttctccatctgaacactactcttgaccacagtatttctcattctcctttctgaaatgcctctaggccttaagcgcctatttctataaatgttgggtgatcagaccaatatggtttctgaaaaaactgttcagaaatagactaattttctttgggtggttcagtctgatgctgaaataaattgcaagatgattttcaaaaataacatgaaccccgacagcttcgctgagaaatatggagcctcttcaaacgtgtttttaaaaagaactggatgtgcaggcgtaacagatttattacaaaacaaaaactccccaagccagccttattactggggctcatcattaaaatccagtgctcctcgtgccaagctaggcgtaatggtgtgtacaggc

SEQ ID NO: 155513 - DNA, 5440 bp, Homo sapiens; identical to SEQ ID NO: 123135

SEQ ID NO: 155514 - DNA, 4845 bp, Homo sapiens; identical to SEQ ID NO: 123136

SEQ ID NO: 155515 - DNA, 2220 bp, Homo sapiens
tcacagaaggtccgaagcccccagttgtaagtgtctcttgcctcccactggcttcccatccccccactttgtgtacccccacaagagacccccaccccactgggcactgagactcccagagctcttcaaggtgggcttctttcccatgacattccagttctttgccaagtggagggggctggtgctgagccgctgaaaccatgttgttacgaccaagatatcatgggtctgatctctgtgctccctggaagggactgagtacccaaacacccatccacccttgcttgcagtctgggttgcagtcgtggtaccaagcccagaacgggcaaggtgggagagtgaagatgtgcggtcaagaaagccccagaactccctgagaccgtggacagctgaggcctgaggagtttctagaacctcagcagctgcagaggcatctgggctgattccacagcctgtcccctggagcttccaagccaatgctggaaccaggtctagactgggagccttgtaagaaactgaacgatgtaaaacgtgccaagagtgtaccattaactcgtcatttacattaggtatatctcctaatgctttccctcccccctcccccaaccccacaacaggccccagtgtatgatgttcctcttcctgtgtccaagtgttctcattgtcaattcccactgtggttttgatttgcatttctctgatggccagtgatgatgagcgttttttcatgtgtctgttggctgcataaatgtcttcttttgagaagtgtctgttcatatcctttgcccactttttgatggggttgtttgttttattcttgttaatttgtttgagttcattgtagattctggatattagccctttgtcagatgagtagattgcaaaaattttctcccattctgtaggttgcctgttcactctgatggtagtttcttttgctgtgctgaagctctttagtttaattagatcccttttgtcaattttggtttttgttgccattgcttttggtgttttagacatgaagcccttgcccatgcctatgtcctgaatggtattggctaggttttcttctagggtttttatcgtttcaggtctaacattgaagtctttaatccatcttgaattaatttttgtataaggtgtaaggaagggatccagtttcagctttctacatatggctagccagtttccccagcaccatttattagatagagaatcctttccccatttcttggttttgtcaggtttgtcaaagatcagatggttgtagatgtgtggtattatttctgagggctctgttctgttccactggtctatatctctgttttggtaccagtacagtgctgttttggttactgtagccttgtagtatagtttgaagtcaggtagcttaatgcctccagctttgttcttttggcttaggattgtcttggcaatgcgggctcttttttgattccatatgaactttaaggtagttttttccaattctgtgaagaaagtcattggtagcttgatggaggtggcattgaatctataaattaccctgggcagtatggccattttcacgatattgattcttcctatccatgagcatggaatgttcttccatttgtttgtatcctcttttatttcgttgagcagtggtttgcagttctccttgaagaggtccttcacatcccttgtaagctggattcctaggtattttattctctttgaagcaattgtgaatgggagttcactcatgatttggctctctgtttgtctgttattggtgtacaagaatgcttgtgacttttgcacattgattttgtatcctgagactttgctgaagttgcttatcagcttaaggagattttgggctgagacgatggggttttctaaatatacaatcatgtcatctgcaaacagggacaatttgacttcctcttttcctaactgagtaccctttatttctttctcctgcctgattgccctggccagaacttccaacactatgttgaataagagtggtgagagagagcatccctgtcttgtgccagttttcaaagggaatgcttccagcttttgcccattcagtatgatattggctgtgggtttgtcataaatagctcttattattttgagatacgtcccatcaatacctaatttattgagagtttttagcatgaagggttgttgaattttgtcaaaggccttttctgcatctgttgagataatcat

SEQ ID NO: 155516 - DNA, 858 bp, Homo sapiens
ctacatcatgtggcagacaacgagacatgctttgtatacttcattatctactattttcaaatgagatgtctgaggattagaaggttcagtgaattctcctggtatggctatgaggaatgaagtgagatctgcagagtacctggcttttcttcggtggtcaataaatggcactctcacttgactaatactgagtacaattccagttatcttgggagagactaggaaatcatgttggtgtgctgcacccattaacttgtcattcacgttaggtatatctcctaatgctatccctccaccctcgccccaccccacaacaggccccagtgtgtgatgttccccttcctgtgtccaagtgttctcattgttcaattcccacctgttcactctgatggtagattcttttgctgtgcagaagctctttagtttaattagatcccatttgtcaattttggcttttgttgccattgcttttggtgttttagacatgaagtccttgcccatgcctatgtcctgaatggtattgcctaggttttcttctagggtttttatggtttttggtctaacatttaagtctttaatccatcttgaattactttttgtataaggtgtaaggaagggatccaatttctgctttctacatagggctagccagttttcccagtaccatttgttaaataaggaatcctttccccatttcttgtttttgtcaggtttgtcaaagatcagatagttgtagatgtgtggcattatttctgagggctctgttctgttccattggtctatatctctgttttggtaccagtaccatgctgttttggttactgtagccttgtagtatagtttgaagtcaggtagcat

SEQ ID NO: 155517 - DNA, 339 bp, Homo sapiens; identical to SEQ ID NO: 123137

SEQ ID NO: 155518 - DNA, 1584 bp, Homo sapiens
atggatgaagctggaaaccatcattctcagcaaactaacacaggaacagaaaaccaaacaccacatgttctccctcataagtgggagttgaacaatgagaacgcatggacacaaggaggggaacatcacacactgggacctgttggaagtgttggaagttctggccagggcaatcaggcaagagaaagaaataaagatattcaattaggaaaagaggaagtcaaattggccctgtttgcagacaacatgattgtatatttagaaaaccccatcatctcagcccaaaatctccttaagctgataagcaacttcagcaaagtctcaggatacaaaatcaatgtacaaaaatcacaagcattcttatacatcaataagagacaaacagagatccaaatcatgagtgaactcccattcacaactgcttcaaagagaataaaatacctaggaacccaaattacaagggatgtgaaggacctcttcaaggaggactacaaacaactgctcaacaaaataaaagaggacacaaacaaattgaagaacattccatgctcatggataggaagaatcaatatcatgaaaatggccatactgcccaaggggccttcttgcaaaggctctaaactgcatccctatctgccactcccatctcaagtagcattagatctactgggtcatatggcccaagtggcagagcagcttgcacaggaacctggacttgttgcagagccttctcctgttctgagccccactcagaactctggcaactttccaggtcacttggatgagcaggaaatggaagcaaggcaatcacgatgcaaccaccttctagcatgttgtgttgtaaatattaatccagattatactaatgaacattcttacccaagattagacaaggaaggttcccgttctcctttcttgaaaaactgtatgcaggtactaccagtggaggctgcagaacagcaaagtttgctgcctgttccttcttctggaaccttcatcccagagggcacccaccaggttccagctggagctgtcctgtatgaggtgtctgtcaacccctgctgggaagagtctcccagtcaggaggcacaggggtcaaggacccacttaaggagagatgccatgcccagagaggaggaatctagagaggcagtctggctgcagtggctttgtggcactgcggtgagctccgcccggttcaaacttcctggaagctttgtttacactgtgaggggaaaaccacctactcaagcctcagtaatggtggatgcccttccccctgccaagcttaagtgtcccaggtcaacttcagactgctgtgctggcagtgagaatttcaagccagtggatcttagcttgctggcctctatggggagtatatttactttagggaccgggaaaaaatgtttcaaggttaccacaggggaaaaacagaattgccaatgggagaaaatcatcacaatttcttccccagaagagtgtgatgttcccattcctgtgtccccagagtgtgagtccccagagtgtgatgttccccttcctgtgtccatgtgttctcattgttcaattcccacctatgagtga

SEQ ID NO: 155519 - DNA, 583 bp, Homo sapiens
tttttttttttttttttcattagtaaatgcctaggaatgcaatctctagatcatagaataggtggctacttaactccaaaagaaactaccagacattttccaaagtgattgtatctgtctacactcccgccagcgatttgggagttccggtcgccccatccacaacctcaggcccacttgatactgtcagcccttttgattttagaccttacctgcattttaatgagaaattaagactctgttggtggttttcagatatataattgtgaactagaaaatgtagcagaatttgagggcctgacagacttctcagatacgttcaagttgtaccgaggcaagtcggatgaaaatgaagatccttctgtggttggagagtttaagggctcctttcggatctaccctctgccggatgaccccagcgtgccagcccctcccagacagtttcgggaattacctgacagcgtcccacaggaatgcacggttaggatttacattgttcgaggcttagagctccagccccaggacaacaatggcctgtgtgacccttacataaaaataacactgggcaaaaaagtcctcgtgc

SEQ ID NO: 155520 - DNA, 1221 bp, Homo sapiens
atgggcaaggacttcatgactaaaacaccaaaagcaatggcaacaaaagccaaaattgacaaatgggatgtaattaaactaaagagcttctgcacagcaaaagaaaccaccatcagagtgaacaggcaacctacagaatgggagaaattttttgcaacctactcatctgacaaagggctaatatccagaatccacaaagaactcacacaaatttacaagaaaaaaacaaacaaccccatcaaaaagtgggcaaaggatatgaacagacacttctcaaaagaagacatttatgcagccaacaaacacatggaaaaatgcccatcatcactggccatcaaagaaatgcaaatcaaaaccacaatgagataccacctgatgccagttagaatggcaatcattaaaaagtcaggaaaaaacaggtgggaattgaacaatgagaacacttggacacaggaaggggaacatcacacactggggcctgttgtggggtgggggaaagggggagggaaagcattaggagatacacctaatgtaaatgacgagttaatggccttctcaactacgcggcccaccttcttccctcgttctgaccccactacaacaaggcccatggcggtgccacctcacgaggagaaggacgatcaccttgagacccatcggcctctgaggccacggaccacgctgccccatgctccagacggccgctggctcctcctcacactcactcacacttcaacccctgggaagactggcctgcggacctaccggccgtgtctcagtaggacagaaaaagtccagacagcaggagcgcgaccctcacaccctcacagctccgccgcgttcaccacgtgggcaaaggggccgacgggaagacgcccagggcacatgcgcagtgagtcagcaacacagaaagaagtcacgatgtctccttgcacagctctgcggggacagaaggcagacagcaaggcacatggacaacaagggacttgggcagcaaggggcatgcacactgagtcaggcacatgcaaggccagccgcggttttccctctctcctctcaccccggactcgcatccctaaggtgtttgtagcagaaagaaagggactaagaggctttgttctctctcttaccctaccattctcatgcatccagaaacactgggaacagacagtccccatgtcaccattagtggaggatgtgtctgagaaagaccttttgtga

SEQ ID NO: 155521 - DNA, 357 bp, Homo sapiens
ttaggaagaagctcgggggtctccttgtaacgtcttctttttcatattaacgggggtaatatagttagaagcttctaagttttctttagtaccgacaggccccagtgtgtgatgttcccctccctgtgtccatgtgttctcattgttcaactcccacttatgactgagaacatgtggtgtttggttttctgttcctgtgttagtttgctgagaatgatggcttccagcttcaaccatgtccctttccagatgctgctgcctagaatttcccctcctgctaaaccaggaaaatggctcctcctccttgaagagcctaatccagtatttcttaaccgtgaagcctttcctaactaccat

SEQ ID NO: 155522 - DNA, 495 bp, Homo sapiens
ctacaatgcctggcaggcaacggggacacagcctttactaacaggcagttgaggaagactcagtgacaccgtcacagttgctggctccagtgccacacctgaaatgtgagcaccagaacaacacctggacgttgctatgaactgggacctgtgttgaggaactctcagagctagcctcagttctttggaaatgtgcttggtcaccttctctatagttttctcggcccattccagtgtgatgaaaatattaggtatttgtcctaatgctctccctcctcttgccccccatgcaccaacaggccccagtatgtgatgttccccagcctgtgtccatgtgttctcatggttcaactcccacctatgagtgagaacatgtggtgtttggttttctgttcctgtgatagtttgctgaggatgatggtttccagcttcatccatgtcccttaccgtttttgttattgtaaccttgttgtatattttgaagtcagatgtcat

SEQ ID NO: 155523 - DNA, 399 bp, Homo sapiens
tcaagtcttgtcatcaacatgtagtttctgcttttccttgtgcttgcctgaaggcttttctaatagctgcatactagaaagagtgttttcaactgtgtaaagctctttctccattgcatttcctctgtcttgataaatcagctctatgacaggccctggtgtgtgatgttccccactctgtgtccaagtgttttcattgttcaattcccacctatgagtgagaacatgtggtgtttggttttctgtccttgcgatactttgctgagaatgatggtttccagcttcatccatgtccctcccgaaaggcacaagtccaaacatcatgacactaggggttagtgctccaacatgtgagtttggaggagacacaaacattaagtacagaagatactgcggcat

SEQ ID NO: 155524 - DNA, 431 bp, Homo sapiens
ccaagtattcggttccatagtaagaatacatcagggggaatggtttcctcttctttatggcatactgcttcccagagtccagaattgcctgacaaattgacttgatctgtgctggagtcagcaccaaacaccacatgttctcactcataggtgggaattgaacaatgagaacacttggacacaggaaggggaacatcacacactggggcctgttgtggggtggggcgagggtggagggatagcattaggagatatacctaacgtgaatgacaagttaatgggtgcagcacaccaacatgatttcctagtctctcccaagataactggaattgtactcagtattagtcaagtgagagtgccatttattgaccaccgaagaaaagccaggtactctgcagatctcacttcattcctcatagccataccaggag

SEQ ID NO: 155525 - DNA, 1302 bp, Homo sapiens
tcacacaacttccaatccactgtctccactgtgatgtataataggcatctcacatttaaccagttcaaaactgaattcctggttttcctcctgagacatgcgctcttcactttcttccccatttctgtaaatggcaaccacagtcttccagttactcaagcaaagagcattgagccatttttcactcctctttctcacacccacatccaatttatcaggaaatctgttggcttgcccgtcatttacattcggtatatctcctaatgctatccctccacgctccccccaccccatgacaggccccggtgtgtgatgttccccttcctgtgtccaagtgttctcattgttcaattcccacctgctgtttcctgactttttaatgattgccattctaactggtgtgagatggtatctcatagtggttttgatttgcatttctctgatggccagtgatggtgagcaattttttcatgtgtttcttggcctgcataaatgtcttcttttgagaaagtgtctgttcatatcctttgcccactttttgatggggttgtttgtttttttcttgtaaatttgtttgagttctttgtagattctggatattagccctttgtcagatgagcagattgcaaaaattttctcccattctgtaggttgcctgtttactctgatggtagtttcttttgctgtgcagaagctctttagtttaattagatcccatttgtcaactttggcttttgttgccattgcttttggtgttttagacatgaagtccttgcccatgcctatgtcctgaatggtattgcctaggttttcctctagggtttttatggttttaggtctaacatgtaagtctttaatccatcttgaattaagttttgtataaggtgtaaggaagggatccagtttcagctttctacatatggctagccagttttcccagcaccatttattaaatagggaatcctttccccattgcttgtttttgtcaggtttgtcaaagatcagatagttgtagatgtgtgttattatttctgagggctctgttctgttccattggtctatatctctgttttggtaccagtaccatgctgttttggttactatagccttgtagtatagtttgaagtcaggtagcgtgatgcctccagctttgttcttttggcttaggattgtcttggcaatgcgggcccttttttggttccacatgaactttaaagttttttccaattctgtgaagaaagtcactggtagcttgatggggatggcattgaatctataaattaccttgggcagtatggccat

SEQ ID NO: 155526 - DNA, 2861 bp, Homo sapiens
atgttggaagacagagatggggaagaagatgaaggtgatgaagacaggttggacaatgcagtcaggggccctgggcccaaggggccagttgggacggtgtcggaagctcagcttgctcggaggctcaccaaagtaaagaacagccggcggatgctgtcaaataagccacaggacttccaggtagcaacggcctggcgttctgcttctttgtttaatctttatattgcccatcttctggcaattgcagtgatgtttcagtggacctattccaatggacaatggctcaaccggccggctttgaatgatttcatccctacagctgctcttggtctctataacccaaccccagttcccatcttgggaatgaccctaggtggctccacccaattggtagcacctggtatagcacaaagctgccctggcctggtgttagcaatcctaataggtgaaggaaatgaagcaacacctgaggatcctaaggatcccacgtgctgggaaaggttgggtaaccatcccccttctgtgctgcagatccgcgtccgagtgattgagggccgacagttaagtggtaacaacataaggcctgtggtcaaagttcacgtctgtggccagacacaccgaacaagaatcaagagaggaaacaaccctttttttgatgaggttctgtggcttcaaccaggtgaccacacccctgcttcatactcaagagctggactcaacgactaccacaactgctgcaagaataaaatgcagggtgttgttctcactcataagtgggaattgaacaatgagaacacttggacacaggatggggaacatcacacactggggcctgttgtgggactctggcctcaatgcctcactgacccggagggctttggtgaggagacctgggcttccactcagccctttgcaggtgttacctgcaaagccctctacctcctccactttactcccacagccattgggagtcactgtctagaccattgtttctcggacttcctgggtattaagaattaccgaaaggaaaaagtcggactcagggatctgggaatctgcagacgccctggtgagggacgtctggggaagcacattctgagaaatgttttgggagacgatgcggaggccgaattaattggcacggcgactgtagccctgaaggacctgactggtgaccagagcagatccctgccgtacaagctgatctccctgctaaatgaaaaagggcaagatactgggatatataattgtgaactagaaaatgtagcagaatttgagggcctgacagacttctcagatacgttcaagttgtaccgaggcaagtcggatgaaaatgaagatccttctgtggttggagagtttaagggaaaacttcagatgtgggtggatgttttccccaagagtttggggccaccaggccctcctttcaaacatcacaccccggaaagccaagaaatactacctgcgtgtgatcatttggaacaccaaggacgttatcttggccgagaaaagcatcacaggagaggaaatgagtgacatctacgtcaaaggcttggattcctggcaatgaagaaaacaaacagaaaacagatgtccattacagatctttggatggtgaagggaattttaactggcgatttgttttcccgtttgactaccttccagccgaacaactctgtatcgttgcgaaaaaagagcatttctggagtattgaccaaacggaatttcgaatcccacccagggctgatcattcagatatggggacaatgacaagttttctctgggatgactacttggggtttcctaggaacttgactttgcgtcacacgattcatttcctgcaaaaatcaccaggaggaaattgcagggtttggacatgatttccgggaccttcaaagccatgaacccccttaaagccaagacagccttcctctttgagcagaagtttatgaattgatggtggccatgctacgcagagaaagatggcgcccgcgtaatggctgggaaagtggagatgacattggaaatcctcaacgagaaggaggccgacgagaggccagccgggaaggggcgggacgaacccaacatgaaccccaagctggacttaccaaatcgaccagaaacctccttcctctggttcaccaacccattgcaagaccatgaaagttcatcgtgtggcgcggcttttggtgggtcatcatcggctttgctgttcctgcttatcctgctgctcttcgtgggccgtgctcctcttactcttttgccgaactattttgttcaatggaagattgtaaagccaaatgtgttaacaaagggcaaaggcttcatttcaagagtcatccagcaatgagagaatcctgcctctgtagaccaacatccagtgtgattttgtgtctgagaccacaccccagtagcaggttacgccatgtcaccgagccccattgattcccagagggtcttagtcctgggaaagtcaggccaacaaggcaacgtttggcattcatgtttatctctttaaggtatttaaaagttttatttttctaaagttttaaattcatgtttttcaaaatatttttcaaggtgggcgggtccccatttaaaaatcatctttttatatgtgtcttcggttctagacttcagcttttggaaattgctaaatagaattcaaaaatctctgcatcctgaggtgatatacttcatatttgtaatcaactgaaagagctgtgcattataaaatcagttagaatagttagaacaattcttatttatgcccacaaccattgctatattttgtatggatgtcataaaagtctatttaacctctgtaatgaaactaaataaaaatgtttcacctttaaaaa

SEQ ID NO: 155527 - DNA, 396 bp, Homo sapiens
  misc_feature (1)...(396): n = a,t,c or g
cggaggagtgctcccagtacgagtttgagaactacatgcgtcagcagctgctgctggccgaggagaagagctccatccatgacgcccggagctgggtacccaagcggcagttcggctgggccacgacgcacagcccatgacctccttggacacggccatcctggcgcagcgctacctgcggaaataacagcctcagccggggccaccagcactgctgccacttcttccagccccagccaaaggcgtggctgtcagggctgggccctgtagtgctggactctcccgggccacaatagggacagggcagggacagggacagcccaggtcacacgtggggtcagcagaggtaccacgaagctaccttttgggatgattgctcgattgtttggtttttan

SEQ ID NO: 155528 - DNA, 373 bp, Homo sapiens
  misc_feature (1)...(373): n = a,t,c or g
ccataccaacttctctcccatctntaggtggctcagtccatggccactccctgcccccagcctggttggacagcaaggaatccacagcccacacgtgagctccctcctcacccccaggcagggaagcccttcctgccagtccctgtcccctttcagcccaccagtccctctctgctgccggtgatgggaggcctttctagacctggctctttctctcccgtctcagtggcttctttgaggtgctgcacacactgagagaagtcctattgtaaagaaacggaaaaagtcacaaaaaagtttgtataaagacatatttttgtactacatggggactcttcctgcatgtcagcaataaaaaaaaatgatttggaaa

SEQ ID NO: 155529 - DNA, 2655 bp, Homo sapiens
acagcatcccgcaggagctcttccgcaagatcaaggctgccgagtatttcattcctgttgatggacgggtttctgagaacaccgtgtgtctcatacggaagctgctggtccttgacccccagcagcgcctggccgccgccgacgtcctggaggccctcagtgccatcattgcatcatggcagtccctgtcatctctgagtgggcctttgcaagtggttcctgacattgatgaccaaatgagcaatgcggatagctcccaggaggcgaaggtgacggaggagtgctcccagtacgagtttgagaactacatgcgtcagcagctgctgctggccgaggagaagagctccatccatgacgcccggagctgggtacccaagcggcagttcggcagcgcaccaccggtgcgacggctgggccacgacgcacagcccatgacctccttggacacggccatcctggcgcagcgcctacctgcggaaataacagcctcagccggggcccacccagcactgctgcccacttccttcccagcccccagccaaaggcgtggctgtcagggctgggccctgtagtgctggactctcccgggccacgatagggacagggcagggacagggacagcccaggtcacacgtggggtcagcagaggtaccacgaagctaccttttggggatgattgctcgattgtttggtttttaaatctgagaagcctagataactaattctgcttttaatcacgatgttttaatctacctctgtctctttaaccatgctgtctctggactgagcaagagggaggagggagcctgctcaccccactccagggccttccccagcggccaccaactgacctggggcgctgctccccacagtccaaataagctgaaagtgcagctcgctgcaggccccagagcgagcttcccctcctccctgctctcccaggcccctgccacagcctctttccgtccctctctttctgatccaggcccctcagtccaagctttggaaaaccttcacctcatcttaaaccgaactcaaatatatttatttttttaccataccaacttctctcccatctctaggtggctcagtccatggccactccctgcccccagcctggctggacagcaaggaatccacagcccacacgtgagctccctcctcacccccaggcagggaagcccctcctgccagtccctgtcccctttcagcccaccagtccctctctgctgccggtgatgggaggcctttctagacctggctctttctctcccgtctcagtggcttctctgaggtgctgtacacgcgcgttaacctgttcccttctctatccttccccgtggtactgagctcacgtggactcccagtgcgaaagggcccatgggttgggctgcaggcctggccgcgagcggcggctgtctgcacagctcccgctagcctactcttgtgtttaggggatggtgggaacatatcccagtgcccttgcctcataatagatgtggtgactctcccggtagaccctagcaagggtcctccatggtggtgagggactcaggagaattgtagggattgggggaccctggcctgcctgggtttgagaacaagccctgttgccctttttgagccgagattttgaagtggaatgcccgtcttgccagaaatgctgttctcacgcagaatgccccctccccttgcccttactggacttggccctgcctgatgccaagcaaagacccttacccagaggcctaccccccatatgtcctcagagaggctgagtgtcccctccaggcagtcatgggccctgaggcccctcctgcctggccctgctccccagtggggaggtgactgtgtttcccagagtgtgagccgctctcctccccctaagaagctgactcactgtgagtgaccttgggcaagttcccaaacctccttgtgcctcagtttccccatctggaaaaaatggggccacctcttgccagcagtagcagggctgcccacgcccctttctccccatgccccatccagcacttgggcgactcatgcctctgcctcagtgggccctgtgggagcctactggaagcccagcacttactccccctgaagcaagcgaagcctgcgtcatgtctcagctgtccagccgctgagggccaagggtcttgtgctggtggggctgggggatgccctcttttctatatttatttcatagaaagtctcctgcgggagcggaaatgcagtccggcctagggctcccaagcccttgacctgtcctcctgtgagggcctgaagctgggccagggcccgtcgcagcggagcccccttctcaagaagtcaaactggtcccttccgggcggttgcccgtgcgtggtctttctccttcttttcaaagcaatagccgccggggtctgcaaagccctgtcagacagactgggccctttccaaaggtcaagccatgtgtctgatgaaattcctggttgaagaaagagaagaaggatgggtcagccctcactgggtgtcacacactgagagaagtcctattgtaaagaaacggaaaaagtcacaaaaaagtttgtataaagacatatttttgtactacatggggactcttcctgcatgtcagcaataaaacttcctgatctggaaaaaaaaaaaaaa

SEQ ID NO: 155530 - DNA, 1192 bp, Homo sapiens
gatttcccccgacaaagcagttaaaatcttaatataacaggaaaatgcggaattagcccagcacccctctcaatgctggctcacttcgttccaggacagtatgtgatgtcacaaccaaaactatgtgtaaaggtttccaaggtgtcatgaaaagatggggattaaaggcccagccctgctacgcatggccaatcgaaaagcacaggaagacctggagcctgttgcaactggtgatattggcagagtctggcctggaactaaaatgcctggaaaatggggaaacatatacaggcaagaatatgggactgaaagtgtggagaataaacacaaagccccccataatcctatgttaaatggtctggacctggaccataaaaatggcttaggtaaaggtcaaaagattttaaactgccggccatttaaggatctcggtaaaaatctacccatcccctacatatttttcctggagggagatgaagggggaactgcccagaagattggtatggatgaaaaacgtgtgtccagtcccggtgcgccctccaattaacatttgccctaacatcctttgggacgtgggcagaacccttacatattcctgtgagcctccgatgagcccagagtgatatccataacccacccagaaatccatactctccctttccttagtcacaacaaaaatcacacatgtcatctttggccaggggcataaatatatccattcatacccccattaaattttgttagaaaaattaccccacattaaatatatgagttaagtaggattggatttgcctgaaattggtgttgggccatattagcaaaatattccttaatttgtggactcgattccttttttacctacatatttccccaagttatccttaagatgtcctgtaaatttaacttttattaaagttttgtcaatctttgtgaaatagtggttgtggaacagtagaaaaccatatggggactatagtgcaacctatttgggtaaagaaaccatttgcttaaaatgggagaaataaattggatttttaatttaaaataacaggaaccatttttaaagccccggacaaaggaaagacaataaaatcataaattatcggtcctgtttacatttttgttgggagaggtgattactttttagttttatcactcaattataagatcagggggttttgttttggtttgt

SEQ ID NO: 155531 - DNA, 322 bp, Homo sapiens
  misc_feature (1)...(322): n = a,t,c or g
actctttggttatttacccaaatgagttgacaatatgtccacaaaaaaaccctgcacgtggatatttacattagctttatgcataactgccagaacttggaagcaaccaagatgtcctttagtaggtaaatggataaactgtgctgcatatagaaaatgaaatattactcagattttaaaaagagctgtcaagccatgaaaagnnnnnnnnnnnnnnnnnnnnnnnnnnnnnnnnnnnnnnnnnnnnnnnnnnnnnnnnnnnnnnnnnnnnnnnnnnnnnnnnnnnnnnnnnnnnnnnnnnnnnnnnnnnnntgaatgtaaa

SEQ ID NO: 155532 - DNA, 621 bp, Homo sapiens
ttttttttcttttttttgagatggagtttcactcttgttgcctgagcttgagtgcagtggcgcgatctcaactcactgcaacctccgcctcccaggttcaagagattctcctgcctcagcctcccgagtagctgggattataggcgtgcatcaccatgctcagctaattttttggattttcttttttagtagaaacaaggtttcaccatgtttgccaggctggtcttgaactcctgatgtcaggtgatctgcctgcctcggcctcccaaagtgctgggattataggtgtgagccactgtgcccggccattggcttctttgtttttaattcacatattcaacaaatgtatttcaggtgtcaggctctgctctaggccttggagatacagtgctgctcagaaaagtctggatcttgcctactaataatctaaatctagcaagagagacaaacattaatcaaattctccccaaaatgaaagtaaaattacagacatgataaacattagaaagagaaaatatgtcacaggcaggcatgacctagaagggtgccaggaagacattcctaaggaagtcaggctggagtcgaggcctgacatggaggaggaggggagggagcctctca

SEQ ID NO: 155533 - DNA, 522 bp, Homo sapiens
agacggatcttgctttgttgcccagactggagtgcagtggcacaatctcggctcactgcaacctctgcctcccaggttcaagtgattctcctgtctcagtctcccaagtagctgggacttgcgccaggtgcacaccaccacacccagctaatttttgtatttttagtataaccggggtttcacgatgttggccaggctggtcttgaactcctgacctcaggtgatccacccaccttggccacccgaagtgttgggattacaggtgtgagccactgcgcccggcctggaagtatttataagcagaggttggataagaaattgaggagttctgtagcagccaggacaaacagatgcccactatggtctcttccaatttgaattaagacagttcatgtgctgacaagggcctaagctgaagaagtctaaattccttgagggctaagaaatatatatcatgcctcaaatcttggaatgtggcagggaagagacagaccaatcctatattttcacaacatttcagcc

SEQ ID NO: 155534 - DNA, 870 bp, Homo sapiens
cgtcgacttttcttttcttttttgagacaaagtcttgttctggtcatccaggctggagtgcaatggggcgatctcggctcactgcgacctctgcccgctgggttcaagcgattctcctgtctcagcctcccaagtggctaggattacaggcacgggcccccacgcctggctaatttttggatttttactagagaggggatgttgccatgttggcgaggctagtctctaactcctgacctcagggtgatccgcccgcctcggcctcccaaagttctggggattacagggcatgagccactgcgcctggggctgaaatttggtaaaattttgggtttatgaataaggatgacctactgttactactaggagatgtcaaaagatgttattaaatatactcattttcttttccacagtcatatttagaggacgaaagttttcatttaaaaatatttcacggtaatagtagagattttttaaactagcatcatttttttctcctgcagatatcacccacccagcacttctaatggcgctgaatctaaatgcttacatgtaagttatctcctaattagctatgatttctcattagaggtgagatttaacatttgccaaaagaaaaataaattccaattttgaacgtttatcttttgtccttttctttgatagaaaggacactgaaatctaagtttctgatttaaaaaaatagtaacaaaaaaagttatggcccgtggatcacatgcttcacactgtcccacattgttccctccatcgctctgccctctctcacagctaatcttcagatactcattctcatactaagatcctcctacagcttatcctattcaaattctttatttctgaaccacatcc

SEQ ID NO: 155535 - DNA, 506 bp, Homo sapiens
  misc_feature (1)...(506): n = a,t,c or g
tggagacagagacttgctctgttgcccaggctggagtgcagtggccaattctcagctcactgcaacctctgcctcccaggnttaagcgattctcctgcctcagcctcctgaatagctgggattataggtgcctgccaccacacgcagctaatttttgtatttttagtagaaacggggttcccccatgttggccagtctggtctcaaactcctgacctcaggtgatctgcccacttcaggctcccaaagtgctgggattacaggggtgagccactgcacctgggctgggaagtcatatattttttaaatatctcaatttatccttcctagtgccttttatgttattctgggcctaatattctaatattgtccttctaatttaactccacaagactttatcattgtttatacagtgttcatttacatctatccacatatcaccttttttttctcttctttcattcttgtatctcagatgacctgagatacaagaatgaaagaagagaa

SEQ ID NO: 155536 - DNA, 485 bp, Homo sapiens; identical to SEQ ID NO: 146054

SEQ ID NO: 155537 - DNA, 644 bp, Homo sapiens
  misc_feature (1)...(644): n = a,t,c or g
ttcggagtgagcgtttatttgcacgattacaacatgcggacaaacccaggcgagatgagcgagtctacggttcctacccacccggctgacaaggggtggccccaggggccggatgcccagccccgaggcggccctactcctcctcctctcccgaagactctctctcgaacgtgtaggcccatgaagcaagcgtcgggtctcttggggacaaggggatgccccggtctcacaatctcaaagcccaaaaagctgaaggttcggagcaaggcggctgcgggggagaagccgtcagaacccctgccgaccagaaccccccgcccgcaccccccacccccgcagggagaccgtgcctgcgggctgagaatgaaggggcggcgcaggcacccccacgcaccctactgcaggcgatacgggtcacctacctctgtcctcgcggttcttgtggaagcaaatgaagacatggtcggctcgcagctgctcctcagcgaactccaggagaactggcaagctgtccttgctcccctcgggcagcgcgccgcccgggatctcgatgtagaggctgccgccactcagcactgttcgccgaattccncgncnctgcctagggatctcgataggntctcgattnncccccctnnggcccg

SEQ ID NO: 155538 - DNA, 1251 bp, Homo sapiens
atggtgaaatcctccctgcagcggatcctcaatagccactgcttcgccagagagaaggaaggggataaacccagcgccaccatccacgccagccgcaccatgccgctcctaagcctgcacagccgcggcggcagcagcagtgagagcgagtcggtctggatggcccgggacgcgccgggcgaggccgcgcacgtagacggcacccagggcttctccgcgggggccgccggggagctgggggtggcgcactccgacagcccggcagcgccctgggaagacccccgccgcttcccgggaagacgcgtcccgcttccgggggcgcgggtgccagctgcggttgtgggggagcccgcggggtctcggtcgagctttcccgactgcgtcccccgaggtgggcgtcgctcagccccggatcgggaggatgatcggctgaatgttaacagagggaactaacgttccaaccgacaagacggaggattcttcaacgtccagttccaggcttcacagaagcccaaacggcattaaattggcgaaacaattgctgaagtggcggcagcctctttaacataaagcccgcgggcgggcgccgctggcccgaggggagcaaaggacagcttttgcagtttctcctggagttcgctgaaggaagcagctgcgagccgaccatgttcttcattttgctcccacaagaaccgcgagggacagatcctgccttgctccgaaactttcagcttttttgggcttgaagattttgaagaccggggcatcccccttgtccccaaagagacccccgacgcttgcttcatggccttacaacgttcgagagagagtcttccgggagaggaggaggaagtaggggcccgcctccggggctgggcaattcccccgccctggggccacccctttgtcagccgggtgggtaggaaccgtagactcgctcatctcgcctgggtttgtccgcatgttgtaatcgtgcaaataaacgctcactcccaataaacgggggattttctgaaaggtttaatattgtggttggtgatactgaagtatttggctttaaattctaaataaaaatttatattttacttttttaattgctgggtttaagatgattcagattatccttgtactttgaggagaagtttcttatttggagtcttttggaaacagtcttagtcttttaacttggaaagatgaggtattaatcccctccattgctctccaaaagccgaataaagtgattacaccccg

SEQ ID NO: 155539 - DNA, 665 bp, Homo sapiens
  misc_feature (1)...(665): n = a,t,c or g
tttttttttgagatggagtctcactctgtcatcaggctggagtgcagtggagtgaactcggcttactgcaacctccgcttcccggttcaagcggttctcctgcctcagcaccgcccccccaagtaggtgggactacaggcacccaccaccacgcccagctaatttttgtatttttagtagagacagggtttcatcatgttggccaggatggtcttgatctcttgaccttgtgatccgcccacctcagcctcccaaagtgctgggatgacaggcgtgacgaccgtgcccggcctcaaggagtacttttattaaaaagattctctgaagaaaaagatataaatctgatgttaaataaaaacattaaaaaattataaattacataaggatgtaacatatatttttaaaaagtaaatctgggctggatgtggtnnnnnnnnnnnnnnnnnnnnnnnnnnnnnnnnnnnnnnnnnnnncnnnnnnnnnnnnnnnnnnggtcaacccgcccgaaatttccaaatttataaaccgaaaatcctgaaaacccccgaaggttcctttaaactggccatgggcccccttctaaattcttttatttaaaacatggtttggctttttttaaggaacttatcctccttaaagttcaaatttgggccttgaacccttgg

SEQ ID NO: 155540 - DNA, 463 bp, Homo sapiens
tttttttttttttggagacagagttccgctccactcagctgcccaggctggagtgaagtggtgcaatctcggctcactacaacctccagctcctggctcaagccattctcctgcctcagcctcccgagtagctgagattacaggtctctgccaccatgcccgactcatttttgtatttttagtagagatgaggtttcaccatcctggccaggctggtctccaactcctgacctcatgaaccacccgcctcggcctcccaaagtgctgggaatacaggtgtgagccactgcacctggccagtagttatcttttctttaaagttatttacttgttttttaaattgatgtataacattggatgcatttattatatatcacatggtaaaagaatccctctaaataatacttctctcttggattatatgaatctttgtcatttaaagctccgcctaagtaaaaaaaaa

SEQ ID NO: 155541 - DNA, 506 bp, Homo sapiens
ttttttggagatggaatctcactctgtcgcccaggctggagtgcagtggcgcgatcttggctcactgcaacctccacctcctgggttcaagcgattctcttgcctcagcttcccgagtagctgggattacaggcgcccgcaaccacgcccagctaattctttgtatttttagtagagacggggtttcaccatcttggccaggctggtctcgaactcctgacctcgtgatccacccgcctcggcctcccaaagtgctgggattacaggcgtgacgtaccgcgcccggccctaacacagaacttttctaacttaacttttggagaagaaaatagaaaaccaaacccagaggacagctgtgtaaggtatttactcctcagcattaggcaaaggagtcctacagcactcttacatgtcattctatttcaacagatgattcaactggtcctgtagatccgatgactgttcaacattcttctgaatagcttcttgctggtattgaagatgtg

SEQ ID NO: 155542 - DNA, 1943 bp, Homo sapiens
tttttttttttttttttttgagacagagtctcgctctgtcacccaggctgaagtgcagtggcacgaatacttggctcactgcgacctcgcagctgcccggactcaagtgatgctgctgcctcagcctcctgagtagctaggactacagctacaacccgctgccacgcctggctaatttttttttttttgtattttttagtagagacggggtttcactatgttggccaggctgctctcgaactcctgaccttgtgatctgcccacctcggcctcccaaagtgctgggattacaggcgtgagccaccagcgcccggccttgcctctccgtctttaaacaataaggttcaaagttccgtgggagcacaaaggagacatgatgaggacaacgggagtagggcctgagtttttttttgtttttttttttttaagcgttttgctcttgttgcctaggctggagtgcaatggcgagatctcagctcactgcaacccctgcctctcaggttcatgtgattctcctgcctcagcctcccgagtagctgagaccacaggtgcgtgccaccacacccggctaatttttttgtatttatttagtagagacggggtttcaccctgtcagccaggatagtctcgatctcctgacctcgcgatccgcccacctcggcctcccaaagtgctgggattacaggcgtgagccaccacccccggcctgtattttcagagaggagagcttggtgtttttgtggtgccaagtggtaagataatgtctctttgaggcttcctatggacttgcctttattttaagtaaactcaagacaccagttaacctcaacagagtttggcacttattagaatttgttgtgcatcttattgaaagccaggtttacatcacctcaccccattattctttttagttaaataaatttaccatgccaagtaacctgaatggagcaaattggttgatctttaaggcagtaggtttgactagctagctatcattattgtcacatctaatgctaggcaccagaaaccatttgagccaggagtgtgaatgaataattccagagacactttagacattttttaatgttttatatgaacattttacatttgtgtgattgccatagatattaaattatactagtactgataaaaacagacaaacattacataacttattttatatattgttccaaagaaaagaatttgttttaatggtttcaaaataactgcacctgaatttgtttatgtgccttaagttctctagtgctatttcaacttttttttcaatctaaatgaagcttaccttagataaggttcatatttgtttcctatagagtaaataaacttccccttcttaaattgtgtaataaggcaccaacgtgtgggttgcttggcaggaatgaggaatgttaagggagattgttggatgtttggagtttcattatattttttgtttttattttttgatacctaggtgctttttaaaatattcagacaaatatctatcttacattgattaaacccgtgtaaattcatttgcagtatctacatcgaatgtcaaaaaagtatacttatttttgttccatacttatgtacaattttttccctcttcaggctttttcatttaactttcttaaaaaagcacttactctccccttccctatcacccctcccccaaggtttctttatttaaatttttattgagagttgttggagctctaagacaatacaaatttagagttgaacaaaagtataatctgctttacaactagtatagacctaaggtcatttgctttcaattagaggctccagagtcttcatagtggaaagaatgctttgtatttaattggtcttagttaattcgtggcacgtcgaatacttacttatctgctatgattacttcttctccctcgttagtagtagtatgtcctaggtgtttctag

SEQ ID NO: 155543 - DNA, 437 bp, Homo sapiens
ttttttttttttttgagacagagtctcattccattctgtcacccaggctggagtgcaatggtacgatctcggctcactgcaacctccgcctcccgggtccaagggattgtcctgcctcagcctcctgagtagctgggattacaggcgtgtgccaccatgcctggctaatttttgtatttttagtagagacggggtttcaccatgttggtcaggctggtctcgaacttctaaactcgtgatccgcctgcctcagcctcccaaagtgctgggattacaggcgtgagccaccatgcccagccaaatctagggcaggaacatggctgcagcatataaaaagaattgaattccatacttttgttaaccctgttttttgtttgtttgtagttgttgctgtttttgagacagagtctcgctctgtcgcctaggctggagtgcag

SEQ ID NO: 155544 - DNA, 308 bp, Homo sapiens
cacttagtctgaactggtgtattattttatacatatacatatgtatatatgtagtagtgttgtattattctgtcacagttgtctttcgaatatgggaacttagttttttttggctgggttacttttgtttcggatatgtttatgtctgtttattttctattttttgttatagtgatgattgctttttataatgatttaaaataacgaggggcgaacaaatatggtagagacctgaggctaagtctgggaatggtttgtgagagctgggagttgaaattttatgtgttgcttttctgcttggtgtgcag

SEQ ID NO: 155545 - DNA, 1685 bp, Homo sapiens
atgaataagctatttagtattttgttgggagaaaaggttgacacccagcctaatgttcttcataatgatcctcatgcaaggcattcagatgataatggacagaatcatctagaaggacaaatgaacttcaatgcagattctagccaatttaaagatgagaacacagacattgctgaaaaggctcgaggagaaagttagaattctttgctgggttatgaccggccctcaaaaacctagagaaaaaggccaaacacgtcaaagctacttgggcccagcgttgtaacaaagtgttgtttatgagttcagaagaaaataaagacttccctgctgtgggactgaaaaccaaagaaggcagagatcaactatactggaaaacaattaaagcttttcagtatgttcatgaacattatttataagatgctgattggtttttgaaagcagatgatgacacgtatgtcatactagacaatttgaggtggcttctttcaaaatacgaccctgaagaacccatttactttgggagaagatttaagccttatgtaaagcagggctacatgagtggaggagcaggatatgtactaaccagagaacccttgaagagatttgttgatgcattgaaaacagtcaagtgtacacatagttagctccattgaagacttagcactggggagatgcatggaaattatgaatgtagaagcaggagattccagagataccattggaaaaggaaactttttccatccctttgtggccagaaccaccattttaatttaaaaggttatctacctagaacgttttggtactggaattacaactattatccctcctgtagagggtcctgggttgctgctctgatcttgcagtttcttttcactatgttgattctacaaccatgtatggagttaggaatacctcgtttatcatcttcgtccatatgggttatttatacaggatattcaacctaccttacctgaacgtatactaaaggaaattagtccaagcaaacaaaaatggaaggatacaaaagtgaagtttagggaaatccttgaaagaaaatcatgaatgaacaaaggtaatatgtcttagcactgcactgaaaaaggacttctgcatttctgacatagaacactggaatcccagtgaggaattctaagtgaacattcgcttatagaaacctttcacatgaatgactataaactgaagctttaaatgagctgtgaagtgtgttaaaatgtgttttgatacagtaatatattaatgagagctatatatatgaggaacttgtgttttttaaatggtggccaggtagaggaactagaaaagagattttgttgcctgttttctgaccatctgtgttattgtcactgagaaactaaaatagtaaatttacctaaaactacactgcaccatgttagtaataaacagatctgccttaaagaaaagaaaattttagaaagaaatattgttgcctcagtgttgttaatatagctcaaaaattgagtttatatttgcagtatgctataaatgatacccccctaccacacccacacacacagtttttgtctaatgaaaatgttgctgtgattatttataattggtagtatttcttccagaagaagctaaaataagactggcacttaccctgaagtgcattaataaaaccaccctttaaaattaaaaaaaaa

SEQ ID NO: 155546 - DNA, 478 bp, Homo sapiens
tttaagagataagagtgtcggcgtcagcgtggagtgcaatgatgcaatcacagctaacagcagctttgacctccttgggctcatgcaatcctccctcctcagttccccaggtagttcagactacaggcaggtactactacactcggctgaattttaagtttttaatcttgtagagatggggtcttactatgttgtccaggcaggtctcaaattcctggcctcaagcgatcctcctgcgttgacctcccaatgggctaggatcacaggcatgagccacattaccagggcctaatgatgcagctttgttgcttatgcagctctttaaaaaagtgactcagggaaataaccatttaggtaaccatttaggataaccatgcttagggtggtataatataccaagcaaatctaatcaggtaaccatggtattatgcatgtgacattctagctaaaaatatcctaccatcaaaatacattactg

SEQ ID NO: 155547 - DNA, 1080 bp, Homo sapiens; identical to SEQ ID NO: 148021

SEQ ID NO: 155548 - DNA, 1373 bp, Homo sapiens
tttttttttttctgagatgtagtgtcactctactgccaaggctggagtgcagtgccacaatctcagctcactgcatcctctgcctcctgggttcaagcagttcccctgcttcagcctccctagtagctaggattatgggtgtgcaccaccacacccggctaatttttatattcctagcagaattagccaggcgtggtggcgggtgcctgtaatcccagctactcaggaggctgagacagagtttcaattttgttgcccaggttggagtgcaatggcacaatctcagctcaccacaagcttttcctgctgggttcaagtgattctcctgcctcagcctcccgactagctgggattacaggcatatgccaccatgcccggataatttttgtatttttagtagaggcggggtttcaccatattggccaagctggtctagaactttggacatcatgatccacatacctcggcctcccaatgtgctgggattacaggcgtgacacccgtgcccggcccaatttttgtatttttagtagagacaggggttcaccatgttggccaggctagtcttgaactcctgacctcaggtgatctgcctacctcagcctcccagtgtgagccaccgcacccagcctggattgttgaattcaatgcttgggtcacctccagattcattttcacagtctttcatgttttggtcatactacattgtattttgctgcccatatgactgatctttttttgttaaatgtgagatacttgttaaaaaatatttagcaatgaattgaggcctaggtagcatgttatcttgctgcagaaggagatggggagtctacttctgggggatgggtcaggggtcctccgtacagggctggaaattgagggtcgtctctgcagggctcagtccctacaaagggccagggtattttcctgtccacctctattctgatgcatgactcttctgggtctcaaccagagccagtggacttcagtatgggtcgctttcattggcagaccctcaatccacttgttttccatctaatcccacgcatgtgtgcaaaagctgctgtgcttctttgcatctcagtagttccttctggaattcagcaatgaaactcagggaaatgggttccaaatgcgaggctgactttcgtcctgggtttccttcttctccatcttcacctcatgtctgtttactgccatgttagcaatttgatgtattcaatcatgggttttatattctgtttggtgtcccccattgttctcatcggagatcagaagcttcagatgcacttatgtcaactcaagagtagaatgcttccttagcttccctccagagtcaggtttttgtgtttctagttcccaagtgcacagca

SEQ ID NO: 155549 - DNA, 1304 bp, Homo sapiens
  misc_feature (1)...(1304): n = a,t,c or g
ttgagacggtgtctcactctgtcgcccaggctggagtgcattggcaccatgtgggctcacagcaacctccgtctcctgggtccaaacaattctccaacctcagcctcccgggtggctgggattacaggcacccaccaccacatccggccaatctttatatttctagtagagacagggtctcactatgttgccaaggctgatctccaactcctggcctcaaatgaccctcccacctcggcctcccaacatgctgggattataggcaggagccactgcacccggccgaggatatattaatggagtaataagttataatacaagataacatgatccaagtatcaaatgtgtgtttcaattaggtagtacttcaggaattcttagactaaaattaccaccaagaatggaaatattggaaaaagcttcatgcaataagtagccaaaatttgaaggaaagacaggacttagatcaaagtaaagtagaaaaaaaagcactacaacctggagtaatagctttgacaaagcttataagagcaagaaggtttgggggaacagtaagtaaaccatatctggctttggcaaatggcttcatgtagaattgcagagttgggagcaaaccaatactttttgagtaacatttgatttcttacatttttcattttttaatccaaatttttagtgtataaagtnnnnnnnnnnnttaaaataatggaacagagatcaggcgaagttacttctgtcaacaacaaaaaatatcccacctataaaaacatggagatctctctgtcctataacctctacaatagttattcaggccttgtacttaactacacagccaagtttttagaattagaaacttgatttagaactctagcaagtgaggtgtttttcattttaatagaaacatcaacttttctattaattcctatttctaccaaattctctaccaagcaacaactctctttcctccctcttttgttcaacaccttcatgagtttcatgaattataacctttgagaacacctgagtcacaagtatacaataaaaatgaggatgcatattattcatctcccaggtctgtcaccaatgtatcagaagcctaaggcagtcagttccacccagggaatatagacaggtcactttaaaaagaggcctcctctctaaattttactcaaatactgctattctcaaaatccccttccatatatcaggagggaaaaaataagcccactgtcattcccaacactgccattctatggtcctgccttttctgaaacttatattaacacttaaattttattagtaac

SEQ ID NO: 155550 - DNA, 695 bp, Homo sapiens
gagagacagtcttgctctgttgcccgggctggagtgcaatggcacgatctcggctcaccgcaacctcccctcccaggctcaagcgattctcctggcctcaacctcctgagtagctgggactataggcgtgcgctaccacaccctggctaatttttgtatttttagtagagacagggtttcaccatgttggtcaggctggtctcaactcctgaccttgtgatccacccacttcagcctctcaaagtgctgggattacaggtgtgagccaccgcgcccggcctgttttacgtttttaacagaattattattattttgagacagggtctggctcagctgcccaggctggaatgcagtggcacgatcatggcaatgcagcctcaacctcccaggctcaagcaagcctccaacctcagcctcctgagtagctgggaccactggcatgcaaccacacccggctaatacaactgtttgtaaaactgagagaaagcaagtctttagaatgcacttactaaataacacgaattacagggaacagtaacatactgcatatagtgatgtagactgtgggaaactacaaggacaaatgagccagtcctacctcagaatagttccagccagataaaagaacccacagaattatggttatgttataaaataaagcaattaagttttagaaatccatcttgaaatatttg

SEQ ID NO: 155551 - DNA, 385 bp, Homo sapiens
gaggcagggtctcactctgtcgctcacgctggagagcagtggtgcgattacggctcactgcaacatcaaccttcctgtactcaagcaattctcccaccttagcctcccaagtagctgagactacaggtgtgtgccaccatgcccggctaacttcttaataattttaatgatttctgtgtcaattagggggtctgtatagaacagttatcagtttgtttcttcctttactttttattcactggcaaaatttgaaatatttgagatgaagtgtaaatagtccacgtctttttctccttctagattctaacttcacatggttaggaaagatcaagtctattcctagtttgctaagagtttttatcgtgagtagatgttaaaattttca

SEQ ID NO: 155552 - DNA, 2034 bp, Homo sapiens
atggatcctgaagtgaggcttagtagccccccagggaagccagaagattcatccagtgttgatggtcagtcagtggggactccagttgggccagaaactggaggagagaagaatgggccmgaagaagaggaagaagaggactttgatgacctcacccaagatgaggaagatgaaatgtcatcagcttctgaggaatctgtgctttctgtcccagaactccaggaaacaatggagaaactgacttggctggcatctgaaaggcgcatgagtcaggagggtgagtctgaagaagagaattctcaggaggagaactctgagccagaagaagaggaggaagaagaagcagaaggaatggaaagcctgcagaaagaggatgaaatgacggatgaagcagttggagactctgctgagaagcctcctacttttgcttcacctgagactgctccagaagtggagaccagcagaactccaccaggagagagcatcaaagctgctggaaaaggccggaacaatcatcgagctcgcaacaagcggggaagtcgggctcgggccagcaaggacacctccaagctgctgttgctgtatgatgaggacattctcgagcgagatccactcagggagcagaaggacttggcctttgcccaagcttatctgaccagggtgcgagaagccctacaacatatccctggcaagtatgaagacttccttcaagtcatctatgaatttgagtcaagtacccagagacggacggctgtagatctctacaaaagcctgcaaattctgctccaagactggcctcagctgttgaaagactttgctgctttcctgttacctgagcaagctctggcctgtggattatttgaggagcagcaggcttttgagaagagccgcaagttccttcggcagctggagatttgctttgcagagaacccctcacaccaccagaagattatcaaggtcctccaaggctgtgcagactgccttccccaggagatcaccgagctcaagacacagatgtggcagctcctcaagggccacgaccacctgcaggatgagttttctatcttctttgaccacttgcgcccagcagctagccggatgggtgactttgaagagatcaattggactgaggaaaaggagtatgagtttgatggctttgaagaagtggccctgcctgatgtggaagaagaggaggagcctcccaagatacccacagcctcaaagaacaagaggaaaaaagagatcggggtccaaaatcatgataaggagactgaatggccagatggggccaaggactgtgcctgctcctgccatgaaggaggtccagattccaagctgaagaagagcaaaaggcggagctgtagccactgtagcagcaaggtctgtgacagcaaatcctacaagagcaaggagccccatgagttggtgggcagcagcccccaccgagaggctagtcctatgcctggtgctaaggaagctgggcagggcaaggatatgatggaagaggaagccccagaggagcgggagagcactgaggccacccagagcaggactgtcaggaccaccagaaagggagagatgcctgtttcaggattggcagtggggagcactttgccatcccctcgagaagtgactgttacagaacggctcctcctggatggcccaccacctcattcaccagagactcctcaatttccccccacaactggagctgtactgtacactgttaagagaaaccaggttgggcctgaggttcgctcctgccccaaggcatcccccagacttcagaaagagagggagggccaaaaggcagtgagtgagtcagaggctttgatgctggtctgggatgcatcagaaactgagaaattgcctggtaccgtgggaaccccctgcttccttcctgagtcctgtttcctcaaagaccagagatgcagggagaagacatgtgtccgggaaaccagacactcaagagagatggctgccctcaagcagagctcgggtgaagacaagagacaggacgtgccctgtccatga

SEQ ID NO: 155553 - DNA, 923 bp, Homo sapiens
gattcagagccttgctctgttgcccaggctggagagcaatgacgtgatctcggctcactgcaacctctgtctctcgggctcaagcaattctcctgcctctgcctcccaagcagcagggattacaggcgtccgccaccatgcctggctaatttttgttatttttaatatagatggggttttaccacgtcggccaggccagtctgaaactcctggccttgtgatccacccacctcagcctcccaaagtgctgggactacaggagtgagccaccaagcccagcctattactattttttaaggcatttaaagtatggtcaggtgattcaatttaatgtgtaaacgagtttaatataataagtaaaatttcatcctttccatctcatttcacctcaactccacaatcatgtcccataatgcattcacaaatcaaatacaaatgattttaggactatccatagtgcagcaagcaagcaggtggcatatcaataagtgatacatattactgagtccacgaaatacttgagaatattctccagctctcacctggagttctgggacagaaagcacagattcctcagaagctgatgacatttcatcttcctcatcttgggtgaggtcatcaaagtcctcttcttcctcttcttctggcccattcttctctcctccagtttctggcccaactggagtccccactgactgaccatcaacactggatgaatcttctggcttccctggggggctactaagcctcacttcaggatccactgaggacaaagcattctttgatgatcctttgttcacatctgtccctgaggttccttcatcagggggctcttgagaagatgaaggggttttagttggctgactcctctcctcttccttctgtaagactgtatgtttcgttacttctccagcactgctcaa

SEQ ID NO: 155554 - DNA, 487 bp, Homo sapiens; identical to SEQ ID NO: 148384
  misc_feature (1)...(487): n = a,t,c or g

SEQ ID NO: 155555 - DNA, 1050 bp, Homo sapiens; identical to SEQ ID NO: 144729

SEQ ID NO: 155556 - DNA, 794 bp, Homo sapiens
cagcccgttaaatttcaaaaaattaaattgaaccagagtcccctggccccgttgaaggaaaaataaataaaaatgtgttagtgccaagtagtaatttttggcattaggggattgatacaattttgcccttaaatcagaattgaagtttaaaaaccaggccatagtttcccttaataaattttttttttttttttttttaagatggagtctccgccctgtcgcccaggctggagtgcagtggcgcgatctcggctcactgcaaacctccgcctcccgggctcacaccatcctcctgcctcagcctcccgagtagctggaaccgcaggcgtccgccaccatgcccggccaaatccttttggatttttagtagagacggggtttcaccgtgttagccaggatggtctcgatctcctgacctcgtgatctgcctgcctcggcttcccaaagtgctgggattacaggcgtgagccaccgcacccggcaagaaggccattcttagcgctaagaggagaatggcttaggataatgggtagtaaggggataaagatactttatgaaacttgtgcaatattctagatttttaaaaagtgttggtggccaggagctattgcagtagcagtgaatgtaacttaaactcaaggccaaaataatgggggctggaggggacaccacaagcaaaaggagagaaaagataactcttaggttcctctagagaaattgggaaagacagcatttattgaaatgcggagaaagactaggaaagaaaaggggaacaggtctgaggaagaaaccaa

SEQ ID NO: 155557 - DNA, 543 bp, Homo sapiens
cgggcatttaccacacattgagaactggccaggaagggaggggctcaattaaacaacagcggttattacaacggccactgccatactttttcctgttcatttttccttcgtttctttacatgattgagattaaacactagctatcattttacattttactttttgcatttaacattgtatcataacctttctcatattttatttttttttttccttttgagacagtgtcttactttgtggcccaggctggagtacagtggcatgatcatagctcactgcagcctcgacctcccaagatcaaggcgattctcccacatcgggccccctgaaggtaactgatagggtgtgtggtcaccacacctaggctaatttttacattttttgtgggggatgggggggtctcactatattgctcaggcggatcccaaactcctgggctcaagggattttcccaccttggcctcccaaagtgctgggattacaggcatgaggtaatttaattttctatgatcatcatttctactttttttggccctcatctta

SEQ ID NO: 155558 - DNA, 604 bp, Homo sapiens
gaaaaggaagcataaaagttttactaccactgaatctgctaggactttttattgggtttagtgatgcagttttcaatgaaacatgctgctttcggattaatgcctctagttaaaggaaaatctacaagtacttaaaaatcaaatcaaaattattggatccccggagtggcctacaaggcccctttaaataaatcccagtcttcctttatgggaatttggttaaccccctttatttaagcccctctcttggcttaatgtggtccttgtattggatatttggaccctgtatacacaatactataactcaaattgtttcttctcatctagaagcaatcaaactccaaatggtgctgtaaacagaaccacacatagacacatcattcttctgaggacccttagattgaccccaggaggagccctagctgctcttccccattcgacgcccttttgcaacaagaagtagccagaaggagtcgtcgcccaaaactccctaacagcagttagtgtggcatctccacaggggggaatgttgtaggagttattaagaaattattttaggcagatagagaggaaaatgggtccttgggtccttggggaagttttt

SEQ ID NO: 155559 - DNA, 1586 bp, Homo sapiens
  misc_feature (1)...(1586): n = a,t,c or g
ttttgacagagtcttgctgtcgcccaggctggagtgcaatgatgcaatctcagctcactgcaacctctgcctcctgggttcaagcagttctcctgcctcagcctcccaagtagctgggattacagacacacagcagcacacctggctagttttttgtgtttttattagaggcggggtttcaccatgttggccaggctggtctcgaactcctgacctcaggtgatccacctgcctaggcttcccaaagtgttgggattacaggcgtgagccaccacacctgggcctgggtggacccagtttctaagggcttgcatttgcatatcaaaggttgcctgcttggcactaagggcctgggctttccttcttgacaagaaacttttctggagctgctttaaaagaaatgaaaacttcccaaggaccccttttcctctctatctgcctaaaataatttcttagtaactcctacaacattacttcctgtggagatgccacactnnnnnnnnnnnnnnnnnnnnnnnnnnnnnnnnnnnnnnnnnnnnnnnnnnnnaaaaggggcgttgaatggggaatagcagctagggctccccctgggatcaatctaagggtcctcggaagaatggcctgtccatgtgtggttcagtttacagcaccatttggagtttgattgcttctaggcgagaagaaacaattcgagttatagtattgtatatacagagtccaaatatcaatacaagacatataagcaagagagggcttaataaaggcgttaaccaattccataaagaagactggaatttattaaagagggtttgtagccactcaggggctgaagctggcattttttcctgagcctatcaataattttgatttgatttttaagtatctgtaaattttcctttactagaggtattaatccaaaagcggcatgtttcatttaaaaactgcatccactaaacccaataaaaagtcctacccaggctccagtggatagtaaaactttcatgcttcctttttgttagtaactattatccctgctataaggataatgattaagcaaaatatgaccagcaatggaaactctctgtttaatacttcagttagaaggtgcctaccctgtaataatccctattgccaaataatagagtgaagtatagcctatttcccataagtgtggtgtggtagataatttcccatcctaaacttttaccctgtcaagatatagaattcccctttgggggggtctatgaagttccttggttttattttcctaaacgaagaaacctctgggttatgggcaccctactcacttttattacctggtagaatttgcagaataattgcccagaactaatatattgattcagattttatattacccatcccttaatttttcttccaagctgcaggagatcactgcttgattcacaggaataagcagggttagtctaaaatgtaggcgaaaagcttgaaaacaaaaacaaaaaacaaaaaaatgtatgataagctttggagcacaatttttctctctagtcctcgttcttggtaaaaacaagttatgaataaactgtagtcttataaaaaaaaaa

SEQ ID NO: 155560 - DNA, 812 bp, Homo sapiens
  misc_feature (1)...(812): n = a,t,c or g
gacatttgccaggtgtggtggctcacacctataaacctagcattttgggatcaagtaattctcctgccccagcctccaatgtagctgggactacaggtgcatgacaccatgtctggctaatttgtttttttttaaactagagggagggttttgccatgttgcccagactagtctcaaactcctaggttcaagcagtcctttcatcttggcctccagaagtactgggattacaggcatgaaccaccatgcccagccaacttctaaactgatcaataagggagtagcattcaatcacccacaggttaactcactctagagagaaatcttgtgagtgtaatctgtatggtaaaactttgagctcaaactttccccctaccaaaaaaaaagtatctactggggagctgcccaggtaatgccagtagctgtaggaaagccctccagtgaatggcctccagggagtcacatggacaactcacaaataaggggaaaccctgtgtgtggcatcaaaaatggaaancccaggggacactcattcccttaagtcacatttcggagatcatacaacagaggaatatgttgagtatacacagtgttgaaaagcctgtgacacaaacagtcatattaccaagcacaagacagtatagtttggtatgctataaaagccttgaatattctctccatttttaagaagtgagattcatactagaaaaaccattgaattccatcagtattagaatgtcatttttccacatttttaggaacctaactcagtgtaagataacaatttatacaatttattttttgagacaggg

SEQ ID NO: 155561 - DNA, 363 bp, Homo sapiens
ggcacgagaggaaggctcagcctgccggggagggccgaacccacatgacaaagagtgactccctgccctccttccgggtctccaccctgcctctggagtcacaccaccccgacccaaacaccatgggcggggccagccaccgggacagggctctctcggggactgccaccgtacgggacaccagagggatagaccctgccccagtccatgcttccccaactaggaaccgcgaacgagggcagacacgtgttcaagagattcccagacacactcactgaccgttccatctctatttatacggaccatcactctctacaaattcggacactgagggctctttctcaattataaactacatccgcg

SEQ ID NO: 155562 - DNA, 976 bp, Homo sapiens
ggcacgaggaaattacagttaaaaaagatgatttaaaaccattattaaagtaagattcttgtgtataagagtgtacagtctatgttgcaagcttttaacctattgtgatcatttccacagtttagattttgaagaatgtgctcacaaattgctgaaaatggagtttcctgaaagccaaacaaaagaactctgcaacatgatacttgattgctgtgcccaacagaggacatacgaaaaattttttggcttattagctgggcgattttgcatgctaaagaaagagtacatggaatcctttgaaggtatattcaaagaacagtatgataccatccatcgcttggaaacaaacaagttgcgaaatgttgctaagatgtttgctcaccttttatacactgattcacttccatggagtgttcttgaatgtataaaactgagtgaagaaaccactacatcatccagtagaaatttttgtcaaaatatttttccaggaactgtgtgaatacatgggtctgttctaaaccttattgctagattaaaggatggaaactctggcaccatttttttgacgaatattaccccagagatgatcctagaatcactcgtgttgccattatctttttttccttctatagcgtctggatgccttacctactgtcctgtatcggcgctctctagtatccctctaaggcctctcgtagttgcgctcctcttgcctatccccatatttcaccatgatcttctgctggagctttttagactgcccttcttctacaacgatactctcgtcctcccgttcgtctaacctctaccactatgtagatagctcttctcctccatatctatctccgcctctcctctctcacctctctttctattcacgcggtgttctgccccgttgccactagttctccagatacacagtgtatagagcctcttctgagtcttctcgcagtcgtgtctaattcaatcattcttc

SEQ ID NO: 155563 - DNA, 1615 bp, Homo sapiens
gaggtgcaattcggcccagcagcagatgaccagctcgcagaaggccctgatgctcgagctgaaatccctgcaggaggaaccggtggagggcttccggatcaccctggtggacgagtccgacctctacaactgggaggtggccatcttcggaccccccaacaccctctacgaaggcggctacttcaaggcgcatattaaatttcctattgactacccctattcaccaccgtaccgttcagattcttgaccaaaatgtggcaccccaacatttatgagaatggagatgtatgcatttcgattcttcatccgcctgtaggatgacccacagagtggacgaactgccttctgaaaggtggaatcctactcagcaatgtgagggactaatcctattaaggtgttaatctcactggcttaatgagccccaacacctttctccccagccaatgtccgatgcttcagttatgttcagggaaatggaggagacagtaaaggaaaagacaaagaatatggcttgaaatttattagggaaaccaagttttcagccacttaaggcccgaaggcaggaaaagggtgggagttgaaggttccccacaaccctgggcgggaatacctgcatcaaaactgaggtgcccctgcaatgacgaacaggtgcagagtttgctttacgacgaacttggtatgatgaccgacattgatgatgaaagatgaggaaggaggaaagatgccgacttgttatgatgatggatgattctggggaatgaggaagccgtgacgttgctccttcagtgcccccctgtaactgcccctggcccatcctccaggcccaaagggagggggagcaaagtggggggacccccctggccatgggcccccctcaggcaaaaaaccccctattccaccaggcggggtgggggggaaaacaccaccacaagctccctgcctgacctccccccttatgggatcctcaggttggcctccctttttaatgggaccctttaatgggagagagagtaacccctcccacagaatgtcctgaattcttgcattcctttaccccttcccatcactatattgattctttttttaaaaaacatgaaccccaaactcccgccctcacttcggtctctaccagaatgttcacaagcaaaaccacgtttgggtctgtttttaagattcttgaagaattcaataagtctttccaagatgtttaaatgtgtttaaaagctgggaaccttgttgggagttcacaagtgctgcatatactgggtagcgaaaagaaaatggaaaaaaaacccacaaaacaaactttaaaaaaaaaaaaaaaagcaaatttgccaaggtttagctgctcatttacattagtgtgtgtgcattcgttcagccccatggtggtgaatatctgtttctttcctcttcctaaggggctgggacatggtgggcatcaagggactttgtgctaagcctgatgaaatgtgctccttcaatctccatgaaaccatcgtaacatggaggcctcagctgctctgaggagagaaatcagactttgttttttgaaatcgattgggatcgaaagcctgaaataaatattcatactttccatagaactgaaaaaaaa

SEQ ID NO: 155564 - DNA, 358 bp, Homo sapiens
  misc_feature (1)...(358): n = a,t,c or g
cggtgagaaggggtataagtgtcaagagactggtagcagtggagtgtataggctcatggcgacatagcatgacagggtcaggagattctctagcatcagccttctgagtgagtgggggtacaggagagagccatcacaaacagctcattgcagtgaacatggtggagatggggagtcaccgtgctggtcaggctggtaatgaactgtcgaccttgtgataggcacaaatcggcnnnnnnnnnnnnnnnnnnnnnnnnnnnnnnnnnnnnnnnnnnnnnnnnnnnnnnnnnnnnnnnnnnnnnnnnnnnnnnnnnnnnnnnnnnnnnnnnnnnnnnnnnnnnnnnnnnnnnctcgtgcc

SEQ ID NO: 155565 - DNA, 915 bp, Homo sapiens
  misc_feature (1)...(915): n = a,t,c or g
agatggagtttcactcttgttgtcgcccaggctgcaatggcacaatcttggcttactacaacctccgcctccctagttcaagggattctcctgcctcagcctcccaggtagctgggattacaggcatgtgcaccatgcctggctaattttgtatttttagtagagacggggtttcgccatgttggtcagactggtcttgaactcctgacctcaggtgatccgcccgcctcagcctcccaacgtgctgggattacaggtgtgagccaccgtacctggcagaaaatgtactttctttctcagaaatacttttaaaaaaaattgaagggtgaggagaaaaacatcttggagaagaggacccattaaaactttaaatatctgtgggaaccatttttcctgattttccctttttttaacatcatggcaaagatgggtttttttccaacaaaatttaatttaatatctttccacttgaagattttaggtttgttttcaatacttaatgaatataaaactaaaggagaaaagccaacctggaaataatttaaactttatatgaacatttcgataagagtttgtgggattttttctgtaggataatatatttgatccgggaactcaagtgcatgggaaacatggattttgatttttaaaatctnnnnnnnnnnnnnnttaaaatcatgcttccctctattgcagtatcagttatttagtcacagaatggtattttatgtaaattaaaattaggggaatgcaatgcaggtaactggttttggaatgggaatgggcagggctttatgtttggggagttggagcagggtatcttttcatcaattagaaggaaaggttgaaacttctgaatacctttatggtgggttcccttattaattgccccttgctaaaactgcctaaccaacg

SEQ ID NO: 155566 - DNA, 451 bp, Homo sapiens
tcctgcctcagcctcctcagtagctgggatcacaggcgtgtaccagcacacccagcaaattttgtatttttagtagagacagggtttcaccatgttagccaggtagtctagaactcctgacctcaagtaatccacctgcctcagcctcccacagtgctgggattacaggcgtgaaccaccgcgcctggctgcctggcctaaatttaagattttgaaaaatgataatcaggcggctgaggcgtcttctaaaaaacaagttccattctacaatcttacggaaatctgagacatcaaattcctgtgaataaaggtaatttttaaagttttagggttttagtaaactaaactagtaattctgcagtacgattaaaatttcagaaaaatgtttttatctaaaatatagttcaaatactacaatttattaggaattttaaggcggaaacgattatgc

SEQ ID NO: 155567 - DNA, 2093 bp, Homo sapiens
gacctacggggagatggccaagatcgtggatgtccccaccaagcagcttagagctccagaccccatagactccatgctctgccacttctgccacaatgtcagctttccctgtaccagaaatggctgtgttgacatggagcacttcaaggtaattaagacccatcagatcgaggatgaaagggaaagacgggagaagaaattgtactttgggtattctctcctgggtgcccaccccatcctgaaccaaaccatcggccggatgcagcgtgccaccgagggcaggaaagaagagctctttgccctctactctgctcatgatgtcactctgtcaccagttctcagtgccttgggcctttcagaagccaggttcccaaggtttgcagccaggttgatctttgagctttggcaagacagagaaaagcccagttgaacattccgtccggattctttacaatggcgtcgatgtcacattccacacctctttctgccaagaccaccacaagcgttcttccaagcccatgttcccccttgaaaacttggtccgctttgtgaaaagggacatgtttttagccctgggtggcagttgtacaaattattatgatgcatgtcacagggaaggattctaaaaggtatgcagtacagcagtatagaatccatgccaatacagagcatagggaaaggtccacttctagttttgtctgttactaagggtagaagattattgctttttaaaggcctaatattgcttcgtgggaaccacagattggttggggttgaacagtaagcacattgctgcaatgtggtaccgtgaattgcttggtacaaaaatggccagttcacaagaaggaataagaaggtacttttatcataagccagacttccgcttaagaatgccagaataatatagttccagacctgaagttgccaatccaagtttgcactcctctgggcctggccccatgttactatgtgatggaaccagcacacctcaaccaaaatttttttaatcttagacatttttaccttgtccttgttaagaatttcttgaagtgatttatctaaaataaaggttggcaaactttttctgtaaagggccagattgtaaatatttcagactgtgtggaccaaaaggccacatacagtctctgtcataactactcaactctgtttctgaagcaggaaagccaccacagacagtacataaaggaatatgtgtagctgggttcccaggccggacaaaacagatggtgaccagatttggcccctgggctgtagtttgcctgaccccctcatctaaaaaataggctatacctacaattgcacttcccagcactttgagaacgagttgaataccacgaattattcaatggatactccagtaacttctgctagaaacacagaatttagtctgtatctgacactataacacaacttgaggggaaatatgcattgaattagaatgaatcataaaaaactgattacaagaatacttgatgtttatgatgattgtggtacaagatagttttaagttatgttctatatatttgtctgctgtagtctatttgctgtatatgctgaaatttttgtatgccatttagtatttttataggtttgggaaaatatttcctaaggacccagttttagatgactcttaattccctggtagtaatattccaatttgctgtacctgcttggtggttagaaggaggctagaagatgaattcaggcactttcttcccaataaaactaattatggctcattccctttgacaagctgtagaactggattcatttttaaaccattttcatcagtttcaaatggtaaattctgaatggtttttaaaaggggtttttggaagaactttgctattaggtagtttacagatcttaataaaggtgttttatatattagaagcaattataattacatctgtgatttctgaactaatggtgctaattcagagaaatggaaagtgaaagtgagattctctgttgtcatcggcattccaactttttctctttgtttttgtccagtgttgcatttgaatatgtctgtttctataaataaattttttaagaatacctatactata

SEQ ID NO: 155568 - DNA, 762 bp, Homo sapiens
atagagttcgatagcccaagtggaggaattccctaagtgaaatctccccttcactgtttcagagctgaggaacagataggtttctcctgccttcaggttctaggatccgctgtggtttatgcatgtgtacacgtgtgtgtgtgtgttacccccttgcctcatgtaggtcattaagattctgggcactgagaaggggaaaaagaacagaaccaacctgatatttctgtctgggaaccgggtgctgaagtggatggagagaagtcatggaactgaaaaagcactgactgctctgcttaagtgtggagcagaggatcatgtggaagcagtgaaaaagctccagaactccaccaagatcctgcagaagaataacctgaatctgctcagagacctggctgtgcacattccccatagcctcagggaacagtccagactggggaggtgtggtcatattacacaggagaccctcctgttcttaactgtgggcgatgagaaaggtggtggactcttcttactggcagggccacctgcgtctgtggagaccctggggcccagggtggctgaggtcctggaaggcaaaggagcagggaagaaaggccgttttcagggcaaggccaccaagatgagccggcggatggaggcgcaggcgcttctccaggactacatcagcacgcagagtgctaaggagtgagggcttagggcactcacctcctgtttccacaggaatcttttggtcaataaaatagattgactcagaaaaaaaaa

SEQ ID NO: 155569 - DNA, 1356 bp, Homo sapiens
ggcagcgtgacagctatgcccgagagttcaccaccaccgtggtctcttgctgttccgcggagctgcagactgagagggagcaacggcaagaaatatatttctgagcggtttccaagtggtgctggaagacacagtgcttttccctgagggcgggggacagcctgatgaccgtggtacaatcaatgacatctctgtgctgagagtgactcgccgtggggaacaggctgatcatttcacccagacacccctggatccaggaagccaggttctggtccgggtagattgggagcggaggtttgaccacatgcagcagcattcagggcagcatctcatcacgggcagttgctgaccatctatttaagcttgagacaacatcctgggaggtagggagatttcggagtgcgattgagctggacaccccctctatgactgcagagcaagtagctgccattgagcagagcgtccaatgaaaaaatcagagatcggctgcctgtgaatgtccgagaactgagcctggatgatcctgaggtggagcaggtgagtggccggggtttgcctgatgatcatgctgggcccattcgggttgttaacatcgagggcgttgattccaacatgtgctgtgggacccatgtgagcaatctcagtgaccttcaggtagtgtaagattctgggcactgagaaggggaaaaagaacagaaccaacctgatatttctgtctgggaaccgggtgctgaagtggatggagagaagtcatggaactgaaaaagcactgactggtctgcttaagtgtggagcagaggatcatgtggaagcagtgaaaaagctccagaactccaccaagatcctgcagaagaataacctgaaatctgctcagagacctaagctgtgcacattgcccatagcctcaaggaacagtccagactggggaggtgtggtcatattacacaggaaggagggtgattcagagttcatgaatatcattgccaatgaagattgggtcagaggagaccctccttgttcttaacttgtgggcgatgagaaaggtggtggactcttctctactggcagggccacctgcgtctgtggagaccctggggcccagggtggctgaggtcctgggaaggcaaaggagcagggaagaaaggccgttttcagggcaaggccaccaagttgagccggcggatggaggcgcaggcgctttctccaggactacatcagcacgcagagtgctaaggagtgagggcttagggcactcactctcctgtttccacaggaatcttttggtcaataaaatagatggactcagaaaaaagtaataaaagaagggtcgccgttttaaaaggaccctttgggggc

SEQ ID NO: 155570 - DNA, 569 bp, Homo sapiens
cttcgaggcagtggaccctgtttgctgatggtcaacactctggccctgctgccccatgtccctgtggagaagtgtgaaggacgggtgccttaaaccccaaaactttccagggaccccttcagcaccaggtccctgccctgttccccatggtgcttctcacccctgaacccctcagaagctacagcccgggaataagagccagatgaagccagtgaagcctggtttcccaccctctggggcaggaggggcttgggcttccctttgaccctcttccttacctttcccagatcttcaatatttgttgtgatgtaacagccataagagctgtaagaggaactgtgggctttgggagctattcttgggttgaaaggaggggtggggggagggaatgcatgcaggggtatgaaggcagcccaaggtctcccagaggctcgggaggaaacccttttggaatacatagtgttatttgttgccattactgtgtttgtgaagataagaagctgctctgtatgctaaagctttctctcctcaataaaaatataaagggtgtgtaaaaaaaaaaaaaaaaa

SEQ ID NO: 155571 - DNA, 728 bp, Homo sapiens
tttttttttttttttttgtaaagacagtcttgctctgtcgcccaggctggagtgcagtggtatgatcccggctcacagaaacctccacctcccaggttcgagcgattctcctgcctcaacctcccgagtagctaagactacaggcgcccaccatccctcccagctaatttttgtatttttagtagagacggggtttcatcacattggtcaggatagtctcaaactcctggcctcaagtgatctgcctatctcggcctcccaaagtgctgggataacaggcatgagccactgcacctggcctgtatagtatactttaatacaacttgtttttaatcctataggcttaaaaccttgctttaagtctttaaaatgaagcatatgctcaagaggaactcacataactcatgaagaagaactataaagaataaccactggaggtttattcagtagagagagacacagagatcaaagttcggggaagaaccagggtgtctctgtgccttggtttcctcaaatgaaacagggattgataagtatcttagaggtcatagttaaaagtaattaagacaacctagctcacaataagcatccaataaggccattccctctcctcgccccatccccatgctttctttctcatttgtctagaacaacactccccaagggaacctcccaagctgaagttctccatctgcaatgtccaagctgcagccactcaccctcgtgcc

SEQ ID NO: 155572 - DNA, 714 bp, Homo sapiens
ccctgaggccggacaaggcttggtatgtgtgaggggtatcatgaaagtcaccatgactgaaatggagagagtgagagtagacagcagagaagggtggggaagagaccaaatcaggagagctgggcaggagtcagaggaccttgagccaggtgggagccacaagagggaccagtgaggaaattactctaatagtccagatgagagatgctggtggctcagccctttgcagtggtattggtggtggtgagaagtggtcagttctgggtgtcattttgaaaaaagatgataggattgtgctggcatattgtatggggcacgaaataaagagaggaattgaggatgactccaaggttttcttttttttttttcttgagatgaagtcttgctctgttgtccaggctggagtgcaatggcatgatctcagctcactgcaacctgcgcttcccaggtacaagtgattctcctgcctcagcctcccgggtagctgggattacagacacgtgctactacgcctggttaatttttgtatttttagtagagatagggtttcaccatgttgtccaggctggtctcaaactcctgacctcaagtgatctgccccactcagcctctcgaagtgctggaattacaggcgtgagccaccgtgcccggccgggctgaatatcctcaacaactttttacaaatatatctaacaaaatttcaaatacatgtgc

SEQ ID NO: 155573 - DNA, 1159 bp, Homo sapiens
ccgagacagaagatcttgctctgtcaccccaggctggagtgcactgggcacgattctcagctcactgcaacctccacctcctggggtttttaagcaaattctctgcctcagcctcctgagtagctgggattacagggggcatgccacccacacccagctaaatttttggcattttaagtagagacgggggtttcaccatcttgggccagggctgttcttgaactcctgacctcgtgatccacctgcctcggcctcccaaagtgctggggagccaccgcgctgggcctctgtttgcaattcggtaaaaatgctgtcatcagcctttaattggtgtgtgtgcagactgcacaaagaaaagtggatgagaagacagaaaacacacacggtgatgataccccacagcaacaggtgctcctccaggcacttcagccgcattccgagttccattgaaacttacaacaaccttaggcacacactacttgcaggccgattttagagatgtggaaactgaggcttggagaggagaaagcaattagcccaagggtcccctcctcagaatgagctgaagatgggatttggtactcaacaccctaactgaccccagaacattagtgccttaaaacactgtgagacactaggcaccccaaacttcaaaactctgaataacctctggtgcccagtaaagttcttgaaaagcttccttaagagacacaaccatgagattcccatttttaaaatgtacagcagccgagcaaccagcatctgaaaaagccacgctgctattattaacaatgagacaacagttctctggagaaaaagagaggactattgaaacaaaacctcaatgacaggattctcttctgagagcacgattcatccccataatggacaaaatgcctcgcctcattgagacctccgcgccagtcttgaataagggaggagggtttcttcacaaccattcatttgggcctgtgagggacccagccaagatcttggcgtgcctgttctgacagcgacaccggcctcagcaaagccagacccagcagctccgatctctgctacttacagaccttggggtaatgcttggctgagatttggcaaggaaatgaattgcagaagtgatcaaggagaattccacaacgaattccagcagctggca

SEQ ID NO: 155574 - DNA, 741 bp, Homo sapiens
aagagtctgggtcgcactcttttgcccaagctgtagtgtagtggtgcgatcacagctcactgcaacctcaaactcctaggttcaagggatcctcccacttcagcctccggagtagctgggacctagtgtgtgcctccatgcctggctaagtttttaaaaattgttttagagaaagggtctcactatgctgctcaggttcccgaccatttttattagttgcctagtgtgtattctttcagggtttctatatgcagattctttctgtccctctctaatagccaacaggcaggctcccctgtaaaacatggacaaaagccactccaattttgctggccaaaaaggaaaagtgtccccggggcacaagggctgaagttaatggagagcaaagtggtaattatctgctctattagatcccctcttccctcccagcccaatttcatgggaggcttggtttataaaacactggctgtctgactaaacctcaacaacagattaaccataaatgcattcctggaatttacgttcttcccgcctcagtgttgtgtaaaattatcagggaacacagacccacaggggtcaggacaggaagcagcatcaactccgattctgttagggcagcataacatttcatttaacacagataaacgcatcttcaaagtcatcggcacagtgctacaatcttaaaatgcacaagctgatcctgttattctagtgcctgtatgaggttaatgcagctttatg

SEQ ID NO: 155575 - DNA, 1698 bp, Homo sapiens
ggagacagagactcactctgtcacccattctggagtgcagtggcgcaatcctggctcactgcaacctctgcctcccgggttcaagcatttctcctgcctcagcctcctgagtagctgggattacaggcacacgccacaatgcccggctaatttttgtatttttagtagagacggggtttcgccatgctaggctggtctcgaactcctgacctcataatctgcctgtctcagcctcccaaatgcttggattacaggcttgagccaccacgcccggccatgtgtgtccttttaagggaagtaccatatgtgactgctgatgggtaacatttcttgtatgcaggcaggaaaacctgcaggctatacgcaaggtatgtggaataaaagactgtggattgaagggggaaaagttgataatacatacccatgataagaattcatattttctctttctttggctcttcatacagaagcaagttccagcagagaaggttagcagttactgcacttaaaagtttacgattgagggtttttggttggtttttttgtttttttgttttttcatatttcactgttgctgaacattgatttagtcttccaaaatggacatcactagtaagtgcactgaatactgaaatacgctgattggcaagcatatatctgtagctagaatttttttaaccgtaattccagaatttaaaaaggtaagagatctgctttttgatagaggccttttaaaaagactatataacatttctatttggctgtttatgtgaatgctcagggaatttggacatgtgttttatacagaagtggctttttatatttcttcaagtgataaattagcattaggacatatcagatagaacaggccagtttcctgatgagattggtagagatgttacggtaggttcatccttcctttttccatgttatatgtggagaagtgttaaacttgctcaagcaaatgggagtaggagataggctgaaaatagagattgctacaccattctattttgttttcatgcctgttttttctccaatcctatatggacatttgagaaatggaccacaaatctgagagggatagagtaaaaagaggcattaatgtatgtactcacaagttagacctattttgctgttaaaataggtctggtcttgtcataggtcataggaattgtgtagtttgagttgctgcgagaaagagtcaagaacttagacttgaatgggaaggccaactggtgagggaagtggggtattatctactcaaatgttctaagctaatacaaaagaattacctggcaagcatccccctctgcccttcttgagattctgaatgaacttagaatcagatcaatggtgagacccagttatgtaactttcctttgaagttctaaaggataattgaaaataaaagtagtctggcatgtttaacagtaaggagtgacactaaaaattttgaatataacagtaatgtggcaactatttataatagacctatttatgttttgagaactaagtaaaacgcctatgaaaaattcacatagagcacgtaggcaccaaatgagaatcatttcgtgctttctaattaatgatactaggctcgtatcattgcttacaactatgtcgaaccagaactcccaatattcgcattctgaaatgtctatggccctatggctacggatggacttggtatattcc

SEQ ID NO: 155576 - DNA, 1411 bp, Homo sapiens
ttttttgggatggagtttcactcttgttgtccaggctggagtgcaatggcgtgatctcggctcaccacaccctctgcctcctgggttcaagcaattcttctgcctcagcctcccaagtagctgagattacaggcatgcaccaccacacttggctaattttgtatttttaggagagatggattttctccatgcctggcaggctgggtcttgaactcctgacctcaggtgatccacccaccttggcctcccagagtgctgggattacaggtgtgagacactgctcccggccagtttctgaataagtttaatcagatgcttgctaattagtttttcctaaaatagttggctgtatttccaattcacatttctgctttttcttcctactttccaggaaggtgttgttttgttgttttcacaattgtaaacctgaaagggacttgaacttcttgtccaaggaccagagtgggcacacactgcacacactgggcggctggtacctgcctatcctgtggtaaacttggcttccaggagtttccaagcttcagcttccactagaaaacccctccttgtgtggaacaggtctttcttcattccattcctcttgggcctggggcctcacagctctggactggcttgcctggtccttcaacttcacctacagctctcgggaagtcagttctctacctgcagagccacccaccccctactcagccccacccagcttctttgatcagacccttggaccctcaaagcccctgccagaaaccacagctgcaatgctgacctggaatgctcatggccaggcctctgctcctgacagaatgggaaacaaagacttgctggtaggcagccactgcaccacctcagccagtaatccaacacgtgtttcaatgagcaccaattgtgtaccgaggccacagagctgacttaagacagagcccctgtgctgagggttcacagtctgcccaggaagggaagatccaagttcattttacacacgtagggcttaagtgctgaagtccgcaatgcatgcgagtcgcggagtgagcaggggatggcagcacagcagcagggaagaggagcctgcttcagaacaccaggcacgattagagctacagtgttaacacacaaagggcgaatgctggcagctgagcctgggcaaggggcttgcatcccaccttcctgcatccaaaccttcaagctgcccagaactgctgggtaattcccacagggaaacatcattcttttgccaagatgctatcccactcatcccccagaatcaaactggccacttcctccaggcagccttcctcacattccagctgggacagaagtcacagggagcagagagggtgagacccttggaccctcaaagcccctgccagaaaccacagctgcaatgctgacctgg

SEQ ID NO: 155577 - DNA, 1303 bp, Homo sapiens
cccacgcgtccgaacgtatcggtttggttccgtgggccatgacacacagctctgtttatgggaccttacagaagatatccttttccctcaccaacccctctcaagagcaaggacacacacaaatgtcatgaatgccacgagtcctcctgctggaagcaatgggaacagtgttacaacacccgggaactctgtgccgcctcctctgccacggtccaacagccttccacattcagcagtctcaaatgctggcagcaaaagcagtgtcatggacggggccattgcttctggggtcagcaaatttgcaacactttcactacatgaccggaaggagaaggcaccacgagaaagatcacaaagccgaaatcatagcatgggacacaatttctagcaagaagcaagtgacaaacttgaatctagttaccaaaaccaaaaccggaccctgctaaaactctgggaacgcccctgtgtcctcgaatggaagatgttcccttgttagagccgctgatatgtaaaaagatagcacatgagagactgactgtactaatatttcttgaagactgtatagtcactgcttgtcaggagggatttatttgcacatggggaaggcctgggtaaagtggtaagttttaatccttaatgctgcaccagatctaggaacttgaataggtagtgacttttttctttttcgtgggaggggtggggtgtacaatggaattgtgaatgacacttcttattctttaatgtaaatctccaatggcatcagagccataattttggatactgcatgccatgtaattctgaatcatttgataatttaccttagagcatttaaaaaaatataatcaaactaattgcccagccaagtcagtcatcctcctgggagtatatagagtcccaaggttagcgctcctgtattagactatttcaattttaggaaaatcatgaccatgtggggaaacaatgactttaaaatgctgaaattaaaatttatgctttaactggaatattttttgcttaactactcaattagaatattgtacacctgatcaatgtgtgttcagcacagatggccatgaattgtcatttatagtccaattttttatcttaatcataaaatgtttaggaatctatgaaatttaactttaggaacaaaacgtttagcagggttgattgatattatttttacattgttctggcaatccacagaaagagaagagccttaatttttaaaacccattttagtcattttatgacaattaaagttgtttaataaacatcttttttcaaagaaaaaaaaaaaaaa

SEQ ID NO: 155578 - DNA, 393 bp, Homo sapiens
catcggcttccagccccagttaactgaattccaagtgagcctccaggacctagagaagttgtcaggactggtgttttttcctcatttggatagaactagtgatatccggaatatctgctctgtggacacctgtaagctcctggatttccaggagttcaccttgtacttgagtacgagaaagattgaaggagcccgatcagtgctcagactggacaagatcatggaccacttgaagaatgtctagaatgaactcatatgattaccctatgaggcgctactacaagaaacttcaagaacttactgctatagatcttacctctactcatatttcacagccttccttactctcatacacgacgtgcctcatctctggagcgacgcctcccttcaccg

SEQ ID NO: 155579 - DNA, 1041 bp, Homo sapiens
ttttttttttttttttttctgcccaagtaactttattcgtgtcttctcaaacatttcagatcaaataatgccattttctaatcttgaaaccagcaagattagaaagagaatgaggccatcctttcactcagactttcccagtgtactcaagattgtattccaggaacgaagtcaaaccctggcctcacttcttaatttagaattaaactagaatccaggtcccattgcataactgcctaattgttttgcaacccagggagccacaaacggaagctaaaacttagcctttctaaagttatcctaagtttttactatctaaccaggcactttctcgatttttttttccccttaaaactcctaaaagtacaggtgttggtatgtcctggccggcatctggaagggctggccccgggaaatcaggggcctatctagcggggaatggtctggggcagtcacccccatcctggggggcagataggcaaaggggctgctgggcagggtgtcaagacaacacgggtacccgcaacagcagtcccgagggtctgagatttctcaatggtcagcagggtgggctggaagagtatcaccagagccactcaggaaccagccaatgcggaatggctgggtttcttattgaacatgaaatgcttcctctttggcctggactgttttgctaaaattgttagtgggttttggggcaggccagtgtatgggaaacttttttttttgttgggggggggcgatggagtctccctctgttgcccaggctggagtgcagtggcgcaatcttgggtcactgcaacctccacctcccgggttcaagcgattctcctgcctcagcttcccaagtagctgggactacaggcacgtgccaccacacccggctaattttttgtatttttagtagggatggggtttcacgatgttggccaggctggtcttgaactcctgacctcaggtgatccacacgcctcggcctcccaaagtgctgggattacaggcgtgagcgactgtgcctggccagcagctccagtttcttaa

SEQ ID NO: 155580 - DNA, 1719 bp, Homo sapiens
tacgaagatgtctttgtgcgggctatttcaaaaatgtagctcgaagatcctgttggagaacgttttgcacaatggatggtcgtggaagcccagttcacatttcatccttcctcagcacttcatgaacaggaaaccaaacttgaatggatcatttttcatgaggtattggttaccaccaaagtctacgcaagaattgtatgcccaatccgttatgaatgggtaagagacttgttacccaagttgcatgaatttaatgcacatggatttgagcagtgtggcccgacgtgaagtgagagaagatgcaagaaggagatggacaaataaggaaaatgtaaagcagctaaaggatggaatatcgaaagacgtcttaaagaaaatgcaaagaagaaatgatgacaaatccatatctgatgcacgggctcgtttccttgagagaaagcagcagaggacccagggaccacagtgacacacgaaagggaaacaggctaaggtggtgaacccctcccaattcaggaagtggggaaaaggatccccgggaaatgtgcctccctacctttgcccagttatttcagaccagcacctacccaagaggaggtggtcagcacttgttattggccctatgaacctaaaagcaaatcaaagcctcataaatcaaagcctcatcagttcccataaatgccagttgtccaaagaaaagatttgggttgccatagtccataagccatgatacatgaaaccaatgaaagacagtacatgtaataatattttcctcagtacaatttttgctggccttaactggtatcaaacgctgtcattgagatgttttcacagaacatcgacttgtatttaatcagcgtgtactccatttgcattgaagcattaacaaattacctctcttaaaatctctttaaggccttcttgttgctgttagaatagtgctatatatcaggtatgtgaccatttatttcagaaggctgaacataagaggtttctactcagcaatacttagatgtctaactgtttaattgctacagagctttatagatatttagagaaaagacttaatcaattagtaaataaaattgcctatggcgtggattctttcttgaattaatattaatccttaaattgatttttctggggattataccaaattccctttttatataaaagtatattgtttaaaacagtagctatagccattaaccaaaggacagatgatatatatatatatgatatatatatatatataagttcttttttagctgtaccctacgtacttatatcagcaccatgtatgtaggtgtgatagtactttcaaaacagcgcctccaacctggcctactctgttatttccaacctgtttgggtaggggcattttaactttcaattatggccaaacttgggatgggatttttcgaagccagacaacactatttcatcggtgtttcaaaattggaaccttgaggcttagttagtatcacactcaggccacactcagcacttgcccactcttgtttactgccttgtattctagttatttgtgtatttgtcctcccctcactagattatacgctccttgtgggcagggactgtgtcttttttcatctttgtatctttcatgcacctagcatagtgctttgcacatagtagtcactcagtgtttgttaaataaagctattagtgtcattaaaattcaaaaaaaaaaaaaaaaaagtt

SEQ ID NO: 155581 - DNA, 689 bp, Homo sapiens
  misc_feature (1)...(689): n = a,t,c or g
tttcgtggcggagtaaggcgtgccgctgcaaactggtttctggttcgggggcgagcagcccccgggaggccgagtgcatctgttggaccgtgcgaggagaagaaaaaaaatatcggccagaggagaggaactaaccgaacattcttcctccctaccttatagaggggagtggtcatctacactaaagcaaagtgttagnnnnnnnnnnnnnnnnnnnnnnnnnnnnnnnnnnnnnnctccttatcacaggaagacaatattccttgacctttaggcgcttttatattcatctcagaaacaaaattctgaactcaggacttggcaaaccaccgctgaaacttcacttctacacagaggctttctttgccagaaacccagaccagatggagtttcactctgtcgcccaggctggagtgcagtggcacgatctcggctgactgcagcctctacctgctgggttcaagcaattcttctgcctcaggttcctgagtagctgggattacaaggtgcacaccaccatgcctggctggtttttgtatttttagtagagacgaggtttcaccacgttggcgaggctggtcttgaactcctgacctcaagtgatccactgcctcggcctccgaaaatctggaattatagatgtgagccactgcgccaggcctgtaattttatgtatctttatgtgatta

SEQ ID NO: 155582 - DNA, 419 bp, Homo sapiens; identical to SEQ ID NO: 122224
  misc_feature (1)...(419): n = a,t,c or g

SEQ ID NO: 155583 - DNA, 1787 bp, Homo sapiens
  misc_feature (1)...(1787): n = a,t,c or g
ctggagtaggtgagccctggatgagccacatggtgctggggcctctgaagaaagggctggggatgtgtttggaccaccacgaagggtacctggcccctcactctggcctctggaagcctggccaacatcttcacaaaaagtaatgccccaagtcaggtgtttacactacatcaagtgtggggcagcgtgggggccaccaaggaatacggtgggcatgggcagcacggggccacactggcctggggccaactcctcatgggccatcctaggacccattctaatttcttaaaagagaaaatcttttaaaaaatgtttgcagaaacaagttggacctgaggccaaacagagcctccccaacgggttcccaggagtggcgacagcatggagtccagtcagaagttcagtttgtccactctttattaaagccaggccctcctgctgacagctgcaggacagctgctgggacccaggagggacggagacagcagatcctggccatacagggctagagctgagattcccagagccccccaagcccaccttgcccttggccctttctgaggctcctgtcccgcagagagaggagaaaacacagggccgaggtcattacccagcaccccaatgccttcctggggacccttgctctcctcaccaccccgccccgcaacctcaccaacctcacccagccaggctaactgaccgccaccacccaggccttcttcccacccaccaactaccgtgcctcctacccgcccccagccctggcagcctggctgctgcgctcagcccccaaggccatgtctacactaacgtggagggaactaggtctattagggaatgcagctgcaccaaaaatccgtttcctggccccattcacagtggcctcaaaagcgtgaggggaatgggtcttcacatgaaatacaccccagctgcccgcccagtggcttccatgggcccagtccagagggtaggatgcccaccnaggcaggggccttgcatagttgggtgcctggtttgtcactgagccacggctcaggtccacaccnccccccgaggtggacagccactgtgcaagctgccaggccacgggtgcctccactaaccaatttgtgaaatgggactctaaacagaaacactacttgttctaatgttaatgaacaaaaaccaaattaaaaggaacctgcgagtgtcctaggcccctgattaatgggatgtggggaaaagatccttcgacccaacctcaagtcgctctaagtgaagcgctgggctccgagaacgggccgtctgcctgctcccggagaggggcagcccagggaagtgaaagctggggctcagggctgcgagggcctcgggcgcccgtagatgtctgagtttgcccactccggctgagggagacgaaagtaccaaggactgagaggacaagcagagaccaaaaccgaaccggtgcggagggtgccggggtgacctcggtgcaagtgtgggtagagaagaggaggcggctcgagaataaggcttcaaactccctcaggaccctgtcaacacccgcgagacccgtctgcctggccgtaagtttggtatctggctttttctcctcctagattcttcaggccatacaagaagtggaaataaatatccgcagacgacaagtttcaagttttcccactggagctccgccctttggaaacctacaaggcctcccctcgccgcgcgcagttaaaccttcgggacagactcggatgaccgggagggcccaagtctctcactgaggaatgggaagaagtggtcag

SEQ ID NO: 155584 - DNA, 816 bp, Homo sapiens
ccatggcgacgcgggacgcggcggtggaggcggttgctacccacttgctagaggcgctgcgggtgtgatccaggctggggcgagaccatgtcggacctgggctcggaggagttggaggaggagggagagaatgatattggggaatatgaggggggtcggaatgaggcaggcgaaaggcacggacgtgggagggcacggctacccaacggggacacctacgaagggagctacgaattcggtaaaagacatggccaggggatctacaaatttaaaaatggtgctcgatatatcggagaatatgttagaaataaaaagcacggtcaaggcacttttatatatccagatggatccagatatgaaggagagtgggcaaatgacctgcggcacggccatggcgtatactactacatcaataatgacacctacactggagagtggtttgctcatcaaaggcatgggcaaggcacctatttatacgcggagacgggcagtaagtatgttggcacctgggtgaacggacagcaggagggcacggccgagctcattcacctgaaccacaggtaccagggcaagttcttgaacaaaaatcctgttggccctggaaagtatgtatttgatgttgggtgtgaacaacatggtgaatatcgtttaacagatatggaaagaggagaagaggaagaggaggaagaattagtaactgttgttccaaaatggaaagctacccaaatcactgaattggccctgtggacaccaactctccccaaaaagccgacctctacggatggacctggccaagacgctccaggagctgagagg

SEQ ID NO: 155585 - DNA, 774 bp, Homo sapiens
tagggggtacaacgggggcacttccaggaggctaaaggatctgggagatgcctttcttcgctaaacgtcccccatccatctcctccttcagctggcatggacccatcttctccagtgccaaacccagaggaggcgggcggccctcttgcccaggtaccctctgcagcgcttgcccaggtcgcaccaggaccggttcccatctcttctctccttgagggacccactcgcatcgttgcccttttaagaaagaggaaattcttctcataaacaagcgtccggacctgagcgcggagccaggccgcctgccctgctgggtccccaggaaatcggggggtcttccaagttccaccacccggcccaggttcaactctagggaaaggcctgttggcctctcctcgctgcggccctccgcaggtcctgggctggggtctgagggacccgacgaggctggaggagggaccttgggggagcctagaaacacgcctagggaaccgtctataaagtgcagcccctgaatggggcgaatgggtgcccagccgctccctaaggcagagggggctcccccgcccacacagcttcctcccacccactctccccgaaggattctggggcccctgggcgcgagccccgagcgcccgcctccccgcgtcgttccgcctggcggggaggggtgaggccggggcgggatggcgggcgtcgggaccgtctctgcccctagggggagcagtcagcagtaagggagcggtaacggcgcggcgtgggagtcgcggccgc

SEQ ID NO: 155586 - DNA, 830 bp, Homo sapiens
taaattttttttttttgagacagagtttcactctgtcacccaggctggagtgcagtggcgtgacctcggctcactacaacctctgccttccgggttcacgccattctcctgcctcagcctcctgagtagctgggactacaggcacccaccaccacacccagctaactttttatatttttagtagagacggggtttcaccctgttagccaggatggtcttgatctcctgacctcatgatccacccacctcagcctctcaaagtgcagggattacaggtgtgagccacggcgcctggcctaaaagcatctttttccttaatgcagaggttatgttgtattattagcataaatgttttttttctgggaatgctttatttccaccacagcaccaatacctggaatccttcccctggaatggtggatcgatttccagatggatgactatttaaaatgtgtatatttgcagattatccttaaagggccacctcatgccttctaatttatgtcttacggataaaaaattcaaaatgaagcataaagtaaaaactgtgtccagctttacaagtggacgcttagtaatggctgaggcaatatgtttaatgtagccaaattttacttatttgtccatgatccagtttttcacagtgcttgttaagtgctggtaattaggaaggtgggacatggtttaggtcaaaacttggaccagaaaccaacttcctttgaaacagctctaccagttataagagcaatatgctgttaggtgaagaactgtttaacagaaatatattatgtttttgcaaacaggcagctgatccaaaattgtgttgaaac

SEQ ID NO: 155587 - DNA, 698 bp, Homo sapiens
gtatgtgtgtgtggcttttgttttgttttggagacagagtctcgctctgtcacccaggctggactgcagcggcaccatctctgctcactgcaacctccgcctcctgggttcaagggattctcctgcctcagcctcccaagtagctgggattacaggtgcccaccaccacgcctggctaatttttgtatttttagtagagatggggtttcaccacgttggtcaggctggtctcaaactcgtggcctcaagtgatccaccagcctcagtctcccaaagtgctgagatgacaggcgtgagccaccacgccttgcctgggtgatccaagttttaagaaccaaggtagtcgtcctgagcaggcaatgattctagcctctgaccctcaggcggaaatctaggtgttctcagaaagtgtttagggagtggtttatgagctgctcgcagtcctagcagaggcaagaatagacaaagtgtggtgttagtagctgaaagcgctaaaattccgcccccgcaacgggtatttatgagtgacaggggtggggcctggacataagcaattttcccctggatctagccacaggattactgatgggtgatgatctgttaggccgcgtagctaagcagctaaggagacaggaggccagggctttaaaagttagagcatgctcaacagcaagagctaagcattagcattctgtgat

SEQ ID NO: 155588 - DNA, 467 bp, Homo sapiens
  misc_feature (1)...(467): n = a,t,c or g
catccctggttttaaaacattaaatggggattacggtttttcgccnnnnnnnnnnnnnnnnnatgannnnnnnnnnnnnnnnnnnnnnnnnnnnnnnnnnnnnnnnnnnnnnnnnnnnnnnnnnnnnnnnnnnnnnnnnnnnnnnnnnnnnnnnnnnnnnnnnnnnnnnnnnnnnnnnnnnnnnnnnnnnnnnnnnnnnnnnnnnnnnnnnnnnnnnnnnnnnnnnnnnnnnnnnnnnnnnnnnnnnnnnnnnnnnnnnnnnnnnnnnnnnnnnnnnnnnnnnnnnnnnnnnnnnnnnnnnnnnnnnnnnnnnnnnnnnnnnnnnnnnnnnnnnnnnnnnnnnnnnnnnnnnnnnntcctgactttttattttcagctataaaacaattatgagagccaaaggagccaggatcaccttccaaaacattttgttttgtacttctctaatttatgagcgnacgcgtggg

SEQ ID NO: 155589 - DNA, 2096 bp, Homo sapiens
ttttttttttttttgagatataagagtctcggctcagtcgcccaggctggagtgcagtggggcaatcttggctcactgcaacctctgccttccgggttcaagcgattcttgcgcctcaacctccccagtggctgggattacaggcatgtgccaccacacccagctaattttttttgtatttttagtagagacaggggttcaccatgttggccagggctgggctcgaactcctgacttcaggtgatccacccacctcagcctcccaaagtgctgggattacaggcatgagccaccgcaccgggccagtttcctgactttttattttcagctataaaacaattatgagagccaaaggagccaggatcaccttccaaaacattttgttttgtacttctctaatttatgaggcattctttcttctcaaagcaggatattacagtgcagattaaaactggatattaaagttaatggtgacaaattattaagtagtttgaagaaatccttagaatatcagataaagagagacttaatggcagaagaagaagtctactggggttcaaagcttaggttttatatttctgccatggtatctcaacactttctctgggatagtacgatgccctaaaaaatacctgtgttaggcagacaagtctaaatctcctttctcaggacaataggacaaaactgaacttgaggcaatagttgaagaattttaccccgtttttcaagtttaattttcttgagatcagaaaagtaaaattagaaagtagaatccttcatgtaaaaaaatatatgcgtatcacaatttattaaactctaacatctaagagcaaaaacaccaggattaagtaagaacatgcatgaactaaaatttacatagatattcaaagtaagttaaatttaccagagtcctgcatctggcctctcccatgccattatcgctattttcgcaatttgttttgttcaggaagcctctgattttaatatttaaagtgtcacctgagaagagtaacctcaattcttcatgttttctcaacaatcttagaggtgttggacatcattaataaaatatactaaattatcagagaacttaagaacgctaagattctgatgagttcctttaccattttcagtcactttctaaaagggatttaacttcacattatcaaataacattttacactaaaaacacaatttatatagccctaaaataatattacttgagagatctaaatgaattccaccaatgcaaacgaagtttatatactgtattagtaatttgataccacggtattccatggagaaaaaggcaaagagaatctaaatatttagatctgtgaaagatactagaaaaaaatagatttttaaatgcttctgatcctctcaaaatactcttgattttgactctatagtctatagaacacacaaaaaactgtaaaatgcatttgggaagagatcatgccatactcaaagaaaattctacaaattttgacagcattaaaaaaactgacttaagatatattttgttattgagaaaaaagtgtgcacattcaagaacataggatgtgtaatatttgtgataaattaagtcatactttgtgcttatactatgccctttattcaggagtgcaaaacacttaatcaaaaagagcatccttcacatatttaaagagtacattgaggcacagaaagtttgcccaaggcaagatagaaagtcgggtttatagacacaaaatgatctagaattcttcatgtccaattccttaaaatacaaactgtagaatatttgtaatgcctccatcttattttatcaaacattagtaattttactattataagtttatgcataagtactgtgtgataggtaatgcccataaggtttttatcatgttttaaggtaacttgtgcatggaataggaaaagttaatcaaatgtaatcaattcgcttttgctttttaacaaaacttaaataaatgagctatttgaggacagttctggaaattcttgccttgatttttctccaagattttagatatgtagttcacatgtgaacattaatatatgaccaattattttatttattggcctctagttct

SEQ ID NO: 155590 - DNA, 6126 bp, Homo sapiens
caaactggactacaagcaacaacaaagcattctggattccctgtgaggatggataatgctgtaccgattgtaccccaggcaccagctgctcagccactacagattcagtcaggagttctcacgcagggaagctgtacaccactaatggtagcaactctccaccctcaagtagccaccatcacaccgcagtatgcggtgccctttactctgagctgcgcagccggccggccggcgctggttgaacaagactgccgctgtactgcaggcgtggcctggaagggactcaagcaaattctcctgccttcaaactttgggcaacagttggcctgggggtaagctctacacaactcttgtccagcccacagcaatgattccagaggccatggggagtggacagcagctagctgactggaggaatgcccactctcatggcaaccagtacagcactatcatgcagcagccatccttgctgactaaccatgtgacattggccactgctcagcctctgaatgttggtgttgcccatgttgtcagacaacaacaatccagttccctcccttcgaagaggaataaagcagtcagctccagtctcttccaagtcctctctagatgttctgccttcccaagtctattctctggttggggagcagtcccctccgcaccacatcttcttataattccttgggtccctgtccaagatcagcatcagcccatcatcattccagatactcccagccctcctgtgagtgtcatcactatccgaagtgacactgatgaggaagaggacaacaaatacaagcccagtagctctggactgaagccaaggtctaatgtcatcagttatgtcactgtcaatgattctccagactctgactcttctttgagcagcccttattccactgataccctgagtgctctccgaggcaatagtggatccgttttggaggggcctggcagagttgtggcagatggcactggcacccgcactatcattgtgcctccactgaaaactcagcttggtgactgcactgtagcaacccaggcctcaggtctcctgagcaataagactaagccagtcgcttcagtgagtgggcagtcatctggatgctgtatcacccccacagggtatcgagctcaacgcggggggaccagtgcagcacaaccactcaatcttagccagaaccagcagtcatcggcggctccaacctcacaggagagaagcagcaacccagccccccgcaggcagcaggcgtttgtggcccctctctcccaagccccctacaccttccagcatggcagcccgctacactcgacagggcacccacaccttgccccggcccctgctcacctgccaagccaggctcatctgtatacgtatgctgccccgacttctgctgctgcactgggctcaaccagctccattgctcatcttttctccccacagggttcctcaaggcatgctgcagcctataccactcaccctagcactttggtgcaccaggtccctgtcagtgttgggcccagcctcctcacttctgccagcgtggcccctggctcagtaccaaacaacaagttgccacccaaatcttacattgggtctttccgaggctcaacaatttacactggatacccgctgagtcctaccaagatcagccagtattgctacttatagctggtgagcatgagggaggaggaatcatggctaccttctcctggccctgcgttcttaatattgggctatgggagagatcctcctttaccctcttgaaaatttccttagcccagcaacttgttcctgccaggggccccactgaagcagaaggtttttcctctgggggaacctgtcctcagtgttgactgcattgttgtagtcttccccaaagtttgcccctatttttaaatttcattatttttgtgacagtaattttggtacttggaagagttcagatgcccatcttctgcagttaccaaggaagagagattgttctgaaagttaccctctgaaaaatattttgtctctctgacttgatttctataaatgcttttaaaaacaagtgaagcccctctttatttcattttgtgttattgtgattgctggtcaggaaaaatgctgatagaaggagttgaaatctgatgacaaaaaaagaaaaattactttttgtttgtttataaactcagacttgcctattttattttaaaagcggcttacacaatctcccttttgtttattggacatttaaacttacagagtttcagttttgttttaatgtcatattatacttaatgggcaattgttatttttgcaaaactggttacgtattactctgtgttactattgagattctctcaattgctcctgtgtttgttataaagtagtgtttaaaaggcagctcaccatttgctggtaacttaatgtgagagaatccatatctgcgtgaaaacaccaagtattctttttaaatgaagcaccatggattctttttttaaattattttttaaaagtctttctctctctgattcagcttaaatttttttatcgaaaaagccattaaggtggttattattacatggtggtggtggttttattatatgcaaaatctctgtctattatgagatactggcattgatgagctttgcctaaagattagtatgaattttcagtaatacacctctgttttgctcatctctcccttctgttttatgtgatttgtttggggagaaagctaaaaaaacctgaaaccagataagaacatttcttgtgtatagcttttatacttcaaagtagcttcctttgtatgccagcagcaaattgaatgctctcttattaagacttatataataagtgcatgtaggaattgcaaaaaatattttaaaaatttattactgaatttaaaaatattttagaagttttgtaatggtggtgttttaatattttacataattaaatatgtacatattgattagaaaaatataacaagcaatttttcctgctaacccaaaatgttatttgtaatcaaatgtgtagtgattacacttgaattgtgtacttagtgtgtatgtgatcctccagtgttatcccggagatggattgatgtctccattgtatttaaaccaaaatgaactgatacttgttggaatgtatgtgaactaattgcaattatattagagcatattactgtagtgctgaatgagcaggggcattgcctgcaaggagaggagacccttggaattgttttgcacaggtgctggctggtgaggagtttttcagtgtgtgtctcttccttccctttcttcctccttcccttattgtagtgccttatatgataatgtagtggttaatagagtttacagtgagcttgccttaggatggaccagcaagcccccgtggaccctaagttgttcaccgggatttatcagaacaggattagtagctgtattgtgtaatgcattgttctcagtttccctgccaacattgaaaaataaaaacagcagcttttctcctttaccaccacctctacccctttccattttggattctcggctgagttctcacagaagcattttccccatgtggctctctcactgtgcgttgctaccttgcttctgtgagaattcaggaagcaggtgagaggagtcaagccaatattaaatatgcattcttttaaagtatgtgcaatcacttttagaatgaatttttttttccttttcccatggggcagtccttcctgcacatagttgacattcctagtaaaatatttgcttgttgaaaaaaacatgttaacagatgtgtttataccaaagagcctgttgtattgcttaccatgtccccatactatgaggagaagttttgtggtgccgctggtgacaaggaactcacagaaaggtttcttagctggtgaagaatatagagaaggaaccaaagcctgttgagtcattgaggcttttgaggtttcttttttaacagcttgtatagtcttggggcccttcaagctgtgaaattgtccttgtactctcagctcctgcatggttctgggtcaagtagaaggtactggggatggggacattcctgcccataaaggatttggggaaagaagattaatcctaaaatacaggtgtgttccatctgaattgaaaatgatatatttgagatataattttaggactggttctgtgtagatagagattgtgtcaaaggaggtgcaggatggagattgggagatttcatggagcctggtcagccagctctgtaccaggttgaacaccgaggagctgtcaaagtatttggagtttcttcattgtaaggagtaagggcttccaagatggggcaggtagtccgtacagcctaccaggaacatgttgtgttttctttatttttttaaaatcattattattgagttgtgtttttcagcactatattggtccaagatagcccaagcagtttgtataatttctgtcactagtgtcatacagttttctggtcaacatgtgtgatctttgtgtctcctttttgccaagcacattctgattttcttgttggaacacaggtctagtttctaaaggacaaattttttgttccttgtcttttttctgtaagggacaagatttgttgtttttgtaagaaatgagatgcaggaaagaaaaccaaatcccattcctgcaccccagtccaataagcagataccacttaagataggagtctaaactccacagaaaaggataataccaagagcttgtattgttaccttagtcacttgcctagcagtgtgtgggctttaaaaactaggagatttttcagtcttaggtctgcaaactgggcatttccgattttccaggcataaaaatccacctgtgtctggctggaatgtgtatggtatgtggctcactgtgggctttaggattctgtcccgggggtttaggccctgttgggccctgacaaggaagggaaggaagcctgggttgaatttagtgaggcagctggcctggggtcacagtgaacctgaaccttcaaaccagccttaagggcttaaagtcctctctcagaacttgggcatttccaacttttttcctttccgggtgagagaataagcggagaagggttcagcggagccgctctgggctcatagggacacttggtcactccagagttcttaatatctcccaggaggacgatattattctcagtgctcagctgaaataccaaccccaggaataagaactccatttcaaacagttctggccattctgagcctgcttttgtgattgctcatccattgtcctccactagaggggctaagcttgactggcccttaagccaggcaagcacaagtaatgtgtgttttgttcagcattattatgcaaaaattcactagttgagatggtttgttttaggataggaaatgaaattgcctctcagtgacaggagtggcccgagcctgcttcctattttgattttttttttttttaactgatagatggtccagcatgtctacatggttgtttgtgcttaaactttttaatttaatgtgtggtttcaattcaaggcttgaaaaattaatctccacctccatgtagccagtaccattatatgtacattaatatgtaatgttagtatttctgcctttgaatcctttgatattgccaatggaatttcctacttttaataaatgtatttggatatgcccagttattgtgtgccgatttaaaactttttttggccttcccccccttttttgggttgtgccgccttccctttaaccaacaagccctcctagaaacagatagtttcctgagaattacctgagcctatgtttgtaatgccagatgtaccttagggagtatgtaaaataatcattttaacaaaagaaatagatattttaaattttaatactaactatgggaaaagggtcccattgtgtaaaacatagtttatctttggattcaatgtttgtctttggttttacaaagtagcttgtattttcagtattttctacataatatggtaaaatgtagacgcaattgcaatgcatcaataaaatgggtcaattttctgaggagaacgcgggatttcccattgttttcattttgtaacaaaaataaatggtgtgggcccttttttattaaaccaaa

SEQ ID NO: 155591 - DNA, 434 bp, Homo sapiens
gagttaaggtataaacgttggcctgggtggaaagcagacaccccccaagcgcagaacagtcaaatgggttggtgttggcaagtcaagagagtcgatgatccagctgttttagtcacagactgagctgatcccaacaggccctggcagcgtctggacttgtgtaaacagcagcagtcacgttcctcggccgccacaaccaacaccaaagcaggaaaaccattttctgtacttttatatttctgttcaacctgttggtttctacaatgattttaaacattggaaagccagccttgtgtatatttttaaaaattatattcaaaatgagccaaagtgctcagagaccttctatgacacattagtgtcacatggttgcgtgtccagccgaagcagtgtaataaacatctccaatggccactgaaaaaaaaaaaaaaaaa

SEQ ID NO: 155592 - DNA, 1429 bp, Homo sapiens
tgacagagcccatcttgtgtttgattttcaccaggctgtcgacggacttcaggaagtgcagcgccaggcacaagaggggaagaatataggcaccaccaagaagggaatcggaccaacctactcttccaaagctgcccggacaggcctccgcatctgcgacctcctgtcagattttgatgagttttcctccagattcaagaacctggcccaccagcaccagtcgatgttccccaccctggaaatagacattgaaggccaactcaaaaggctcaagggctttgctgagcggatcagacccatggtccgagatggtgtttactttatgtatgaggcactccacggcccccccaagaagatcctggtggagggtgccaacgccgccctcctcgacattgacttcgggacctacccctttgtgacttcatccaactgcaccgtgggcggtgtgtgcacgggcctgggcatccccccgcagaacataggtgacgtgtatggcgtggtgaaagcctataccacacgtgtgggcatcggggccttccccaccgagcagatcaacgagattggaggcctgctgcagacccgcggccacgagtggggagtgaccacaggcaggaagaggcgctgcggctcggctcggctcgatcgattctaagatatgctcacatggtcaacggattcactgcgctggccctgacgaagctggacatcctgggacgtactgggtgaggttaaagtcggtgttctcatacaagctgaacgggaaaaaggattccctatttcccaggctaaccagggagatgcttcaagaaaggtcgaaagttgaagtatgaaacgctgcctgggtggaaaagcagacaccacaggccgcccaggaaggtgggaggacctgcccccacaggcccagaacctacatccgctttgtggagaatcacgtgggcagccgcagtgggtatcattaccagtcttttctgctctctcagtcaaatgggttggtgttggccaagtccaagagagtccgatgatccagctgttttagtcacagacttgagcttgattcccaacagggccctggcagcggtctggacttgtgtaaacagcaagcagtcacgttccttcgggccgccacaaccaaacaccaaagcagggaaaaccattttctgttacttttatatttccggttcaacctgtttggtttctacaatgattttaaacgattggaaagccagccttgtgtatatttttaaaaaattatattcaaaatgagccaaagtgctcagagaccttctacgaagtcaatgtcgaggagggcggcgttggcaccctccaccaggatcttcttgggggggccgtggagtgcctcatacataaagtaaacaccatctcggaccatgggtgtgatccgctcagcaaagcccttgagccttatgag

SEQ ID NO: 155593 - DNA, 381 bp, Homo sapiens
gccttctgagtagccgggaccacaggcatgtaccaccacacccagccaatttcttttgtagagatggggtttagccatgttgcccaggctggccttgaactcctgggcttaagcaatccacccaccttggccccccaaagtgctgtgatcacatgtgtgagccactgtgtccagtcgacagtagcctttttactgtgatgtcaataaaccaacatctgaagatgacaggaactggattcagagtctgtgtaaattttctcaatgagtgaccgagcatgtaaatttaactcaaatgaaattactacaataattgctttaaaaacatatttaggaaaatgaggtgaccctagatgagcttatttatatgtctcctctaacaga

SEQ ID NO: 155594 - DNA, 399 bp, Homo sapiens
  misc_feature (1)...(399): n = a,t,c or g
gttatgttttttctggagatctggcacaccagatccttaacgtttctttaggaatccgccgtttgcacttggcagatgtctctgttgggatctgccttgccaagttgagaattgctcctgtaccccctcacaacgagtctgtgttcaatcgctggcgatgtccctgattcgagctgctcatacctaccacctaattacctctcatcagttccagcctagcgaactgataaaatactggaaccatttacaacataataagcacaatgcctgtgccaacgcagcataagaaaaggcaggcatgtatcgccaccgtagactacattagaaaagacaattttttttcaaatgtgcaatttgtaaatattgctccaagcatgtatagttagaactgattacatn

SEQ ID NO: 155595 - DNA, 1024 bp, Homo sapiens
catgaggggtagctgcagtttgtcgtgagagacatgcttggcatacagagctgtctaatgggtgggagacatgtaatggtagatttagggctgggagcatgattttgggtctgcccaaaggaacatggggtcacttttgttctttctgacccactaaataaaaagtaccgtaacagggtttcactggaatgtttattagaaagtttacactttttatatttttatgattttaaaaacaaaccataatataaaaacagattttaaggaacttcacagcagtatatattctgtctaaactcactgaatattttaagttgtaaatcaggtgtccaccaacctttattttttgcattgcaggagatgtgactgtaaagtaggggagtttttttttttttgagacagagtttcacccttgttgcctaggctggagtgcaatggtgcgatctcggctcactgcaacctctgcctcccaggttcaagcaattctcctgcctcagcctccctagtaagctgggattacaggcatgcaccaccacacccggctaatttttttatatttttagtagaagacaaaggtttctccatgttggtcaggcttggtctcgaactcccaacctcgggtgatctgcccgcctcggcctcccaaagtcctgggattacaggtgtgagccaccatgcccggccgtaaatgattttattcatttttatgttttcttttgggcggcgggatggagtctctgtcacccaggctggagtgcaatggcacgatcttggctcactgcaagcttccccttccgggttcatgccattctcctgcctcagcctcccgagtagctgggactacaggcacgtgtgaccatgccaggctaattttttatatttttagtaggctaatctcagcagggtttcaccatgttggtcaggctggtctcgaactcctaacctcaagtgatccacctgcctcggcctcccaaagtgttgggattacaggcgtgagccaccacgccaggccactaccatgctt

SEQ ID NO: 155596 - DNA, 1648 bp, Homo sapiens
ggtgagacacagattcactcttgtcccccaggctggagtacaatagtgtagtctcggctaacagcaatctccccctccttggttcaagcaattctcctgcctcagtctcccaagaagctgggattatagacacctgccaccacatccagctaatttttttgtgttttagaaaagacagggtttcaccatgttggccaggctggtctcgaactcctgacctcagttgatccgcctgcctcagcctcccaaagtgctgggcttacaggcctgagccaccacgctcagctcagcttcaacctgtctgcaaagaaaagttttaccaagaccagaagttaaatatgacatttccctagggtagttgtaactctaaacatagtttaaaaagtatgtggcttcagattgcctatactttgttcacaaacgtgtgatttagatatgactgatttagaagtgaacaacttggtaacatccctagactccactcatgaacgcagaattattacctgctgtttgctttctgaaagaatttcaggaaatcaggaacaaatgtgtctttagggcaggattcagctccttttaatatttttctcttgggcccactctctttgctttcccctggaatctgtgtgggtactataggcaggctctactctgtggcaccatggctaggaagcttcctttttggcagaatatgtttggcagcaaagctatagagacaggtgcattcagaacatcctgggcaccagtcatgagtcttactgtgtcaaaaatctgaaaacacttgctgagaaccaaatttattccattggaaaaaccctctgtggagctataagcctcttgggactcttcttcctagattaaggcttgcatttccctccctgtttcagtaaaagatgatgaaagccactattcaatcctcactgctgagtgggcagggagaaggcaggcaccactctcagctcttttctaatcttggtaacttagtgctagaagtctctccaggctattaccatgggcatttgttctctgttggagctgtaagcagatgaacccaagtagagaagatagatcttggaaggagagatccattgacgtccagaagcccagatcagcaaatggaggaacctcggaggtgaccagaaagatctccatcggttgcccaaggcttgtaaagtagtggatggttttagcgatgaataaccgtaaattgggctatggaagtacctgtggccagagctgcctgttttctgaaggtggagaagccccatttttagctccagagccaacccttaagagaacttttggcagattttgttggcattattgaaatatatatagaaaagttgcctgattgccaatggttatgggaatggaatttaatgccatttgtaatttatcacactcattgggtttttattgattatagtattgtcctgactttttattttcctactatggttcctttagcgagaaaagtaacttttgtgcatatattgaagtggtttttcagctatgaattctttagggtagaaatttatttagcaaatgtgaattcttttgagaaagtatgaagttttgcagaaattgactgtgaaatgtcagagaaaaataaaagtcacttacttgaaacctaaaaaaaaaaaaaaaa

SEQ ID NO: 155597 - DNA, 437 bp, Homo sapiens; identical to SEQ ID NO: 122087
  misc_feature (1)...(437): n = a,t,c or g

SEQ ID NO: 155598 - DNA, 1848 bp, Homo sapiens; identical to SEQ ID NO: 122088

SEQ ID NO: 155599 - DNA, 527 bp, Homo sapiens; identical to SEQ ID NO: 122089

SEQ ID NO: 155600 - DNA, 935 bp, Homo sapiens; identical to SEQ ID NO: 122090

SEQ ID NO: 155601 - DNA, 2463 bp, Homo sapiens; identical to SEQ ID NO: 122091

SEQ ID NO: 155602 - DNA, 1531 bp, Homo sapiens; identical to SEQ ID NO: 122092
  misc_feature (1)...(1531): n = a,t,c or g

SEQ ID NO: 155603 - DNA, 459 bp, Homo sapiens
ggtaaattacaacctcctcaagtatatttgcagattcttggatgaagtacagtcctactcgggagttaacaaaatgagtgtgcagaacttggcaacggtctttggtcctaatatcctgcgccccaaagtggaagatcctttgactatcatggagggcactgtggtggtccagcagttgatgtcagtgatgattagcaaacatgattgcctctttcccaaagatgcagaactacaaagcaagccccaagatggagtgagcaacaacaatgaaattcagaagaaagccaccatggggcagttacagaacaaggagaacaataacaccaaggacagccctagtaggcagtgctcctgggacaagtctgagtcaccccagagaaacagcatgaacaatggatcccccacagctctatcaggcagcaaaaccaacagcccaaagaacagtggtcacaagctata

SEQ ID NO: 155604 - DNA, 545 bp, Homo sapiens
  misc_feature (1)...(545): n = a,t,c or g
ttttttttttaaatcattgagggggctttattccaatttcctaagcatcataaagagtttagaaaatatttgtatgtctcttgcatttcaagtgaataaaatcactttatctcttactcttgcgtccccaccccccacccccccccaacatcctttgtagcttagaacagcgaaacttgactttggaaacagaaatgatgagcctccatgatgaactggatcaggagaggaaaaagttcacaatgatagaaataaaaatgcgaaatgccgagcgagcaaaagaagatgccgagaaaagaaatgacatgctacagaaagaaatggagcagtttttttccacgtttggagaactgacagtggaacccaggagaaccgagagaggaaacacaatatggattcagtgagcctgctttcgcctgctgtctctgatggctctggcaaggactccagggattctggtgggatatgacttanaaccaggtggctggtcacctggatgtacagaagtctaactggtgaaggaatatcatttacagacattaaac

SEQ ID NO: 155605 - DNA, 2026 bp, Homo sapiens
  misc_feature (1)...(2026): n = a,t,c or g
atgaggaatctctggatgcaacttcagctgcattgttactgtgttttcacaggaggcgatcgagatcggatgacagcaaatcatgagagctacctcctcatggcaagcacccagaatgatatggaagactgggtgaagtcaatccgccgagtcatatggggacctttccggaggaggcactgtggtggtccagcagttgatgtcagtgatgattagcaaacatgattgcctctttcccaaagatgcagaactacaaagcaagccccaagatggagtgagcaacaacaatgaaattcagaagaaagccaccatggggcaggttacagaacaaggagaacaataacaccaaggacagccctagtaggcagtgctcctgggacaagtctgagtcaccccagagaagcagcatgaacaatggatcccccacagctctatcaggcagcaaaaccaacagcccaaagaacagtgttcacaagctagatgtgtctagaagcccccctctcatggtcaaaaagaacccagcctttaataagggtagtgggatagttaccaatgggtccttcagcagcagtaatgcagaaggtcttgagaaaacccaaaccacccccaatgggagcctacaggccagaaggagctcttcactgaaggtatctggtaccaaaatgggcacgcacagtgtacagaatggaacggtgcgcatgggcattttgaacagcgacacactcgggaaccccacaaatgttcgaaacatgagctggctgccaaatggctatgtgaccctgagggataacaagcagaaagaacaagctggagagttaggccagcacaacagactgtccacctatgataatgtccatcaacagttctccatgatgaaccttgatgacaagcagagcattgacagtgctacctggtccacttcctcctgtgaaatctccctccctgagaactccaactcctgtcgctcttctaccaccacctgcccagagcaagactttttttggggggaacttttgaggaccctgttttggatggnccccccgcaggncggaccctttccccacccccagggactatgaaagcaaaagtgaccacaggagtgtgggaggtcgaagtagtcgtgccaccagtagcagtgacaacagtgagacatttgtgggcaacagcagcagcaaccacagtgcactgcacagtttagtttccagcctgaaacaggaaatgaccaaacgagaagatagagtatgagtccaggataaagagcttagaacagcgaaacttgactttggaaacagaaatgatgagcctccatgatgaactggatcaggagaggaaaaagttcacaatgatagaaataaaaatgcgaaatgccgaggcgagcaaaagaagatgccgagaaaagaaatgacatgctacagaaagaaatggagcagtttttttccacgtttggagaactgacagttgaacccaggagaaccgagagaggaaacacaatatggattcagtgagccttctttcggcttctgtctcttatggctcttgcaaggacttcagggattcttgttggatatgtacttagaaccagagtggctgtgtcacctctgatgtacagaagtctaactggtgaaggaatatcatttacagacattaaacatccatatctgcaatgtgtaccaaagttatatcatgccccataatgctactgtccaagtgttacaacctggatatgtgtatatagagtagtttttccaaaagtaaacctaaaaatgagaagccatatttccaagaattattttattgccaagtccttgtatttaaatgttaaatcaatatgttgttgcaatttagcttgctttcaagccttcacccccttggcactttaaccataagctattttttggcattgtgttatcatcggcttattttatagatcaatatttttatttccctttatcgctgaggcaatgaacgataagcaaaaatatagccatatatatccatatatggtgttataaaaatccccgcaact

SEQ ID NO: 155606 - DNA, 439 bp, Homo sapiens; identical to SEQ ID NO: 148056

SEQ ID NO: 155607 - DNA, 552 bp, Homo sapiens; identical to SEQ ID NO: 148057

SEQ ID NO: 155608 - DNA, 2016 bp, Homo sapiens; identical to SEQ ID NO: 148058

SEQ ID NO: 155609 - DNA, 594 bp, Homo sapiens
tcacagtttcttcctaaaacgtagctggtaccgccatttgttcatttgcaccaggacgcaggcaaacaccctgccacacacgagaaccacaggacggcagaccgagagcgcgcctgacagcttggacccgagcaagagggacgtgcagggtggctcatactcatactggaaggcagaaccatccgatgcctctttgggggttctcaaggcatcatagagctttttctgaacatctaagtcttggttgcgcgccgccctcagcgacctggacatgaacccgcagtcctgcagcagcagcagccggccctctgtcccgcggaagccgaatccttctcctccctcgcgctctcctgccggactccgacctccaggccgcgcggggcctctcaccagtccgaggtgtccagggcctcccgcgtcccaggcatcggacactgtgggtcccgtcagacacaagcagcgtggccccacgtcggacgtatcaggggcgtgggatgggcccgcgaccgcggcctcgggtcctgtagtacgcctgtatcccagcactttgggaggccgaggcagacagatcacgaggtcagcagacaagaccat

SEQ ID NO: 155610 - DNA, 446 bp, Homo sapiens
cgcatgagattattttattaaaaaactcaaaggaagcagagtgtggagcggtatctgtcctgcgtgacgtctcacatcggagttggctcaaaccctggctgtgcatccatcaaaaagtgcaaggcccaggccatgagctggggaggaagcctggaaagaaaccaccgctgcaggtcaatggagcctgggactagtgaccaagagttggggcagacccagggcactcacctgacagcttggacccgagcacagagggacgtgcagggtggctcatactcatactgggaaggcagaaccatcacgatgcctctttgggggttcccagacagagcagggctcctgggctcccctggtagctccggtcctgggaaaaggcggccgattcttgcagggcaaccctacaaactccttgaactccaggctaggtttctggggcctggtcacaa

SEQ ID NO: 155611 - DNA, 512 bp, Homo sapiens
cgcgccgccctcagcgacctggacatgaacccgcagtcctgcagcagcagcagccggccctctgtcccgcggaagccgaatccttctcctccctcgcgctctcctgccggactccgacctccaggccgcgcggggcctctcaccagtccgaggtgtccagggcctcccgcgtcaccaggcatcggacactgtgggtgccgtcagacacaagcagcgtggccccgacgtcgtacgtatcaggggcgtgggatgggcccgcgaccgcggcctcggcgtcctgtagtacctgtcggcggcgagcggagtcattcccacccctccgggcctccgcttcggtctccgggccctgaatgggggctcacctcaagcagctgcccggctcgtggactggagggtgtctctgcccccagaatcagctcccgaatccagggccgtaggaccagcctccccgaacctgccatccccacggctacacccaacggatacatcgggtccgggtttcccgcgggcgc

SEQ ID NO: 155612 - DNA, 1665 bp, Homo sapiens
ttaacgtttgtgaaggaacttcccggatcgacccacgcgtccgcggacgcgtggtcggacgcgtgggcggacgcgtgttcggacttttgggcccgggcccgttgcatccgctgggtgtagccgtggggatggcaggttcggggaggctggtcctacggccctggattcgggagctgattctggggtcagagacaccctaccagtccacgagccgggcagctgcttgaggtactacaggacgccgaggccgcggtcgcgggcccatcccacgcccctgatacgtccgacgtcggggccacgctgctttgggtctgacgggacccacagtgtccgatgccctgtgaacgcgggaaggcctggacacctcggactgggaggagaaagagttcgggtttcgcgggacaaaagggccggctgctgcttgctgcagggacttgcggggttcatgtccaaggtccgctgagggcggcgcgcccgcaagaagttcttatcttccagggtggaccgcttcagcctgctgcccacggagcagcccccggctacgggtgcctggttgcaaccaagacttagatgttcagaaaaagctctatgactgccttgaggagcacctttcagagtccacctcgtccaatgcaggcctatcactgtcccagcttctggatgaaatgcgggaggaccaggagcatcagggggcactcgtgtgcctggctgaaagctgcctgacactggagggcccttgcacagcaccccctgtcacccactgggctgcctcacgatgcaaggccacgagttcatgtcccacagggagaagctgtgtacactgtccccagctcaatgctgtgcatctctgagaatgaccagctaattctgagctctctaggcccctgtcagaggacacagggccctgagctgcccccaccagacccggctctgcaggacctatctctgaccctcatagcctctcctccttcctcacccagttcctcaggaaccccggccttacccggccacatgtcatccgaggaaagtggtaccagcatcagccttctgcctgccctgtccttgggctgctccagacccaggggcagagaaggcaggctcccagccctcaccaggccatctggttcaggcccctggccaccctggacccccaggtccccacacgccagccgttaccccaagcttcccaaattccagagctgcactcccaagtttctcaccccggtagccatgtccccaaagtccaaaaccccaaggctcttgtgaccccaggcccccaagaaaacctaagccctggaagttccaaggaagtttgtaagggttgcccctgcaaaaaaatcggccgcccttttcccccaggaccggagctaccccaggggagcccccaggagccctgctctgtctgggaaccccccaaagagtcatcgtgatggttctgcccttcccagtatgagtatgagccaccctgcacgtccctctgtgctcgggtccaagctgtcaggcttcctccccagctcatggcctgggccttgcactttctgatggatgcacagccagggtctgagccaactccgatgtgagacgtcacgcaggacagataccgctccaacactctgcttcctttgagtttttttaataaaataatctcatgcggcaaaaaaaaca

SEQ ID NO: 155613 - DNA, 2248 bp, Homo sapiens
tcggagaagtcgggattccgggtaccgagcgccacctgccagccattcacgcccaggacaggcagcccgagctccagcgcctcggcctgctcgccgggaggtatgctgtcctcggccgggggtgccccggagggcaaggacgacaagaaagacaccgacgtgggcggcggtggcaacgggcacccggggcgcctcggccgaagggggacccacggggctggcacacggcccggattagctgcggcggcgggattaatgtggatgtgaaccagcatccggatgggggcccgggaggcaaggctctggggctcggactgcggccggttcatcgggctccagctccggctccggccccagcgcgcccacctcctcctcagtgttgggctctgggctggtggctcccgtgtcaccctacaagccgggccagacagtgttccctctgcctcccgcgggtatgacctacccaggcagcctggccggggcctacgccggctacccgccccagttcctgccacacggcgtggcacttgaccccaccaagccgggcagcctggtgggggcgcagctggcggcggccgcggccgggtctctgggctgcagtaagccggccggctccagccctttggccggagcgtctccgccgtccgtgatgacagccagtttgtgccgggacccttactgcctcagctaccactgcgctagccacctggcaggggcggcggccgccagcgcttcttgcgcacatgatccggctgctgcggctgcggcgctgaagtccggatacccgctggtgtaccccacgcacccgctgcacggtgtgcactcctcgctaacggccgccgcggctgctggcgccacaccgccctccctggccggccaccccctctacccctacggctttatgctccctaacgacccactcccccacatctgcaactgggtgtcggccaacgggccgtgcgacaagcgcttcgccacgtccgaagagctgctgagccacttgcggacccatacggcatttcccgggacagacaaactgctgtcgggctaccccagctcgtcgtctctggccagcgctgccgcggccgccatggcttgccacatgcacatccccacctcgggcgccaccgggcagccctgggacgctggcgctgcgcagcccccaccacgcggctgggactcagcagccgctaccacccctactccaagagcccgcttcccacgcctggcgcccccgtgccggtgcccgccgccaccggaccgtactactccccctacgccctctacggacagagactgaccaccgcctcggcggctggggtatcagtgaggggcggccgggagggcgagcgagggataggaaggaagagggggaggggaggagtccagggagaggcggcatcacggaccaggctgctgacacccgcgcgtggggaaggactcgggccacgaaaggaaagaaatgtattaccgtatatatcttacccgacagcagcgaccgagacccggtgggacactccccttctccccactttcacctcccatacccaaactttataaaagttgaaaaaatatcatttgactttttatagaaaaaaaaaaggaaaaaataattgagaaagtgttcatctgaggactgcatcagtgtccaccgatgcagtcctcagatgaacactggtatttatttatgttagctccaagcggaccggtggttcaaaagtgcattatttagtttgagctctgtagggaaaaaggaggggggaaaaattttaaaacttgagggtaaaaatgtggaaaacaaaccctcccatcccttgtagattataaataaaagccaaaccgccacagaactagaggtcttctctttaatgttactttaaaattgctatgattgtattgtacgttatttaatgtctgattgaaacacaaatttacatgcatgtttgttacaaaaaaaatgataaaaaaagtcacaatttgtcagctctgatttcaaattgcaattatttttaaggtgtataccatcgaagagaatgggtatttttttgtatgtattctggaagaaaacaacaaaaaaaaaaagaaaaagaaaaaattctattccaaaacctcatttgccttattttgttctttaaaaggaacacttaactatttttaatttttaagtccacccgctgagaaggggacaaggtttacgtcatgtactaaaataatagacaatgtatcgctttaaagattaaaattccgt

SEQ ID NO: 155614 - DNA, 1670 bp, Homo sapiens
attgagtcgttgcctggcggggatcagacagcttcagtgggttaacttccaaactagttcagaggcaagtgtttcatcatcagttgctaaaaacagttcctcatcaggcacatccttactgactcccaagagcagctcttcaacaaatacatcgctgctaacttccaagagcacttcccaggtagctgcatcactactagcttccaagagcagctcccagaccagtggatctctggtttccaaaagcacttccttagcaagtgtgtcccagttggcttctaagagtagttctcagactagcacctcacagttgccttctaaaagtacttcacagtcaagtgagagttctgtcaaattctcttgcaagttaaccaatgaagatgtgaaacacgaagcaaccttttttcaatacgactatataaaacggtggcatggaagttggtagctgttggtggctttagtcccaatgtgaatcatggagagctcctaaatgcagctattgaggctctgaaagcaacactggatgtattttttgtcccactaaaagaattggcagatctgcctcaaaataagagctctcaagaaagtattgtttgtgaattgaggtgcaagtctgtgtatttgggcactggctgtggaaaaagcaaagaaaatgcaaaagcagttgcatcaagagaagcattgaagttatttctcaagaaaaaggtggtggtaaaaatatgtaaaaggaaatacagaggcagtgaaatagaagatctagtactccttgatgaagaatcgaggcctgtaaacttacctccagcactaaaacatcctcaagaattactataatgtgtccaaaatatcactgcatacaatatctggtatttgaagagaaaaactgacttttgtatagtataaaacacaggctttcacaaattttgtattgctttttttcccagttttggcagaaaatttacattctagttctcttcacacagtagccagttgtaaataatttatgaatgaccagtaccacattaaaaggtatgccattagccagccatattagtatgcctgttttatttgctgaagaaaatactgtcttcctatttttaatgatacattaggtacgatgtgtagttcggtagagtcctaaaatttttgtactactttcaaatttggtgaaaatgtattaagttgtctaccatgttttcttttctagctgaataaaccacatcaaaggaaagggaccccagtatttgaatgtttgaaagtctgtaaagcttaaggttttaaaaatgttgcccgtaatgttgaacgtgtctgttaaaaaataaaagaacaaatagttgcttcaaacctatttttatgagaagttgtaagcattttttagatataaagcagtataaagtacttgttattttactctgaagttgtttaaaattcaccatgactttgaccgtctgaagattctttaagcgggttaatttatgttttgaggtggaatacaatttacacttttttcttaaaaacatgaatgtgggtttctatattaagcatattttgtgactactattaacagattgatttgtttagatattaaatgctttaagctattttaccttttcaagaagttgtgttttttttctccaagtcagaaccaattcctgcaaataggcttcccatga

SEQ ID NO: 155615 - DNA, 366 bp, Homo sapiens
cgcactgtgtgtccactctgctctttctttcttccttcttgttttattctcttctttttcctttattgtgctgtaatagaggactgagctgcaatgtgttattaactgctcttcccttcccccgggctatagagactgtcggagagaaggaactggactcctcaagctatgctctacctgaaaggggcacagggtcgccgctatcttctccgaccagagccggcaaatggacctctacgacctgcccactgccggatagaccatgcacctatttcgacctactacatattacggaggcctgaaccatcttaccggagctcttcatacttcccagatgatgattagggtaccatgcagcaagccgcg

SEQ ID NO: 155616 - DNA, 2170 bp, Homo sapiens
aaaggagtctcggaggactgtaagaagaatgcttcgaggccgatccctctctgtaacatccctgggtgggcttccccagtgggaagtcgaagaacttcctgtggaggagttactgctctttgaagttgcttgggaagtgaccaataaagttggaggcatctatactgtgattcagacaaaggccaaaacaacagcagatgaatggggagagaactattttctgataggtccatattttgagcataatatgaagactcaggtggaacagtgtgaacctgtaaatgatgctgtcagaagagcagtggacgcaatgaataagcatggctgccaggtgcattttggaagatggctgatagaaggaagtccttatgtggtactttttgacataggctattcagcttggaatctggacaggtggaagggtgacctctgggaagcatgcagtgtcggcattccttatcatgaccgagaagccaatgatatgctgatatttggatctttaactgcctggttcttaaaagaggtgacagatcatgcagatggtaaatatgtcgttgcccaattccatgaatggcaggctggaattggactgatcctttctcgagccaggaaacttcctattgccacaatatttacaacccacgctacactacttgggaggtatctctgtgcagcaaatattgatttctacaaccatcttgataagtttaacattgacaaagaggctggggaaaggcagatttaccaccggtactgcatggagcgagcttccgttcattgcgctcacgtgttcaccacggtttctgaaataacagcaatagaagctgaacatatgctgaagagaaagcctgatgtagttactccaaacggcttgaatgttaagaaattttcagcagtgcatgagtttcaaaatctacatgccatgtacaaggccagaatccaagattttgttcgaggtcatttctatggtcatctcgactttgatcttgaaaagactttgttccttttcattgctgggaggtatgagtttttcaaaacaaaaggagctgacatcttcctagattccttatccaggctaaatttcctgctgaggatgcataaaagtgacatcacagtggtggtgtttttcattatgcctgccaagacaaataatttcaacgtggaaaccctgaaaggacaagcagtgcgaaaacagctgtgggatgttgcacattctgtgaaggaaaagtttggaaaaaaactctatgatgcattattaagaggagaaattcctgacctgaacgatattttagatcgagatgatctaacaattatgaaaagagccatcttttcaactcagcgacagtcattagccccagtgaccacgcacaacatgattgatgactccaccgaccccatcctcagcaccattagacggattggacttttcaacaaccgcacagatagagtcaaggtgattttgcacccagagtttctatcctccaccagtcccttactacccatggactatgaagagtttgttagaggttgtcatcttggagtatttccatcatactatgaaccctggggttatactccagctgaatgcactgtgatgggtatccccagtgtgaccacgaatctctccgggtttggctgtttcatgcaggagcacgtggctgatcctactgcttacggtatttacatcgttgacaggcggttccgttctccagatgattcttgcaatcagctgactaagtttctctatggattttgcaacatgtcacgccgccaaaggtttatccagaggaacagaactgagagggctctcagaatcttctggattggaagatacttagggcagatattaccaggcatgccaggacacctgacattaaggcagagcttttccaagataaatttccatgtgggaacttaacatgcaccaccaacggacaggaaggatttcaaatatcccagggccttcctgcagttacccacctttctcctttcaggggtcttcagggccttccagtccttcagaggcagtgatgtggaagatgaagtggaggatgagagatacgatgaggaagaggaggctgaaagggatcggttaaatatcaagtcaccattttcactgagccacgttcctcatgggaagaaaaagctgcatggtgaatataagaactga

SEQ ID NO: 155617 - DNA, 1350 bp, Homo sapiens
atgaagagactgttggagagaaggaactggactcctcaagctatgctctacctgaaaggggcacagggtcgccgcttcatctccgaccagagccggagaaaggacctctccgaccggccactgccggaaagcgtctcctcaccggaaagacgcggctctgaggcgccctcagatacagtccgcccgagggcagcccgggttggcagcagcagcagctggatgccgagcgccggagctgggagctcgcgcgtccagccccgcgccaatggtggcaagggcggcccaggctggcgctgcggctccccaagccttattggcttgcggctgttcagccagccctctggctgccaggaaagacgaagcccaaatccccaactactaactattccggaggcagcaaccatcttactggcgtcccttcagaaatcaccagaagaacaattcagttctaaagccatttgggagggtgctgtggaagtccagagaaaggcatcagagtccaagcagtttgagaaatgtctacacaaagaggagcagcctaaagcagtgtcagagccagaatggagagaggagggcatccgtgcatgtgagggagtgtatggagaaagattagttacacagaagaagattgacccaatatgtagcaaattaaaggtgattttgcacccagagtttctatcctccaccagtcccttactacccatggactatgaagagtttgttagaggttgtcatcttggagtatttccatcatactatgaaccctggggttatactccaggaggactagggccttttcctcctctgagtgcatacaaggatataggcgctggtctgaagccaagctttggtctatttcccctggcagctgaatgcactgtgatgggtatccccagtgtgaccacgaatctctccgggtttggctgtttcatgcaggagcacgtggctgatcctactgcttacggtatttacatcgttgacaggcggttccgttctccagatgattcttgcaatcagctgactaagtttctctatggattttgcaaacagtcacgccgccaaaggattatccagaggaacagaactgagaggctctcagatcttctggattggagatacttaggcagaacagaaggatttaaatatcccaggccttcctcagtaccaccttctccttcagggtctcaggcctccagtcctcagagcagtgatgtggaagatgaagtggaggatgagagatacgatgaggaagaggaggctgaaagggatcggttaaatatcaagtcaccattttcactgagccacgttcctcatgggaagaaaaagctgcatggtgaatataagaactga

SEQ ID NO: 155618 - DNA, 645 bp, Homo sapiens
cagacagaaggatttaaatatcgcaggccttcctcagtaccaccttctccttcagggtctcaggcctccagtcctcagagcagtgatgtggaagatgaagtggaggatgagagatacgatgaggaagaggaggctggctttggcagtatgtgtaggaatcaccttctatcctgtacgcagtcccctattcagacagctgctgccaggtgactccatccctccactgtagtcatttcttcatccttttccccaagaccgacaaaagcagttaagcagactgtcttccaggaatctggtttgatcaaagtttttttcttcatcttctggtgatttctgaagggacgccagtaagatggttgctgcctccggaatagttagtagttggggatttgggcttcgtctttccggcagtggccggtcggagaggtcctttctccggctctggtcggagatgaagcggcgaccctgtgcccctttcaggtagagcatagcttgaggagtccagttccttctctccaacagtctctatagcccgggggaagggaagagcagttaataaaacattgcagctcagtcctctattacagcaaaataaaggaaaaagaagagaataaaacaagaaggaagaaagaaagagcagagtgg

SEQ ID NO: 155619 - DNA, 628 bp, Homo sapiens
cccacgcgtccgggagagaggagtgtcagacagctgttgtcaacaggcacctggccagagtgaaaaggaggggcagattccatccaagtcccagcggcgccagctgacactctctgccaatgcccaggtgctgagcgacagtgtcccaccggtccctgtgcccagaatggcctgcaccaagaccctgcaacagtcccagcccatctccgcaggagccaccacaaccaccaccactgtggcccctgctgggggtcattctggctccacagaatgtgacctggagtgtctggtgtgccgggagccctacagctgtccccggttgcccaagctgctggcctgccagcatgccttctgcgccatctgcctgaagctcctgctgtgcgtgcaggacaacacctggtccatcacctgcccgctgtgccgcaaggtcaccgccgtccccgggggcctcatctgcagcctgcgcgaccatgaggcggtggtggggcagctggcccagccatgcacagaggtatcgctctgtcctcaggggctggtggatcctgctgacttggcagcaggacaccccagcttggtgggagaggatggacaggatgaagtaagtgcaaaccacgtggcagcccggcgc

SEQ ID NO: 155620 - DNA, 430 bp, Homo sapiens
gcagtttgtggaactaaggctaagtgactaataaatatatggaaaattaaataatgcaaatccatatggaaatgcctatcctccctctttgtttctgtactctgaaaatagagagtttgtctatccagacagaaattttagactgacgaaaattggaaatgactgtggttctcaaacttgaccacgtggccaccaaccagaagttacccggagggatcctatagagtaaccaaataaggcaaatggaagaagtaaagatctcaaaaaagagtaaagttggaattcttccatttgttgctgaatttgaagaatttgctggacttgcagaatcaatcttcaaaaatgctgagcgtcgtggagacctggataaagcatacaccaaacttatcagaggagtatttgttaatgtggagaaagtagcaaatgaaag

SEQ ID NO: 155621 - DNA, 2045 bp, Homo sapiens
  misc_feature (1)...(2045): n = a,t,c or g
acttcccggtacgancccagcgtccggagaaatcaaagatttctttgaagttgcaaagattttgattactggcacaactaaagaaagcaagaaggttgctacactgcctcgaaaagaaagtgctgtcaaacaggaaacagagagtcttcatggaagttcggggaaattaactggatctacttctagtctaaataagctcagtgttcagagttcagggaatcgcagatctcagtcatcttccctgttggatatgggaaacatgtctgcctctgatctcgatgttgctgacaggaccaaatttgataagatctttgaacaggtactaagtgaactggagcccctatgtctggcagaacaggacttcataagtaaatttttcaaactacagcaacatcaaagtatgcctggaactatgggctggaagcagaggacctgggatgggagggaccattatcacggcaacataattgttgggcacaccactgcctgtttcatctgagaaagatatgatccgccaaatgatgattaaaatatttcgctgcattgagccagagctgaacaacctaattgcattaggagacaaaattgatagctttaactctctttatatgttagtcaaaatgagtcatcatgtgtggactgcaacaaaatgtggaccctgcttctttcctaagtactacattgggaaatgttttggtgactgtcaaaaggaactttgacaaatgcattagtaaccaaataaggcaaatggaagaagtaaagatctcaaaaaagagtaaagttggaattcttccatttgttgctgaatttgaagaatttgctggacttgcagaatcaatcttcaaaaatgctgagcgtccgtggagacctggataaagcatacaccaaacttatcagaggagtatttgttaatgtggagaaagtagcaaatgaaagcccagaagacccccagggatgtggttatgatggaaaactttcaccatatttttgcgactctttctcggattgaaaatctcatgtctagaagcagaaaaaaaagaagccaaacaaaaatacacagatcaccttcagtcttatgtcatttactctttaggacaacctcttgaaaaactaaatcatttctttgaaggtgttgaagctcgcgtggcacagggcataagggaggaggaagtaagttaccaacttgcatttaaacaaacaagaacttcgtaaagtcattaaggagtaccctggaaaggaagtaaaaaaaggtctagataacctctacaagaaagttgataaacatttatgtgaagaagagaacttacttcaggtggtgtggcactccatgcaagatgaatttatacgccagtataagcactttgaaggtttgatagctcgctgttatccctggatctggtgttacaatggaattcacctaattcaggacatttctgggattatttgttccaagcattgcacaggtcccactaaacccttgtggaaagaaagaaaaagataactgaatgaagcatttgagtataacagacactataccaaaatacccatcaacttgttttgagaacccagacttaaaattttatgtattattaaatgttacgataaatgggtagtacccatacctacaaatatttaaatgccaaaattacccaacctataatagcagttttatttgcccctataaggttgcatactaacttaagcattcatggtcaccataaaatgcctttagcatttctccaatggactgggatggggaaattttccctttattgccctagcctgccttgtgtttgagtgggttgtccctatggagcaatgccatttgggaggttcttcagctttcactacttctctgttgcttggctaatcaggtaacctacttaaaatacagtaccaaaattgtttttttcacactaacaaatgtgtatatagagaagagggctcatgtgatgatcatttgtgaacttagatttttgaggattatgtgactagtaataaatgtgaaatcaattttcaaaaaagttaaaaaaaaaaaaaaaaaa

SEQ ID NO: 155622 - DNA, 1060 bp, Homo sapiens
  misc_feature (1)...(1060): n = a,t,c or g
tttttttttttttttgagatggagtcttgcccggtcaccaggctggagtgcagtggcgcggtctcggctcatggcaacgtccgcctcctgggttcaagtcattctcctgcctcagcctcctgagtagctgggattacaggcgcccaccaccacgcccagctaatttttgtatttttagtagagacaagtttcaccatgttggctgggatggtctcaatctcctgacctcgtgatccgcccgcctcagcctcccaaagtgctgggattacaggcgtgagccaccgcgcccggctgacccttttaatttttaagaggtgttcaatccgagatgaatcatttgaagtatttttatatgtatatctatttaaaactaatatattattaaaggcttaattgccatgccgtttatcttctctgaaaggaactttcaaatctttacctgccaacatattcaccataatttttttattttttaatacctttcatacaataacttttttaaaacaacctcaggattggaaaaggcaaccttaaatttactttcggctctctaaatcaggcatttcaatgtatttatttttttaaaatttttctncaaaaagttaactaaaaaattgtgtcggaccctacttttgagaaaacctacgtttccccaagttttatgggaactgggctattcccttgtcccgggcacaccgtnctcattcccttccctttcagaggcctaaaacctcatttgataaggcactcctaggtctctgggcctgtgggatccagtggctattctgtccaccaacctaaggaatcccaattgcacccttctggtttctggacagtcacagggtgacagctgtggattctataatacagactggtgtcttagaaggtaggaataatacatgatttatggaagcatcaccctgctaatacataataatgtctttttatattataagtgattgagtttagttcattttaatacattgtacatgaaaaaatgaaaagtagaactttgtaatactttaatcaataaaattaattaccaaatgaaaaaaaaaaa

SEQ ID NO: 155623 - DNA, 1050 bp, Homo sapiens
  misc_feature (1)...(1050): n = a,t,c or g
gaagacattgcaatctggttgcccaaggctggaagtgcaatggtgcaatctcggctcactgcaacctctgccttccctggttcaaagtgattctcctgcctcagcctccctgggtagctgggattacaggagtgtgccaccacggtcagctaatttttgtatttttagtagagacagcgtttcaccatgttggtcaggctggtctcgaactctccacctcaggtgatccgcctgtctcagcctcccaaagtgctgggattacaggcgtgagccacagtgccaggcagtaacgagctttttaattttctccccacatgatacttattgatgacagaggaaaaaaagtatattgtagaaacctcgctcataccaccttaaccaaggaatcaaggcagtatcaccattaacggaatgaaatgataccatgtccctcctgacactctgagaactcaacatttcttttgaggcaagtcatgccataatgctcaccctatatttaatcatgataaaccgccacaactccaactaatgaacataaaatcagccatcaaaggcccgtacttatttttgaagagtacaaaaacatgaaacagactgaggaaatattcctgattataggttgctaaacgtgttaacagtgtgacatctgggatcaggaaaacacttgtctttcactataaagagtattactggaactaattgatggattttcaacaaagtctacagattcataagagcactatatgttaacttcctttgttaactgtactactgtctttgttttctgttgctnnnnnnnnnnnnnnnnnnnnnnnnnnnnnnnnnnnnnnnnnnnnnnnnnnnnnnnnnnnnnnnnnnnnnnnnnnnnnnnnnnnnnnnnnnnnnnnnnnnnngagaaccttctttgctgctgggtactttcaacagagtcctgaggtggtgcaaggcatcacgtggccagggggctgagcatgctaacctgctagctcaggtctctcttcctcttcttataaagccgctagtcccactcctatgataactcattagtcc

SEQ ID NO: 155624 - DNA, 573 bp, Homo sapiens
aagagcaactccaagacacataattgtcagattcaccaaagttgaaatgaaggaaaaaatgttaagggcagccagagagaaaggtcgggttaccctcaaagggaagcccatcagactaacaagcagatctctcggcagaaactctacaatccagaagagagtgggggccaaattcaacattcttaaagaaaagaattttcaacctagaatttcatatccagccaaagtaagcttcataagtgaaagataaataaaatactttacagacaagcaaatgctgagagattttctcaccagcaggcctgccctaaaagagctcctgaaggaagcactaaacatggaaaggaacaaccggtaccagccgctgcaaaatcatgccaaaatgtaaagaccattgaggctaggaagaaactgcatcaactaacgagcaaaataaccagctaacttcataatgacaggatcaaattcacacataacaatattaactttaaatgtaaatggactaaatgctccaattaaaagacacagactggcaaattggataaagagtcaagacccatcagtgtgctgtat

SEQ ID NO: 155625 - DNA, 578 bp, Homo sapiens
gttgcagccaaatgtatgcacaaagatgctaaaaagggcttcatcaggctggacatgtcctagttccaggagcgacacgaggtggccaagtttattgggtctccaccaggctacgttggccatgaggagggtggccagctgaccaagaagttgaagcagtgccccaatgctgtggtgctctttgatgaagtagacaaggcccatccagatgtgctcaccatcatgctgcagctgtttgatgagggccggctgacagatggaaaagggaagaccattgattgcaaggacgccatcttcatcatgacctccaatgtggccagcgacgagatcgcacagcacgcgctgcagctgaggcaggaagctttggagatgagccgtaaccgtattgccgaaaacctgggggatgtccagataagtgacaagatcaccatctcaaagaacttcaaggagaatgtgattcgccctatcctgaaagctcacttccggagggatgagtttctgggacggatcaatgagatcgtctacttcctccccttctgccactcggagctcatccaactcgtcaacaaggaatgtat

SEQ ID NO: 155626 - DNA, 1619 bp, Homo sapiens
tgatgaagcttctgaggacttctgaagccaagtaccaagagaagcagcggaagcgtgaggctgaggagcggcgccgcttccccctggagcagcgactaaaggagcacatcattggccaggagagcgccatcgccacagtgggtgctgcgatccggaggaaggagaatggctggtacgatgaagaacaccctctggtcttcctcttcttgggatcatctggaataggaaaaacagagctggccaagcagacagccaaatatatgcacaaagatgctaaaaagggcttcatcaggctggacatgtccgagttccaggagcgacacgaggtggccaagtttattgggtctccaccaggctacgttggccatgaggagggtggccagctgaccaagaagttgaagcagtgccccaatgctgtggtgctctttgatgaagtagacaaggcccatccagatgtgctcaccatcatgctgcagctgtttgatgagcctcttgatgggattcaagtgcacagctatgaccagacccgaatgtgccctcttggagctctctgcctggtagacaggtggaaaggagacatggtagtagctggcattttgcattttgtgtgccattcgctgtcttcagaggcttatgtgtatcaatttaaccctttcaacaaccctccaaagctagctattattacggcctccattgaacagatgtggaaactgaagcaaaagtcagcactttgggaccaagaggtggaggaagacctgggccatgctctacccggccagtccccatggctagcgcggctcaagttctttgaccataaggggtcgagctctgggagtggccgagggagctcgtgctgcctggactgcaaggtgatccatctggcgaagtgtcacctgctggctgttgatgtgccgtccagtgcagcctggttgcagacgctgtgccaaaacccccttcggaaaggcagctggactctggaacctaccaataacccacctgagctttctgccctggagatgctggagaactccttgtgcagccccacctgggaaggatcccagttctgggtaacggtgcagaggactgaggcggtcgagcactgtggcctgcatgcctcctacgtgctgagggtggaggctgaaaggctgactctcctgaccatgggagcccagagtcagacggcacagggaaatgacatcttccaggcagatgagactgccatccaccggcagaaggcccagggaaaggccagacaggggcacaatgctctcagagctgattcccatgaaaggaaggtggtagaggggaagttctcttccccacctggaccccaagagctccttgaaagccccccagccctgtatgctgagcccttagactccctgcacattgcttcaggcccatcccagggctccctatactcagacctcttggacggcactcttgctcgggcaggagagggagtacaatggaagaaacctctctattgggacttgtatgagcatgagcagcagcagttgctgaaggccaagctgacggaccccaaagaggatcccatctatgatgaacccgagggcctggccccagcccttccccagggcctttatgatctgccttag

SEQ ID NO: 155627 - DNA, 691 bp, Homo sapiens; identical to SEQ ID NO: 122056

SEQ ID NO: 155628 - DNA, 1435 bp, Homo sapiens; identical to SEQ ID NO: 122057

SEQ ID NO: 155629 - DNA, 4983 bp, Homo sapiens
tctccacgttttgactgaggccatctccatgcatcttttctcttgactggaaatgtggtggaatcaaataaaacaaattcgacaatggtttaacaaaattgtttaataaaatttataaaaatgcatgctttgagaataccttttctcagcttcgcattgttttccttttccacccccaaagaaaataccacaattatacagcacccacacatgtatacactcaaaactacagtgacattcctctacacagaactatattccgatatagcttgaactgccggaaaaatcgaagacaattccaaaaacgtgattgcagggtttgattttttttctccaaaacacttgaggaaacaggtaaaggctattttcaacaaaaggtcttttctttggattgtcaaaaggttggaaattcacatttaaaattaaaagagatcccaaatcaaagaccctcaactacccccctacccccctcaaacttaaccccccttttagggcccacattttttcttcttggctccctaagaaaaaaatttgggaattttgaattttccccgggttttctggggcacacctgggaattggggcaaatgtggttcagctcagccagcattttctggaggacatcatccaaaggcaggccacctgggggaattctggggctttggagtacaaacccaagggatcttggtgtcagaaaacacatgttgagactccttccaattcccttcccagaatttttcagtagatgaggtaagacccacctcgaatcatcctcagacatcagtttgctaaattgcccaggctcaatgacaagctctccctggccatctccgaagcccaactttttcatagttccgcttctgtctttgggctgcaagccactttaggcactattcctaagtccctggagtatatcactcttgcttccagagcttaaataaacatttaatgaaacacacttactcaagaacaagtcactggatagctgccccattgcaaagttacatactcaggagatgaaagagggaagcccattaaaaggtcttcagagtagacaataccctagtcaagatgtggccagacaaagacacgaacttcttaccctaaaagagccccaataatttctgccatcaagagaactccctatcttgggcaaagcaactgaattccaggagtgagagttgatattaaaacatggaggctgggcacagcagctcatgcccacaatccccagcactttggggggccaaggcagaaggattgcttgaggcccaggagtttaagaccagcttggggcaacatagcaagaccccatctgtacaaaaaaataaaaaggaggctggtgggagaactgcttgagccccagagtttgaggttacagtgagctatgatcacatcactgcattcccaggcctgggctgatggagcgaaactgtctcttaaaaaatggcagggagttggggagctgggcaggtgcagtggctcatgtctgtaatcccaatactctgggaggccaagatgggaggaccacctgagcccaggagtttgagaccagcctgggtaacacagggagaccccgtctcaaatatttaaaaaattagtcatgcgtagtggtgcatgcctgtggtcccagctacttgggaggctgaggtgcaaggatagcttgagcctgggaggacaaggctgcagtgagctgtgattgcaccactgcactccagcctggccgatagaatgagaccctgtcttaaaaaaaaaaaaaaaggcagagggacacaccagtgtagtaatgagcagaagcacacaaattttttttaaaaaattatatacacaaaacaacagaactagagtagctgacttctccccttctttttaaaagtgagacaaaattccttaagaaaatctgcaaggtgctgggtgaaccttctgatgctaaagttgttcttctggaatattaaaatttgggtatcttttggacatcaccaccatgtaaagagtgatgggaaaaaaaaaaaagctttaagaaataagtcgaaacttttctaacacaaacttattagagctataaagtggagagagtataaagctatactaactgcatcactaaccagtctcttttttttccccagaaactcatctcaagggaagggagctgaaaaaccaccagcaacgctgatttctgcatttcccagcacatgggtctggggcccgcctctctcgagtcccctagtcgtcctcgccgcctccgtacatgtcagccagcttcttgaagcgattgccccattcgttcaagtagtcatagtcctggtctttgtctgactctgaggagttcagggagctcagactagcagcttcggaaccgcttccttcatagtcaaacacgagcagagaatcataaggcggggctgtggggtcagtatcagccgctttcagattttcatcaataaaatttccaatttcatcgggattggcagggcggggaagataccgggggacactcatgagggttggtgcaacgtcgttacgagtcacttcaggccgagcgtccaggcccctgtgcagctggctcaagtcaaagtcctggtcctcttctccgcctccttcttcatcatagtaataaacgttgtcccgggtgtcatcctctgggggcagtaagggctctttgaccaccgctctcctccgaagaaacagcaagagcagcagaatcagaattagcaaagcaagaattcctccaagaatccccagaatggcaggaatttgcaatcctgcttcgacaggctgtgccttcctacagacgccggcggccccttcacagtcacacacgctgacctctaaggtggtcacttggtctttattctggttatccatgagcttgagattgattttgtagtcacccacctctaaggccatctttggcttcaaaatgatagattcttgggttgggtcgttgtactgaatggtccagttgggcactcgccccgtgtgttagttctgctgtgaagggagatgtattgggaggaaggtctgcatcaatgatgtttatgacctgaggctttggattcctctcacagaagaatatagttcgaggttctggtatgggggcgttgtcattcacatcagacaggatcagcagaagtgtccctgttccagtagcaactggagaaccattgtctgtagctatgattagggctgtgtacgtgctgttcttcacgtgctcaaaatcctccctgtccagctcagcccgagtggaaatggcaccagtgtccggattaatctccagccagttggcagtgtctctccaaatccgatatgttattttctgttccataaatgtgtctggctcctgggcagtgtaggatgtgatttcctggcccacgccaaagtcctcggacacttccactctcttttcaggaggcacaaagatgggggcttcattcacatccagcacatccacggtgacggtggctgtggaggtggtgagagagacctcaaaaggtaccacattcgtcactgctacgtgtagaatgtactgctgcttggcctcaaaatccaagccctttgctgttttcaaaatgccatcgttgttcactggatttgtggtgacgacaaattgtccaccatcatcattcaatatggtgtatacagcctcccacgctggggtattgggggcatcagcatcagtcactttcagtgtggtgattacgacgttagcctcgttctcaggcacctgacccttgtacgtggtgggattgaagatcggaggattatcgttggtgtcagtgactgtgatcacagctgttgctgttgtgcttaacccctcaccttgaaggtcagcagcttgaaccaccagggtatacgtagggaaactctctcggtccagcccagtggtgaccacactgatgactcctgtgttcctgttaatggtgaacatatttttgtcagggagctcaggatcttggctgaggatggtgtaagcgatggcggcattgtaggtgttcacatcatcgtccgcgtctgtggctgtgacctccatcacagaggttcctggaagagcaccttccatgacagaccccttaaagacctcctgggtgaattcgggcttgttgtcattctgatcggttaccgtgatcaaaatctccattggatcctcaactgcattcccgttggatgacacagcgtgagagaagagagtgtatgtggcaatgcgttctctatccagaggctctgtcaccttcagccatcctgtttctctttcaataataaagacaccaacagggggtgtgtcagctccttggccagtgatgctgtagaaaaccttgccttctttgtctttgttggatttgatctgaaccaggtttttaggaaatgggcctttttcattttctgggcagctgatgggaggaataacccagtctctcttctgtcttctgaggccaggagaggagttgggaaatgtgagcaattctgcttggattccagaaacggaggcctgatggggcggggggcggtggtggtgccccactgtattcagcgtgactttggtggaaaactttctgtaggtggagtcccaggcgtagaccaagaaatggatctgttgggttatgaaaccgtagaggccttttgactgtaatcacaccatctgtgcccactttgaatcgggtgtcgagggaaaaataggctgtcctttgtcgaccggtgcaatcttcaaaattcactctgcccaggacgcggcctctctccaggtggcgccggggcaccgtgaacgtgtagctctcggcgtcaaagccagggtggcagggctccggctcctggcagagccaagaggagacctgcagcagcagcagcagcgccgagaggctgcggctccaagggcccatggctggccggggacgccgagcgagggcaggcgccgggtgcggtcgggtcgggccgggctggagcgggctggagctctgaactgacttgccaagctcacaggtgctttcc

SEQ ID NO: 155630 - DNA, 571 bp, Homo sapiens
tgaggcagtcttgctctgtcgcctaggctgcagtgcagtggcgcgatctcagctcactgcaacctccacctctcgggttcaagagattctcctgccttagcctcctgagtagctgggactacaggcgcccaccaccacgctcagttaatttttaaaaaatatttttaatagagacggggtttcaccatcttggccaggctggtgttgaacgtctgacctcatgatccacccggctcggcctcccaaagtgcggggattataggcataagccactgcacctggcctgaactttttaaataaacgttagcccattacacatcctgtcatatggcatgtaggcagtgtggtatggatgaaagagatgtggagagaggcagacatagactgaaatcccagctttgtctgttactagatgtggaccttgggcatattacttagcttctcttagcttcagtttcctcatctgtaaaatgggaatattaattacaatgctcatatggttgctctgaggtttaagagaaatagcatatgtatacttcagcattcagtatgtgccttcttgtaacttcct

SEQ ID NO: 155631 - DNA, 572 bp, Homo sapiens
gcaccgatgccggcggccactatgactgcccgcagcgggccggccgccattagtacgcgctgcccctggcgcccccggagcccgagtacgccacgcccatcgtggagcggcacgtgctgcgcgcccacacgttctctgcgcagagcggctaccgcgtcccagggccccagcccggccacaaacactccctctcctcgggcggcttctcccccgtagcgggtgtgggcgcccaggacggagactatcaaaggccacacagcgcacagcctgcggacaggggctacgaccggcccaaagctgtcagcgccctcgccaccgagagcggacaccctgactctcagaagcccccaacgcatcccgggacgagtgacagctattctgcccccagagactgcctcacacccctcaaccagacggccatgactgcccttttgtgaacacaatgtgaaagaagcctgctgtggtactgagcgtcgggctgtcacaaggcactggaagaacgggagcctgctggtccagagtgtgcgagcgtatcggcgagcgtcgacactctgaatgcgcagacgccaccc

SEQ ID NO: 155632 - DNA, 444 bp, Homo sapiens
  misc_feature (1)...(444): n = a,t,c or g
gcgtattcataggcacagtcattnnnnnnnnnnnnnnnnnnnnnnnnnnnnnnnnnnnnnnnnnnnnnnnnnnnnnnnnnnnnnnnnnnnnnnnnnnnnntggnnnnnnnnnnnnnnnnnnnaaaagggggttttgttgggtcccccaggttggggggcaggggcacgattttggtttatggcaatctccatttccgggattaaggcaattttcggggtttttcctctggaaaagttgggattacgggcaccccccaccttgttaagtnnnnnnnnnnnnnnnnnnnnnnnnnnnnnnnnnnnnnnnnnnnnnnnnnnnnnttgaaactctggacctgaggggatccccttgcttaagtctcccaaagggtggggattcccggcttgagtcattggccttagcctacgggcaatttgtgactgggaaaattttttttccagagg

SEQ ID NO: 155633 - DNA, 338 bp, Homo sapiens
  misc_feature (1)...(338): n = a,t,c or g
nnnnnnnnnnnnnnnnnnnnnnnnnnnnnnnnnnnnnnnnnnnnnnnnnnnnnnnnnnnnnnnnnnnnnnnnnnnnnnnnnnnnnntaaaattaatatgggaatacttctcaaactggtgtacagattcaacataaaccctgtaaaaaccccagctggactgtttnnnnnnnnnnnncatgaaaaacagaaattgacaagcggatcctaaaattcatatggaaatgcacggaacatagaatagccaaacaatctttaaaaagaacgaagctagaggacttccttctcaatttcaaaacttactatgaagccacagaaattaagacatcgtagtaccac

SEQ ID NO: 155634 - DNA, 2174 bp, Homo sapiens
  misc_feature (1)...(2174): n = a,t,c or g
caaacgactatccttcaaaacaggctaaagtgttatgtttctgaaagccagatgtggattggttcagttatacctattaagtgcttaaaacttaaatgtaaattatgtatgtgcttttttgtaagggagtgtttagacatttctgatgattagtcttctacttgtctaactttcttaatttggatttcagattaacgtcttcaaggacccagttgctgatcccaacaaaaggtccaaaaagggccgattatctttacataggacgcccagcagggaattttgttacactggagtgaggaaaaggagaccttgaggaatatggtcacggatcttctccatactgtctcaaaagaatggcaaggtgacaaaagcctattcatttgatgaaataagaaaaaatgcacagctgaatattgaactggaagcagcacgatcattaggccttatggactgggtgtgtgttgtgtgtatgtaatacataatgtttattgtacagatgtgtggggtttgtgttttatggatacattacagcccaaattatttgttggtttatggacatactgccctttccattttttttccttttcccagtggtttagggtgatctccaaattagggaaatgcatttaaccatgtaaaaagatgaagtgctaaaagtaagccttttagggccctttgccaataggtagtcattcaatctgggtattgatcttttcacaaataacagaactgaagaaacttttatatataactggatgatcacataaaacagatttgcataaaattaccatgattgctttatgtttatatttaaactggaatttttgtacgaaacaagattgtgtaagatatatttgaagtttcaggtgatttaacccagtctttccaacttttcatgatttttatgaagcacagactttcaagaaaatacttgaaaataaattacattgccttttgtccgattaatcagcaaataaaacatggccttaacaaagttgtttgtgttattgtacaattttgaaaattatgtcgggacataccctatagaattactaacctgactgcccctgtgtagagtaatgtattaatcattgctacattaaagaaaataatgggttccttactgggaantgtctagggcactgtacagcttattatatatcttggttgttgtattgtaccagtgaaatgcccaaatttgaaaggccctgtactgcaattttatatgtccagagattgcctgtggctctaataatgcacctcaagattttaaggagataatgtttttagagagaattttcgccttcccctatagaatatatacataaatgtaaaatacttacaaaagtggaagtagtgtattttaaagtaattacacttctgaatttatttttcatattctatagttggtatgacttaaatgaattactggagtgggtagtgagtgtacttaaatgtttcaattctgttatatttttttattaagtttttaaaaaattaaattgggatattaaattgtatgggacatcatttattaattttaaactggaatgccctcaataaggtaatactgaagcacattcttagatgaagataaattatctccaatgaaaaggcatgacatgtgtttcaataggaggaatcttaagttgggctaaattccaaagtgcttggacatccaaaatgttcctaggagtgattagctactagattctgaatcagacatcacatctgactagagaccagtttctttcgaatgadttcttttatgtatgtagatctgttcttctgaggcagcggttggccaactatagcccaaaggccaaatttggacttctttttataaatgcagattgtctatggctgctttcccactactccagcctaaggtaaacagctgcaatagaagccaaatgagaatcgcaaagcccaaaatgtttattaacctgccctttacacaaaattacacaaaaagtttcctgatctctgttctaagaaaaggagtgtgccttgcatttaaaaggaaatgttggtttctagggaagggaggaggctaaataattgatacggaattttcctcttttgtcttcttttttctcacttaagaatccgatactggaagactgatttagaaaagtttttaacatgacattaaatgtgaaattttaaaaatt

SEQ ID NO: 155635 - DNA, 460 bp, Homo sapiens
ttacattccagtgcggcggaattcgaatgatataccccccatatggggttgaggtaagggtcaagcaagataaggtacgtaaagcgctttgtaaaccaggcagctctacataaatattaaccaaaggaccaaaagatgagagaaaccagcgtcatccattggtggtgccatatcctcagtggtaacctagctgacttcttcctctccaggacaagagcgaagccaccaggggagctctctcccaaaggccttgtcgccccagacctaactcgctccccctcaacctgcctgaggaagaaactctcaggattgcacggatattttcttctcagtactcccagaaagactgacgcagcctgaggggctggggggaaggagacacctgcccaccctccgtcagctttgtccagcttgcaggaggcaccaggtctggctccttcagggctgtcacagtcctgaa

SEQ ID NO: 155636 - DNA, 1805 bp, Homo sapiens
gaacgatgcacaatgccagatgagccattggtaagagctccagataaaggcacagattccccatcaccccctcctctcgaagagacttcaaatggaggaagaatgctccatgagtccctgaggcatgcagtacccattacaaggatgcagagcagtgaagacactgaggcaggcgccagcctacagtgatgaggactatgaagaagacatcattgagcccaggaccttaaatgagatcaccacggtgacagacaaaactagcccttggtctagtgtcatatcagacacaagtgaggtcatcagccctcagcctgacgaggtgcagagggaaggcccctcttgtccttctccagggcctttctgcagagaggagcttatggtcaaaagtagctttctctccagcccagaaagggctgtcaacccccacctgcctaggcaggatgtctcctagccaaagtcttgttgcttgtgagtgtgaggcctctaaggccagggttggtggcgagtctgcctcagccaaccctcagcccatcccatgcccaacactctcaggagctcaacagagcagcacgtttgttggatggagctcaccacagacagatcagaacaaggagcccaagtcagaggccccagcttgaggaattgaaggttgccaccagttgaggttcggttgactcttgcttgattagctttcaagaagttgccgctaaatctagcctcccagagcagaagggaaaaccataagggaccacccatcgactcctctgacatcaggcagaggcaggtgacaactggatcagagacgtccacaaagcagagcctcctgctcccagggcccattgtggtgcccaacttctttttgcctccccagcagttggaggcttccctgcggatgctttcactctcagcaactttgccaccagcagccacaacagatcaggacaagagcgaagccaccaggggagctctctcccaaaggccttgtcgccccagacctaactcgctccccctcaacctgcctgaggaagaaactctcaggattgcacggatattttcttctcagtactcccagaaagactgacgcagcctgaggggctggggggaaggagacacctgcccaccctccgtcagctttgtccagcttgcaggaggcaccaggtctggctccttcagggctgtcacagtcctgaaaccaccacttgcctaggccacggatgcctcaagagacccggtcagcccagactggagggagtgccccaaaccagtccagtgtccactttgccagaattttagctccttttttctgtgggtgagggcaaaggctaggaaattaaaatggggaattccgcgccccaagttggggaccccaagcagggcatcttttccggtggaaaaaacgccccccccagtgtcccttgaacacagctgacctgctggcaatgaagccccacccctctgccctgaagatgccaggcccatttttgcccttaaaagttggggagaagggaacatgtagattgtgtgcattgtgccatagtcaaggaaatccctagggcccacctccagttcatttgtgtgggaacaaggatattttatagatacaaattatttttatgctgtgttgaattaatcaattaggagaggaaggggaaatcacttccttcaaacttattatctgattgtctaaaattctaaccatgcttataacttattaattttacccagatctgaaggtcattgttcttacatatagtttgaatcaaatcatatagaagtttgtaaaaaaaaaaaaaaaaaaatgaaaa

SEQ ID NO: 155637 - DNA, 2578 bp, Homo sapiens
gcgattgtggaggacaaacacagtggcaggagttatgacataacctcagatcttgggaatgttctcacttctacttcgatcgccaaaaccgttaatggttaagctgaaagcagtgacagtggagccgagtctgatgaagaagatgcccaagaagatttgatgggagcatatcatagtgatattgataagaaaatgatgaagatagtagcagaccataagaatttggaagtcattgttactaatggctatgataaagatggctttgttcatgatatacagaatgacattcatgccagttcttccctgaatggcagaagcactgtacatgtaaagcccattgatgaaaacttggggcaaactggaaaatctgctgtttgcattcaccaagatataaatgatgatcatgttgaagatgttacaggaattcagcatttgacaagcgattcagacagtgaagtttactgtgattctatggaacaatttggacaagaagagtctttagacagctttacgtccaacaatggaccatttcagtattacttgggtgtgcattccagtccacccatggaaaattctggatttcgcgaagatattcaaggacctcctggaaatggcaacattgggaatatgcaggtggttgcagttgaaggaaaaggtgaagtcaagcatggaggagaagatggcaggaataacagcggagcacccacaccgggagaagcgagccggagaaactgacgaattctctaatgttagaagaggaagaggacataggatgcaacacttgagcggaaggaaccaagggccggcaggtgggaagtggaggtgatggggagcgctggggctccgacagagggtcccgaggcagcctcaatgagcagatcgccctcgtgctgatgagactgcaggaggacatgcagaatgtccttcagagactgcagaaactggaaatgctgactgctttgcaggcaaaatcatcaacatcaacattgcagactgctcctcagcccacctcacagagaccatcttggtggcccttcgagatgtctcctggtgtgctaacgtttgccatcatatggccttttattgcacagtggttggtgtatttatactatcaaagaaggagaagaaaactgaactgagggaaaatggtgttttcctcaagaagactactggaactggatgacctcagaatgaactggattgtggtgttcacaagaaaatcttagtttgtgatgattacattgctttttgttgtccagtagtttagtttgtgtacatatatacacatatatattttgcactacacaaacgataacattttaaggactaatattgctgatacttgaataatcaatctctactaggttataagtagtatacacagatttaccctgcccttgaacttgaaggacattaaattattaatgatcatttggtaacatgtttacctgattatcttccatagagtaacataagctgcttttcaaaggtaccattgtgataatgagatcaaatttataagttattatttttaattttctaaattaaataaaagaaagaatgcaaaccaggagtgaatttcaaatgagacgtaatagggctttatatgttagtctcgaagttgccatggcatgtagtaggaaaaccacaggaaggaatggtcatattcactttgtggggctgcccattaatctttcttggggcatttcacaactcttgagtttgggtgttcagggcatccatttatttaaaaagtgggagtccctatggtacccagactggaggttttttaccaatgatttgcaggctagacataacccactgatggaaatggtgaagaatgagcttcatgtaggtttaaaagtgtattctgagcctgtagatgattaatcaggtttttattcaatcatataaatgtattcctttgtaatcatttttgtttaactgaggatatctagtgtctgcttcatagggtgctttgaaatataaaatgaaaacttatttatactgtttttacaacagtcaaaaaggaaacacacgaaaatcacttttctgcaactgatgaactatatagactggactcttaacctcttagtgcctcagtttttccttcggggtatactattttagatacacctacttcacaggagtactggagggatttgcaagctaacgggccaaatgcttccataggaataaggcatgcccagctaacagaaatttaagtccctcttccccacctctctcatctagaccaaaaagaagactacaatttagatccttggagacttttcctgtatgccttccaaaacttcctgctcacttagatgtaccttgtgctttgaagatttctttgatgcagtctttgtaacaaataatttttttttttaaatggagtttctctcttgttgcccaggctggagggcaatggcgtgaacttgggctcactgcaacttccacctcctggggttcaagtgattctcctgccctcactcccaagtagctggggattacaggcatgcaccaccatgcctgggctaaattttgtaattttttagtagagacggggtttctccat

SEQ ID NO: 155638 - DNA, 469 bp, Homo sapiens
ttcttcattgagaatataaccggtttggcttttgtaatgccattatattcattatattaattttcatatgctgaaaaatgtcctcatgcggaaatgtggggtacatgacagggaaaagtttctggttttggattacttctgtcaaagctcagtactcgcagtcttgtatttaatcctctccctttgctactttccctaccaggatgttgcttcagagtgtgaagtcaaatgcatgccaacattccagttttttaagaagggacaaaaggtgggtgaattttctggagccaataaggaaaagcttgaagccaccattaatgaattagtctaatcatgttttctgaaaatataacccaccattggctatttaaaacttgtaatttttttaatttacaaaaatataaaatatgaagacataaacccagttgccatctgcgtgacaataaaacattaatgctaacacttttta

SEQ ID NO: 155639 - DNA, 1113 bp, Homo sapiens
ttttttgggatttggattcaaaattttaataataaattgtgccagtagaagcttttcaaaggtaatgatatatcaataaataatagttaaactgagttcctgagaaagaacctaccacatgaaagtatgtcagagcgctgtgagtaacaacatggcacgactataaaatagcgagaatactgacagtcacgacgacaggcacagcagacttgagtatgccactcacacaaatgtaaaccagtacacaggaatctttatttttttagtttaaacactgataaacttctaagtgttgttgcctagatatatactaagtaatggatacattatgctaagaacttcgaggaaaaatatgtggaataatataatgaaaattatgaagcatccagattttttaaaaagcaaaaaagaattgaccttttgactcagatagtaaatcacttgaagataggaatcatactaatttgaaataaggaatattgtgtttatctctgtgtgtgtgtgtgtgtgtatacacgcacatacatctatacttctaagaaaatacgtatggcttactttttatttcaatgtcattttgaagaatctttgcttttttacaaaggttaggaatatgtattgtttaaaccaagttaagatttgatacttcaaagtacactaaaagaacaaaaaaaaaagtgagagaaccattagatcactcagtttcctgacagtaacagaagaaaacaggactaagaacattcactgaagctttaagtgtgggcagtctgtcagtaaaaaggtaagtagtagggtcagaggtatggcattccacataccagctctaccaagaatgaaagagcatacggtctacagaaacggacgtgtgtccgtgattaaactttttggcatcgctgtattaatcccttttgatgtatataagttcagtatatgacaaatgtttcagttcccccccccaaagaatccaatcacaaccaagacacacacacaaatcacttctcagttacacatctgcatttctttaacaaaacagtaagagatacaatcatagcgaagaggtcacccgcacaatacattatcagcacactgtctagaacacctcatttaaagaca

SEQ ID NO: 155640 - DNA, 3731 bp, Homo sapiens
  misc_feature (1)...(3731): n = a,t,c or g
atgaggccaaagacttttcctgccacgacttattctggaaatagccggcagcgactgcaagagattcgtgaggggttaaagcagccatccaagtcttcggttcaggggctacccgcaggaccaaacagtgacacttccctggatgccaaagtcctggggagcaaagatgccaccaggcagcagcagcagatgagagccaccccaaagttcggaccttatcagaaagccttgagggaaatcagatattccttgttgccttttgctaatgaatcgggcacctctgcagctgcagaagtgaaccggcaaatgctgcaggaactggtgaacgcaggatgcgaccaggagatggctggccgagctctcaagcagactggcagcaggagcatcgaggccgccctggagtacatcagcaagatgggctacctggacccgaggaatgagcagattgtgcgggtcattaagcagacctccccaggaaaggggctcatgccaaccccagtgacgcggaggcccagcttcgaaggaaccggcgattcgtttgcgtcctaccaccagctgagcggtaccccctacgagggcccaagcttcggcgctgacggccccacggcgctggaggagatgccgcggccgtacgtggactaccttttccccggagtcggcccccacgggcccggccaccagcaccagcacccacccaagggctacggtgccagcgtagaggcagcaggggcacacttcccgctgcagggcgcgcactacgggcggccgcacctgctggtgcctggggaacccctgggctacggagtgcagcgcagcccctccttccagagcaagacgccgccggagaccgggggttacgccagcctgcccacgaagggccagggaggaccgccaggcgccggcctcgctttcccaccccctgccgccgggctctacgtgccgcacccacaccacaagcaggccggtcccgcggcccaccagctgcatgtgctgggctcccgcagccaggtgttcgccagcgacagccccccgcagagcctgctcactccctcgcggaacagcctcaacgtggacctgtatgaattgggcagcacctccgtccagcagtggccggctgccaccctggcccgccgggactccctgcagaagccgggcctggaggcgccgccgcgcgcgcacgtggccttccggcctgactgcccagtgcccagcaggaccaactccttcaacagccaccagccgcggcccggtccgcctggcaaggccgagccctccctgcccgcccccaacaccgtgacggctgtcacggccgcgcacatcttgcacccggtgaagagcgtgcgtgtgctgaggccggagccgcagacggctgtggggccctcgcaccccgcctgggtgcccgcgcctgccccggcccccgcccccgcccccgccccggctgcggagggcttggacgccaaggaggagcatgccctggcgctgggcggcgcaggcgccttcccgctggacgtggagtacggaggcccagaccggaggtgcccgcctccgccctacccgaagcacctgctgctgcgcagcaagtcggagcagtacgacctggacagcctgtgcgcaggcatggagcagagcctccgtgcgggccccaacgagcccgagggcggcgacaagagccgcaaaagcgccaagggggacaaaggcggaaaggataaaaagcagattcagacctctcccgttcccgtccgcaaaaacagcagagacgaagagaagagagagtcacgcatcaagagctactcgccatacgcctttaagttcttcatggagcagcacgtggagaatgtcatcaaaacctaccagcagaaggttaaccggaggctgcagctggagcaagaaatggccaaagctggactctgtgaagctgagcaggagcagatgcggaagatcctctaccagaaagagtctaattacaacaggttaaagagggccaagatggacaagtctatgtttgtcaagatcaaaaccctggggatcggtgcctttggagaagtgtgccttgcttgtaaggtggacactcacgccctgtacgccatgaagaccctaaggaaaaaggatgtcctgaaccggaatcaggtggcccacgtcaaggccgagagggacatcctggccgaggcagacaatgagtgggtggtcaaactctactactccttccaagacaaagacagcctgtactttgtgatggactacatccctggtggggacatgatgagcctgctgatccggatggaggtcttccctgagcacctggcccggttctacatcgcagagctgactttggccattgagagtgtccacaagatgggcttcatccaccgagacatcaagcctgataacattttgatagatctggatggtcacattaaactcacagatttcggcctctgcactgggttcaggtggactcacaattccaaatattaccagaaagggagccatgtcagacaggacagcatggagcccagcgacctctgggatgatgtgtctaactgtcggtgtggggacaggctgaagaccctagagcagagggcgcggaagcagcaccagaggtgcctggcacattcactggtggggactccaaactacatcgcacccgaggtgctcctccgcaaagggtacactcaactctgtgactggtggagtgttggagtgattctcttcgagatgctggtggggcagccgccctttttggcacctactcccacagaaacccagctgaaggtgatcaactgggagaacacgctccacattccagcccaggtgaagctgagccctgaggccagggacctcatcaccaagctgtgctgctccgcagaccaccgcctggggcggaatggggccgatgacctgaaggcccaccccttcttcagcgccattgacttctccagtgacatccggaagcagccagccccctacgttcccaccatcagccaccccatggacaccttcgaatttcgaccccgtagatgaagaaagcccttggaacgattgccagcgaaggttagcaccaaggcctgggacacactcacctcgcccaataacaagcatcctgagcacgcattttacgaattcaccttccgaaggttctttgatgacaatggctacccctttcgatgcccaaagccttcaggagcagaagcttcacaaggctgagagctcagatttagaaagctctgatctggtggatcagactgaaggctgccagcctgtgtacgtgtagatgggggccaggcaccccccaaccactcggctggccntcccaggtccagggtccccggaagccggttgcccttcacaggcccaattaggggaagccgagggctgttttgttttaaatttagtccgtcggattacttcacttgaaattctgctcttcaccaaggaaaccccaaaccaggacacttttgaaaaccaggactcagcatcgctttcaataggcttttcaggaccttcactgccatttaaaaccaatatttttggaaaatttagtacagtttagaaagagcacttattttgtttatatccattttttcttactaaattatagggattaactttgacaaatcatgctgctgttattttctacatttgtattttatccatagcacttattcacatttaggaaaagacataaaaactgaagaacattgatgagaaatctctgtgcaataatgtaaaaa

SEQ ID NO: 155641 - DNA, 824 bp, Homo sapiens
  misc_feature (1)...(824): n = a,t,c or g
ccctagagcgtttaatttttgtaggggggttgggccaattttttccccccccaaaattaaggttctttcccaaaattccccaattggtttttttttcgcccccttttaggaaaaaaatttttccttgccctccccggttaagtttgggccccccaagggttcttttaaagggcccccccccnnnnnnnnnnnnnnnnnnnnnnnnnaaaaagtgttagccattaatgttttattgtcaccgcagatggccaactggggtttatgtccttccataatttaatatttttgtaaattaaaaaaaattaccaagttttaaattagccaatggctggattatgttttcagaaaaacatgattaagactaattccattaatggttggcttcaaagcttttcccttaattggctcccagaaaattcacccgaccttttgtcccttcttaaaaaactgggaatgttgggcatgcatttgacttcacacttctgaagcaacatccctgacaggtcatccacatctaacttcaagggaatatcacgttgggaatactttttcagagaggggaatgaaaggaaagggcttgatcattttggcaaagcccacaccacgtgggctggagaagtccaactacttacaagttttatcacctggcagcgtccaaaggcttcctggaaaagcagtcttggctcctccgatctggcttcaccatcttgggctgctggaagtctgacgagcggctggtaagggaccgacgggaaatgggatccaaagctccaaacagcagcttcaagacgtcgctgcttgctctctccctttataaactggca

SEQ ID NO: 155642 - DNA, 1372 bp, Homo sapiens
tgtactcttagtacagtgtggtggaattcgagtctttccttcattaggccacagcagggctcaagatcccagtataccctcttgttttcagctttgatccttctgaatgaggggcaggggagtgtgcctgtttgcttttctaggagcctctgcttgtactgtcagtctttatacctccatgtgagtatgtacacgcctgcatttgggttcatgcacgtgcttattttttaagatgctttggcatttccctttgtaatgtatacattacaaagggaatacattgcctttgtaatgtatctgtgaagcagacaaagcaaacgatagcatgtccaagtgtctaggcagaaactgcatcctgttgttctaaagaagtagacccaagtttccatagcaagtggttagcagggtcctgaccacttctccttgttctggcacctcctgcaagctcctgggctctctccttgcttgaaatgggcaactgcccttgaaactcctccaagccccaatgggctgcccattgtccctgtgttcccaggatcaagtcgcatggcaggcatgatagaatacgcatatcatctcagagattgggtttcttcctaacaaagaaaagaagaaagggggctgcccccccctttttccaagaaattttgggttcaaattcgcgccctcgggcctcaaggtgggctaacttgaaggtgtttgaaccgaagctgaactacagcgaccatgatgtcatcaaatgggtgcgctaaaattggccgcaagtggcatttattgaaactcgcctgctagctgccactaggcagctagcccaacttccccagccacccttccttcaacaggtccagggtgccggctcccttcccccaccacacattcagtgtctccctcccctccctgctttgcctgcccttcccctttgcaaccaagccccgaagtcttaggtctcgggccaaagcaacattaccaagtggggaccggttggaagcaacccctggggttcccctggggcaggggagttctgaaggctcctgctctccccatccaccgtgtcgtgtcctggccttaatgcccaggctctgagttctgtgacccaaagcccaggtgggttccctttccttccccacccctgtggccacagctctggagtgggagggttggttgcccctcaacttcagagctcccccaaaggccagtgaatggatccccggcctcagtccctactctgctttgggatagtgtgagcttcattttgtaacaagtgtgacttcgtccagttacaaacccatataaactctgtagagtggaaaaaaaaaaaaaaaaaaaaaaaaaaaaaaaaaaaggaaaaaaaaaaaaaaaaaaggcggccgtt

SEQ ID NO: 155643 - DNA, 439 bp, Homo sapiens; identical to SEQ ID NO: 132756
  misc_feature (1)...(439): n = a,t,c or g

SEQ ID NO: 155644 - DNA, 556 bp, Homo sapiens
agcggctgaagactgacactgcccgatcgcctcggaaacctacaagaccatcacagatgctttgggtaactctaccagtggagggtaagtccgtccccttcctaatcaatacagaggctacccactccacattaccttcttttcaagggcctgtttcccttgcctccataactgttgtaggcattgacagccaggcttataaacctcttaaaagttcccaactctggtgccaacttggacaatattcttttatgcactcctttttagttatccccacctgcccagttcccttattaggtcaagacattttaactaaattatctgcttccctgactattcctgggctacagccacaccttattgccacccttttccccagtttaaagcctccttcacatcctccccttgtatctccccaccttaatccacacatatgggacatgtctactccctccttggtgactgatcatgcaccccttaccatcccattaaaacctaatcacccttaccctgttcaatgctaatatcccatcccccagcatgctttaaaaagact

SEQ ID NO: 155645 - DNA, 425 bp, Homo sapiens
ccaggcaatgagatttaccgcaaggcaccatctccttctttgagattgatggacgtaagaacaagagttattcccagaacctgtgtcttttggccaagtgtttccttgaccataagacactgtactatgacacagaccctttcctcttctacgtcatgacagagtatgactgtaagggcttccacatcgtgggctacttctccaaggagaaagaatcaacggaagactacaatgtggcctgcatcctaaccctgcctccctaccagcgccggggtacggaagctgctgatcgagttcagctatgaactctccaaagtggaagggaaaacagggacccctgagaagcccctctcagaccttggcctcctatcctatcgaagctactggtcccagaccatcaatgagattagtgaaatcaccagcat

SEQ ID NO: 155646 - DNA, 379 bp, Homo sapiens
tgctgtaagacttgagtggcctgactgggtggttgtgaggattcaaggagaaaaggtgcaccaaggtgcttcctaagtcggggagaccattcctgggagccacgtgactgacccccaccatggctctttccctccaactcgtgctgatagctggccgctgggaggccgtccccagtgagatcctcaccctcataatggaccttagccccttgctggtcccactcacatcccgtctccattgctgtctgagttccaagactgagtttcttcaagcatccacttgtgctaccaggctgagaagttctgaggatgtgaccccatctgggcatcatttaaccaataaaatttctcgaatggcccttaaaaaaaaaaaaaaaaa

SEQ ID NO: 155647 - DNA, 1386 bp, Homo sapiens
atggcggaggtgggggagataatcgagggctgccgcctacccgtgctgcggcggaaccaggacaacgaagatgagtggcccctggccgagaycctgagcgtgaaggacatcagtggccggaagcttttctacgtccattacattgacttcaacaaacgtctggatgaatgggtgacgcatgagcggctggacctaaagaagatccagttccccaagaaagaggccaagacccccactaagaacggacttcctgggtcccgtcctggctctccagagagagaggtgaaacggaaggtggaggtggtttcaccagcaactccagtgcccagcgagacagccccggcctcggtttttccccagaatggagccgcccgtagggcagtggcagcccagccaggacggaagcgaaaatcgaattgtttgggcactgatgaggactcccaggacagctctgatggaataccgtcagcaccacgcatgactggcagcctggtgtctgatcgaagccacgacgacatcgtcacccggatgaagaacattgagtgcattgagctgggccggcaccgcctcaagccgtggtacttctccccgtacccacaggaactcaccacattgcctgtcctctacctgtgcgagttctgcctcaagtacggccgtagtctcaagtgtcttcagcgtcatttgaccaagtgtgacctacgacatcctccaggcaatgagatttaccgcaagggcaccatctccttctttgagattgatggacgtaagaacaagagttattcccagaacctgtgtcttttggccaagtgtttccttgaccataagacactgtactatgacacagaccctttcctcttctacgtcatgacagagtatgactgtaagggcttccacatcgtgggctacttctccaaggagaaagaatcaacggaagactacaatgtggcctgcatcctaaccctgcctccctaccagcgccggggctacggcaagctgctgatcgagttcagctatgaactctccaaagtggaagggaaaacagggacccctgagaagcccctctcagaccttggcctcctatcctatcgaagctactggtcccagaccatcctggagatcctgatggggctgaagtcggagagcggggagaggccacagatcaccatcaatgagattagtgaaatcaccagcatcaagaaggaggatgtcatctccactctgcagtacctcaatctcatcaactactacaagggccagtacatcctcacactgtcagaggacatcgtggatggccatgagcgggccatgctcaagcggctcctgcggatcgactccaagtgtctgcacttcactcccaaggactggagcaagagggggaagtggtga

SEQ ID NO: 155648 - DNA, 2025 bp, Homo sapiens
  misc_feature (1)...(2025): n = a,t,c or g
atggcggaggtgggggagataatcgagggctgccgcctacccgtgctgcggcggaaccaggacaacgaagatgagtggcccctggccgagatcctgagcgtgaaggacatcagtggccggaagcttttctacgtccattacattgacttcaacaaacgtctggatgaatgggtgacgcatgagcggctggacctaaagaagatccagttccccaagaaagaggccaagacccccactaagaacggacttcctgggtcccgtcctggctctccagagagagaggtgccggcctcggcgcaggccagcgggaagaccttgccaatcccggtccagatcacactccgcttcaacctgcccaaggagcgggaggccattcccggtggcgagcctgaccagccgctctcctccagctcctgcctgcagcccaaccaccgctcaacgaaacggaaggtggaggtggtttcaccagcaactccagtgcccagcgagacagccccggcctcggtttttccccagaatggagccgcccgtagggcagtggcagcccagccaggacggaagcgaaaatcgaattgtttgggcactgatgaggactcccaggacagctctgatggaataccgtcagcaccacgcatgactggcagcctggtgtctgatcgaagccacgacgacatcgtcacccggatgaagaacattgagtgcattgagctgggccggcaccgcctcaagccgtggtacttctccccgtacccacaggaactcaccacattgcctgtcctctacctgtgcgagttctgcctcaagtacggccgtagtctcaagtgtcttcagcgtcatttgaccaagtgtgacctacgacatcctccaggcaatgagatttaccgcaagggcaccatctccttctttgagattgatggacgtaagaacaagagttattcccagaacctgtgtcttttggccaagtgtttccttgaccataagacactgtactatgacacagaccctttcctcttctacgtcatgacagagtatgactgtaagggcttccacatcgtgggctacttctccaaggagaaagaatcaacggaagactacaatgtggcctgcatcctaaccctgcctccctaccagcgccggggctaccggaagctgctgatcgagttcagtgagctatgaactctccaaagtggaagggaaaacagggacccctgagaagcccctctcagaccttggcctcctatcctatcgaagctactggtccccagaccatcctggagattctgattggggctgaagtcgaagagcggggagaggccacagatcacatcaaatgacattagtgaaatcaccagcatcaagaaggaggatgtcatctccactctgcagtacctcaatctcatcaactactacaagggccagtacatcctcacacctgtcagaggacatcgtggatggcaatgagcggcccatgctcaaagcggcttctgcggatcgactcccaagtgtctgcactttcactcccaaaggacctggagccaagaggtggatagtggtgaccaggacacctgcccacactgcaagtgccaaagaccggccagtcaggatcttggggctgattagccccaccaccgcacctcactgtcagctcaccacataagcacttctaaggggagatgggggctgaggacagcttcaaaaagggagagggacaggcctgggcagggggccccacttgggtgcccagcaccaagggcgnagcttccgggctcagaccaactccaaggtcagcctcgcaacaggcccaggcctcctctgaagcagggaccagagggagccaggcagctgtgtacagtgagaagggatccggatgggggagctctgtacagagggctggtgattgtaaaaatttcttttgtaaagtagaagttgggggtggggtgggtgctggctgcaaaaatttctggcttctcttacccctattgcccccggcaataaattgtttctatatgccaaaaaaaaaaaaaa

SEQ ID NO: 155649 - DNA, 1651 bp, Homo sapiens
ttttttttttttttttttatggtccattcgagaaattttattgggtaaatgatgcccagatggggtcacatcctcagaacttctcagcctggtagcacaagtggatgcttgaagaaactcagtcttggaactcagacagcaatggagacgggatgtgagtgggaccagcaaggggctaaggtccattatgagggtgaggaagggcttctagaagtaacaaacatcccaggtccctgactggggagaatgaagacactgaccaagagatgtgaagccactcagggctgtgcagggtctgaggatctcactggggacggcctcccagcggccagctattcagcacgagttggagggaaagagccatggtgggggtcagtcacgtggctcccaggaatggtctccccgacttaggaagcaccttggtgcaccttttctccttgcatccttacaaccacccagtcaggccactcaagtcttacagcaggtgacactcccaaggtcccagctaggaggactttgagaattcaagcattctcagggtctgggattagagacagggaatctgtctccacttcctttacatgggcttagacacagagcccgggagggcaaaggaaaattggaggccccttcttcccatgagccattttctctgcatcccctgcccataagccttcactggcctctgatcaccctcatggttgactgcagctgctcctctcrrgtgccctcatcccctccacgtgtgctcagcgcacgggaaagagtgaaatactcaagttccttcctgagggaactgaggcacagagaagtggagggcatagaactgccaagtggcagggccatggataggaactaggcagcctgccttggcaacctgtgtttttaaatgttgcttatgttcatctgtgacctcttactcaccctctcctgctccattgctttaggctatgaactctccaaagtggaagggaaaacagggacccctgagaagcccctctcagaccttggcctcctatcctatcgaagctactggtcccagaccatcctggagatcctgatggggctgaagtcggagagcggggagaggccacagatcaccatcaagtgagcctggcgctgtctacctgggggtacatggcatggcttgtctgttcctgggctttctctctcagggctcctggggacagataaaggtcctcagggaacctgacctgtgctctcccacagtgagattagtgaaatcaccagcatcaagaaggaggatgtcatctccactctgcagtacctcaatctcatcaactactacaaggtagggaggcaggcaggggagacaggtgtgtgggatgcagagtgcagtcctctgtgggctgaccacctgctgaacccatctcctctgcccagggccagtacatcctcacactgtcagaggacatcgtggatggccatgagcgggccatgctcaagcggctcctgcggatcgactccaagtgtttgcacttcactcccaaggactggagcaagagggggaagtggtgaccagaccctgccccctgcagtgccaagacggcagcaggactggggctgatagcccaccccgcccccactgcagctcccacaaagcactctaagggagatggggctgaggaca

SEQ ID NO: 155650 - DNA, 434 bp, Homo sapiens
gttgagagatggggtcttgctttgtcacccaggctggagtacagtggcacaatcatagctcactgctgccttgaacttctgggctcaggggatcctcctgccttagcctcctataactagtacttagaaactcaccactgcatccagctaacttatttttttatttttgtagagtaagcatctcactatcttaaccaggctggtattaaacttctgggctcaagtgatcctccggccttggttgcccaaaggtttggggattacaggcatgagccactgcactcagcctaactttaaaaatcagagaaaaggatattgccaagttaactttaacaatcaaacaaaaaccctaagccttgcaggaaatacatatttcacaccaattttattttttggtaataaacatgtaaccagttataatttcccatctatgg

SEQ ID NO: 155651 - DNA, 671 bp, Homo sapiens
gcgtggtcgcggccgaggtaccttcttttttttttttttttttgagaacggagtcttgctttgtcacccaggctggactgcagtggcatgatctcggctctgcaacctccatctcccaggttcaagcgattctcctgcctcagcctcccaagtagctgggattacaggcaggcaccactatgccctggcctaattttttgtatttttagtagatatggggattcaccatgttgggtcaggctggtctcgaaactccctgaaccttgtgaatctgccctgcctcggacctccccagtattggggattacagggcatgagcccacccatgccccggcccttaaaatgcccttccttaaagggaaaaatgcccaactcccatccttaaatctcaagggaaatctggattgtcccaaataggattctgttaaatatgtaacatattaataggtaacttgctgtgtaaaattataagccatattttaaaaggttttaaaaatacttattgtgctccatttgtgatataatttctaacatttctgctctgtgatgggggtttatttgtaagaataagaggcaaaggaatgttagcatagcaaaaatgtgtttgaatgagttaaccttttaatcgcaaccctatgtgaataaaattactccactgttaaaaaaaaaaa

SEQ ID NO: 155652 - DNA, 611 bp, Homo sapiens
tctttattttttttcctttgagacagagtcttgctctgtcacccaggctggagtgcagtgtggtgtgatcttggctcacttgcaacctcctcctcccaggttcaagcaattcttgtgcctcagcctcctgagtagctaggattacaggtgtgcaccaccatgcccagctaatgtttgtatttttagtagaaacagggtttcaccattttggccaatctggtctcaaacccttaagtgatccgcccgcctcggcctcccaaagtgctgggattaataggtgtgagccaccagggactggccaccactatattttttctaagtaaatatttttttcccatagtagtagaatctctttctttaaataaagttttaaataaaaatccaatctatggccaaaggtaaaaggcattaacataaatttaaagaaacatttattggatataacaatgaagctattttgaagatggcaaaatattaactacagcattcattaaattatcttcaaatgtttacagataccctgaagctcagagagagtctaaaaactattttcctagttggctttagtctcaaaagtgtcctaagagactaagaagatatagtaggctttg

SEQ ID NO: 155653 - DNA, 3703 bp, Homo sapiens
atgcagcccctggactttagttcagggggaagtgaccccaacatcagcctctcagaaaagatccgagatcagcttgttgttggacagctgattccagactgctatgtagaacttgaaaaaatcattttatcggagcgtaaaaatgtgccaattgaatttcccgtaattgaccggaaacgattattacaactagtgagagaaaatcagctgcagttagatgaaaatgagcttcctcacgcagttcactttctaaatgaatcaggagtccttcttcattttcaagacccagcactgcagttaagtgacttgtactttgtggaacccaagtggctttgtaaaatcatggcacaggatgttagcagcatttttggcctttatattcgagacattttgacagtgaaagtggaaggttgtccaaaacaccctaagggcattatttcgcgtagagatgtggaaaaatttctttcaaaaaaaaggaaatttccaaagaactacatgtcacagtattttaagctcctagaaaaattccagattgctttgccaataggagaagaatatttgctggttccaagcagtttgtctgaccacaggcctgtgatagagcttccccattgtgagaactctgaaattatcatccgactatatgaaatgccttattttccaatgggattttggtcaagattaatcaatcgattacttgagatttcaccttacatgctttcagggagaggctgtattcttttgggccaagttgtggaccacattgattctctcatggaagaatggtttcctgggttgctggagattgatatttgtggtgaaggagaaactctgttgaagaaatgggcattatatagttttaatgatggtgaagaacatcaaaaaatcttacttgatgacttgatgaagaaagcagaggaaggagatctcttagtaaatccagatcaaccaaggctcaccattccaatatctcagattgcccctgacttgattttggctgacccgcctagaaatattatgttgaataatgatgagttggaatttgaacaagctccagagtttctcctagactgttttgtgtgtattcacttatatccatcaagtgactacatttcaaggcactatatgagaaccataaatattgtacaaacaggatttgctaaatgtcggtggagagtaacagtccacggggctgatcatggtgatggcagttttggatcagtttaccgagcagcctatgaaggagaagaagtggctgtgaagatttttaataaacatacatcactcaggctgttaagacaagagcttgtggtgctttgccacctccaccaccccagtttgatatctttgctggcagctgggattcgtccccggatgttggtgatggagttagcctccaagggttccttggatcgcctgcttcagcaggacaaagccagcctcactagaaccctacagcacaggattgcactccacgtagctgatggtttgagatacctccactcagccatgattatataccgagacctgaaaccccacaatgtgctgcttttcacactgtatcccaatgctgccatcattgcaaagattgctgactacggcattgctcagtactgctgtagaatggggattaaaaaacaattcagaggggcacaccagggtttcgtgcacctgaagttgccagaggaaatgtcatttataaccaacaggctgatgtttattcatttggtttactactctatgacattttgacaactggaggtagaatagtagagggtttgaagtttccaaatgagtttgatgaattagaaatacaaggaaaattacctgatccagttaaagaatatggttgtgccccatggcctatggttgagaaattaattaaacagtgtttgaaagaaaatcctcaagaaaggcctacttctgcccaggtctttgacattttgaattcagctgaattagtctgtctgacgagacgcattttattacctaaaaacgtaattgttgaatgcatggttgctacacatcacaacagcaggaatgcaagcatttggctgggctgtgggcacaccgacagaggacagctctcatttcttgacttaaatactgaaggatacacttctgaggaagttgctgatagtagaatattgtgcttagccttggtgcatcttcctgttgaaaaggaaagctggattgtgtctgggacacagtctggtactctcctggtcatcaataccgaagatgggaaaaagagacataccctagaaaagatgactgattctgtcacttgtttgtattgcaattccttttccaagcaaagcaaacaaaaaaattttcttttggttggaaccgctgatggcaagttagcaatttttgaagataagactgttaagcttaaaggagctgctcctttgaagatactaaatataggaaatgtcagtactccattgatgtgtttgagtgaatccacaaattcaacggaaagaaatgtaatgtgggggaggatgtggcacaaagattttctccttttctaatgatttcaccattcagaaactcatttgagacaagaacaagccaactgttttcttatgcagctttcagtgattccaacatcataacagtggtggtagacactgctctctatattgctaagcaaaatagccctgttgtggaagtgtgggataagaaaactgaaaaactctgtggactaatagactgcgtgcactttttaagggaggtaacggtaaaagaaaacaaggaatcaaaacacaaaatgtcttattctgggagagtgaaaaccctctgccttcagaagaacactgctctttggataggaactggaggaggccatattttactcctggatctttcaactcgtcgacttataccgtgtaattgcaacttttgtaattcgggtcagagttcatgatgacagcacagctaggaagcccttaaaagatgtcatgctgggaattgggctacaaccgggaaaatactggaggttccccaaaagcagaaagagatacaatcttgcttgaccgtttgggacatcaatcttccacatgaagtgcaaaatttagaaaaacacattgaagtgagaaaagaattagctgaaaaaatgagacgaacatctgttgagtaagagagaaataggaattgtctttggataggaaaattattctctcctcttgtaaatatttattttaaaaatgttcacatggaaagggtactcacattttttgaaatagctcgtgtgtatgaaggaatgttattatttttaatttaaatatatgtaaaaatacttaccagtaaatgtgtattttaaagaactatttaaaacacaatggttatatttcttataaataccagttactttcgttcattaattaaatgaaaataaatctgtgaagtaccttaatttaagtactcatactaaaatttataaggccgataatttttttgttttcttgtctgtaatggaggtaaactttattttaaattctgtgcttcagacaggactattgcttgttgatttttctagaaatctgcacggtataatgaaaatattaagacagtttcccatgtaatgtattccttcttagattgcatcgaaatgcactatcatatatgcttgtaaatattcaaatgaatttgcactaataaagtcctttgttggtatgtgaaaaaaaaaaaaaaaacaaaa

SEQ ID NO: 155654 - DNA, 373 bp, Homo sapiens
  misc_feature (1)...(373): n = a,t,c or g
ccttggtgtagcttttcagtgtttcttctgcttttggtttgttgagctttttggatttgtgggtttacagttattatcaaatttggaaaaatttcagcccttatgtcttcaaatattttttctgtctccctgccccatccgtagtctttatatatttgatcatctaaagttgtctcacagctcacagtgacactgcttgtttttccagtctttttttccctctaggtgtttcattttgaacaattgctattgctatgtcttcaagatccttaatcttttcttctgtagtgccacatcttacccagtgaacttttcacctcagacatggtattttttatttctagaaattaggtctttttttacatttcccacn

SEQ ID NO: 155655 - DNA, 2223 bp, Homo sapiens
tttccgcagttaggggctgctatttcaacgcagggagataaaaagaaaaaaacacttgctcttctaccccgctaaaaacactcatcctagggagcacgccagcatttgcagcgttcggggcagggccactcggcctgcggccgttgcactggctggaagctggcaggcgatcacggttgattggctcgggtgcggtccaagggcagcaacgccttcggcgggccgcctagggtgattggctgctgcagcccaccccctagccggtttggtgggcggcgaagcctggattggtggagctaagagctggctcagtttcagcgctggctcttcgtgcatggcagagatggcgactgcgactcggctgctggggtggcgtgtggcgagctggaggctgcggccgccgcttgccggcttcgtttcccagcgggcccactcgcttttgcccgtggacgatgcaatcaatgggctaagcgaggagcagaggcagcttcgtcagaccatggctaagttccttcaggagcacctggcccccaaggcccaggagatcgatcgcagcaatgagttcaagaacctgcgagaattttggaagcagctggggaacctgggcgtattggggcatcacagcccctgttcagtatggcggctccggcctgggctacctggagcatgtgctggtgatggaggagatatcccgagcttccggagcagtggggctcagttacggtgcccactccaacctctgcatcaaccagcttgtacgcaatgggaatgaggcccagaaagagaagtatctcccgaagctgatcagtggtgagtacatcggagccctggccatgagtgagccccaatgcaggcttctggatggtctctatgaagctcaaagcggaaaagaaaggaaatcactacatcctgaatggcaacaagttctggatcactaatggccctgatgctgacgtcctgattgtctatgccaagacagatctggctgctgtgccagctttctcggggcatcacagccttcattgtggagaagggtatgccctggctttagcacctctaagaagctggacaagctggggatgaggggctctaacacctgtgagctaatctttgaagactgcaagattcctgctgccaacatcctgggccatgagaataagggtgtctacgtgctgatgagtgggctggacctgggagcggctggtgctggccggggggcttcttgggcttcatgcaagcggtcctgggaccacaccattccctaccttgcacgtgagggaagcctttggccagaagatcggccacttccagtttgatgcaggggaagatggctgacatgttacacccgccttcatggcttgttcgggcagtatgtctacaatgtcgccaaagcctgtgacgaggggccacatcattcccaaggactgtgccggtgtgattctgtatgcagccgagtgtgctacacaggtagccctggacggcattcagtgttttggtggcaatggctacatcaatgactttcccatgggccgctttcttcgagatgccaagctgtatgagataggggctgggaccagcgaggtgaggcggctggtcatcggcagagccttcaatgcagactttcactagtcctgagacccttcgcccccttttcctgcacctagtggcctttcttgggaagtagagatgtggcggctttcccaccctgcccacagcaggccctcctgcccagctgctcttgtcagccctctggcctctggatgaggttgagttctccacaacagctcccaagcatcatgggcctcgcagccgggcctgtgccacggctagtgttgtgtgatttaaaatggactcagcaggaagcatattgtctggggattgttgggacaggttttggtgactctgtgcccttgctctctaacttctgagcccacctcccagggtaggcacctgggggcatgcaggtgcccacctcccagggtaggcacctgggggcatgcaggtacccacctctttctcttgggtgaggctctggcaaggagatctctctgctcaagcacagcagaatcatggcccctctccatgaattggaacttggtacaggttaagtatccctaatcctgaaatctgaaacacttgtggttccaagcattttggataaggcaaattcaactttcagtctcttttctgggggaaaaaaataataaacctagcctagccagg

SEQ ID NO: 155656 - DNA, 1457 bp, Homo sapiens
atggcgactgcgactcggcttgctggggtggcgtgtggcgagctggaggctgcggccgccgcttgccggcttcgtttcccagcgggcccactcgcttttgcccgtggacgatgcaatcaagggggtgttgcgaggagccagaggcagcttcgtcagaccatggctaagttccttcaggagcaaccttgcccccaaggccgcgggagatcgatcgcagcaatgagttcaagaacctgcgagaattttcggaagcagcttggggaaccttgggccgtatttggggcatcacagcccctggttcagtatgggcggcttccggcctggggcttacctggggagcatgttgcttgggtgatgggaggagatatccccgagcttttccggagcagtggggctctagttacggtgcccactccaacctctcgcatcaaccaagcttgttacgcaattgggaatttagggcccagaaagagaagtatctccccgaaggttgattcagtggttgagtacatcggagccctggccatgagttaagccccatgcaggctctgatgttgtctctatgaagctcaaagcggaaaagaaaggtgaggccactctcaacttgggagccaaaatgggcagaggaaatcactacatcctgaatggcaacaagttctggatcactaatggccctgatgctgacgtcctgattgtctatgccaagacagatctggctgctgtgccagcttctcggggcatcacagccttcattgtggagaagggtatgcctggctttagcacctctaagaagctggacaagctggggatgaggggctctaacacctgtgagctaatctttgaagactgcaagattcctggtaagtagcaccgggaatcggggagcccctctcctgacccccttccaggctgatctggctgttctcaagttgagaaagcctctgggttagagaggcttggcattgttagcgcttcagtgacatgtggctaggctgtgagctggggctgctggacagcgctccttcctggccagggccctgcagcggcatgcctaactggcatcacacactccgcatagggtctgtactcagtagccggaggagaagggtcagacctaccctttcccattgatgtccttcagtcttcctgtactttcgcccatccactgcatgtgagtaactcattaactcacgtttttgtaaaatattttaaaaatgagttattcatttttagcattaatgatgctaagaaaaaaaaacaaaacatctgaatccactgatggaatcccgactcagtaaagagaaggcagttctgcttgagtatgagtattttctcccctgaggtggaactgaaatctgacatggtggagcactgtgggagagccagcacagccatcatgtactaaccagaccaggggcatggatttgttgtttggggtttttttttgttttttttgg

SEQ ID NO: 155657 - DNA, 1132 bp, Homo sapiens
  misc_feature (1)...(1132): n = a,t,c or g
cttctcaccaccaccctctagcagctccctcactcggagaggcggccatcagccgcagcttccagagtctggcatgttccccgggcctccccgctgctgaccgcctgtcctactcaggccgccctggaagccgacaggccggcctcggccgcgctggcgactcggcggtgctggtgctgccgccttccccgggccctcgttcctccaggcccagcatggactcggaagggggaagcctcctcctggacgaggactcggaagtcttcaagatgctgcaagaaaatcgcgagggacgggcggccccccgacagtccagctcctttcggctcttgcaggaagccctggaagctgaggagagaggtggcacgccagccttcttggccagctcactgagcccccagtccttccttgcccgcctccagggcgcctggccacccctcccaagctccacacttgtgagaagtgcagtaccagcatcgcgaaccaggctgtgcgcatccaggagggccggtaccgccaccccgggctgctacacctgtgccggactgtgggctgaacctgaagatggcgcgggcacttctgggtgggtgacgagctgtactgtgagaagcatgcccgccagcgctactccgcacctgccaccctcagctctcgggcctgagccccgccatgccctccagcctgcctcaactgctgggccccgggtcatgccctatataaagttggcatggccagggaacaatggtgggcacgttgctcttacatgagcctaagtttggagaccttgaggcccctttgtccctcgctgggtgggcccaaggtctgggaccctgtcttggactgtgggagactcaccctcgaccttncccaggcctctcccctgcaggactggcattgcactaagtctgaggtggccactgcctttgatcaacctttgtgtgcgagggtctaagtagggtcgaacacagaagtgggaaggagaggggtgggccaggggctatatggtgtcactgtgtaaagtttctctgacatgctagctatataaatatatgaatatggacaaaacaaaacacacctaaactgacgaacttgtacttgaaatatgcaaatggggcgcccgtctctcgtgtag

SEQ ID NO: 155658 - DNA, 546 bp, Homo sapiens
  misc_feature (1)...(546): n = a,t,c or g
ctttgttcactttcaatctaagaaaactatgcgtaaaatatgtctttttttttttttttcttcagagacaggatcccgctctgtctcccaggccggagtgcagtggcacgagtcatagctcactgtaacctcaaactcctggactcaagcgatcttcctgccttagccttagcctcctgagtagctaggactgtaggcatgtaccaccgcggcctggcctgtgtctattttatcattcagattaatttaattttgtattttctggctcagatgaacttaaagaagcatcaaacatttcttttttatgaaatgttaaatttaatagcatcacaggccggtaaaatatattcaagtaacagaaatatcaaagtcttttggccacaataaactgaacactttatggaaagcatacttcatcatgggatccactttgaaaatattacgagattcttcaacatttcaaagtggaggaaattaaaaaggccnttnatttaaaagtagtgcttaggggaacagagaaaataaggnttaaaattttaccccttt

SEQ ID NO: 155659 - DNA, 441 bp, Homo sapiens
  misc_feature (1)...(441): n = a,t,c or g
gccaagcttggcacgaggnnnnnnnnnnnnnnnnnnnnnnnnnnnnnnnnnnnnnnnnnnnnnnnnnnnnnnnnnnnnnnnnnnnnnnnnnnnnnnnnnnnnnnnnnnnnnnnnnnnnnnnnnnnnnnnnnnnnnnnnnnnnnnnnnnnnnnnnnnnnnnnnnnnnnnnnnnnnnnnnnnnnnnnnnnnnnnnnnnnnnnntgttaagcctgactacatctttttnnnnnnnnnnnnnnnnnnnnnnnnnnnnnnnnnnnnnnnnnnnnnnnnnnnnnnnntactataaataatacgaatatgccaacattatataatcattgctttctgcaactgtttactataatttcaaaattaatatcctattaactgttcctataaattatcaaatttggcaagtgtattactagcaggagatggaccttaaattatgacaacttt

SEQ ID NO: 155660 - DNA, 817 bp, Homo sapiens
tataacctatgcacattctcccatatagtttaatcatctttagatacttataatgcctaatacaatgtaaatgctatgtaaatagttgttgttatactgtattgtttagggaataacaataagaaaaacagtctgtacatgttcactacagatgcaaccattgttaagcctgactacatctttttatctgcagttgattgaatctatggatgtggaacctgtgcatatggagggtcaactgtactataaataatacgaatatgccaacattatataatcattgctttctgcaactgtttactataatttcaaaattaatatcctattaactgttcctattaaattatccaaatttgggcaagtgtattactagcaggagatggaccttaaattatgacaactttatattttttgatagcatctcttgaaaaagaattttaatgattctaataagaggttctttttcttttttccatttccttgacaaatagtactcatttaaaaactaaggggctaggcttagtggctcacgcctgttaatctcagcactttgggaggctgaggcgggcagatcgcttgaggtcaggagttcaagaccagcccgggcaacgtggtgaaacccggtctgtactaaaaaaaaaaaaaaagaaaaagaaaaagaaaaaagaatacccaggtgtggtagtgcatgcctgtagtcccagctactttggagactgaggtgggagtaccccttgagcctgggaggcgcaggttgcagtgaaccaagatcacatcactgcacttcaacctgggtgacagagcaagaccctgtctc

SEQ ID NO: 155661 - DNA, 413 bp, Homo sapiens
ttttttttttttaaaaagagacatgggtctcattctgtcacccaggcttgagtgcagtggcacaattataactcactgtagccttgaactcctaggctcaagggatcttcctacctcagctttcagagtagtggcactacaggtatgtactaccatatctggctaattttaaaaactttttttttaagagacgggagcttactttattcctcaggctgatcttgacctcctgggctcaagtgagcttcttacttcagcctcccaagtaatgtcttagttacctattgcagcataacaaatcacctcaatgtatgcattttttttaattgaaaacaaattttttaatttttgtgggggtgcatggggtgtatatatgggggggtacatgaggaaggttttgatacggggtcaac

SEQ ID NO: 155662 - DNA, 857 bp, Homo sapiens
ctctttgcaggcccttctgcgatgttttacctggctgcggctgtgtcagatttctatgttcctgtctctgaaatgcctgaacacagatccagtcatctgggggcccactgcagataacaatgaagatggtgccaaaactgctttctcctttggttaaagattgggctcccaaagcatttataatttcctttaagttggagactgaccccgccattgtaattaatcgagctcggaaggctttggaaatttatcagcatcaagtggtggtggctaatatccttgagtcacgacagtcctttgtgtttattgtaaccaaagactcggaaaccaagttagtctcgacacacagcttttataggtgacagaaactgaagtaaaaagcccttataggatcaaaaattgttcagggctcttagagatggtgaaaactacaaaaaaaaccatggctttcatatggacagataaaatgaaagaaagggaaaaggcagtggtgtgtaggcaaatatggtttggcatttgtcttttaatgacacctgatatgatgtcattttgattttgaaattgaacactagaactgttaatcacctttaaaaagaagagcttattgggaattatatattccttaaaatatacatgggggcctgaatgtcagccatctttatactatagaaaaaggattatggatgcatgaatggtcatgctttggagatcaaatattggttgaatgcctatgtatgtcaggccctgtgctgagccatgaggattaaaaagatgaataaacatatcttgtttaggaaatggatgtataaaaaaatcaagtgcaataaagtccgtgtccaaaagctgacacaatggaa

SEQ ID NO: 155663 - DNA, 705 bp, Homo sapiens
ggccggtgcgcttcctggacaacttcagcagcgggcggcgcggtgcaacctcggccgaggccttcctagccgccggctacggggtcctgttcttgtatcgcgctcgctctgccttcccctatgcccaccgcttcccaccccagacttggctgtccgctctgcggccttcgggcccagccctttcgggcttgctgagcctggaggccgaggagaatgcacttccgggttttgctgaggctctgaggagctaccaggaggctgcggctgcaggcaccttcctggcagtagaagttcaccactttggcggactatttgcatctgttgcaggctgcggcccaggcactcaatccgctaggcccttctgcgatgttttacctggctgcggctgtgtcagatttctatgttcctgtctctgaaatgcctgaacacaagatccagtcatctgggggcccactgcagataacaatgaagatggtgccaaaactgctttctcctttggttaaagattgggctcccaaagcatttataatttcctttaagttggagactgaccccgccattgtaattaatcgagctcggaaggctttggaaatttatcagcatcaagtggtggtggctaatatccttgagtcacgacagtcctttgtgtttattgtaaccaaagactcggaaaccaagttattgctatcagaggaaaaaaaaaaa

SEQ ID NO: 155664 - DNA, 1138 bp, Homo sapiens
tagttttcaccatctctaagagccctgaacaatttttgatcctataagggctttttacttcagtttctgtcacctataaaagctgtgtgtcgagactgaagattatccactatcttctcttctatctctacgcctttttctatttcttcctctgatagcaatgttcccccatttctttcggtgctgcgcgctgggctgaggcccttgtgcgatgttttacctggctgcggctgtgtcagatttctatgttcctgtctctgaaatgcctgaacacaagatccagttcatctgggggcccactgcagataacaatgaagatggtgccaaaactgctttctcctttggttaaagattgggctcccaaagcatttataatttcctttaagttggagacttgaccccgcccattgtaattaatcgagctcggaaggctttggaaatttatcagcatcaagtggtggtggctaaatatccttggagtcaaggacagtcctttgtgtttattgtaacccaaggactcggaacccaagttattgctatcagaggaagaaatagaaaaaggcgtagagatagaagagaagatagtggataatcttcagtctcgacacacagcttttataggtgacagaaactgaagtaaaaagcccttataggatcaaaaattgttccagggctcttagagatggtgaaaactacaaaaaaaaccatggctttcatatggacagataaaatgaaaagaaagggaaaaggcagtggtgtgtaggcaaataatggtttggcatttgtcttttaatgacacccctgatgtgaagtcattttgattttagaaattgaacacttagaactgttaatcacctttaaaaagaagagcttattgggaattatatattcccttaaaatatacatgggggccctgaatgtcagccatcctttatactatagaaaaaggattatggatgcatgaatggtcatgctttggagatcaaatattggttgaatgcctatgtatgtcaggccctgtgctgagccatggaggattaaaaagatgaataaacatatcttgtttaggaaatggatgtataaaaaaatcaagtgcaataaagtgtgtgtccaaaagctgacacaatggaaaggaaaa

SEQ ID NO: 155665 - DNA, 444 bp, Homo sapiens
  misc_feature (1)...(444): n = a,t,c or g
gggcggnnnnnnnnncctcgtagtcattagcccatgcggtggaattcccgggaccgccgccgccgccgccaccatgagtgatcagcagctggactgtgccttggacctaatgaggcgcctgcctccccagcaaatcgagaaaaacctcagcgacctgatcgacctggtccccagtctatgtgaggatctcctgtcttctgttgaccagccactgaaaattgccagagacaaggtggtgggaaaggattaccttttgtgtgactacaacagagatggggactcctataggtcaccatggagtaacaagtatgaccctcccttggaggatggggccatgccgtcagctcggctgagaaagctggaggtggaagccaacaatgcctttgaccagtatcgagacctatggagaaggatgaaactgtgagtgactgctccccacacata

SEQ ID NO: 155666 - DNA, 517 bp, Homo sapiens
agtgatcggcagctggactgtgcctggacctaatgagaccctgcctccccagcaaatcgggaaaaacctcagcaacctcatcgacctggtccccagtctatgtgaggatctcctgtcttctgttgaccagccactgaaaattgccagagacaaggtggtggcaaaggattaccttttgtgtgactacaacagagatggggactcctataggtcaccatggagtaacaagtatgaccctcccttggaggatggggccatgccgtcagctcggctgagaaagctgcaggtggaagcctgcttctgccacacctcgctctcagttctctccacatttccatagagaccgtgtggtttttgttcacccgggccccccgtcttcctccctgtccccccatttataggcataaaatccactgtctgccagcctcccttccctcccacctttttggtacattggtgtaaaaaatgtaaaacaaaaaaattttatgaactaactgtggtgtgtgaaagagagaag

SEQ ID NO: 155667 - DNA, 2490 bp, Homo sapiens
ggaaaataaaatcagaagtacgctgaacgagatctactttggaaaaacaaaggatatcgtcaatgggctgaggtctgtgcagacttttgcagacaaatcaaaacaagaagctctgaagaatgacctggtggaggctttgaagagaaagcagcaatgctaaacctctgtttcatgctaaccagacacgccgtgcactcgttagattcctttcttagaaaactcgttttctgctcccttccctcgtcccttccctccccgacaggtcacataacagctgcatcattgaccgcacagcgccatctctccctgagaataaagccgatagccaccaagaactacaacaccaacatcaccacagagaccagcaagattctgctgcagaagaacatgcaaatagccaaccacaccctgaagtacggcacccaggccaggaagtttgatgtgaaccagttgcagaacaccactatcaagcggatcataaagaaggttcaggacctagaacgggcagcgctgcctgcccaggagctggaggagtacaacaagatcctgttggatatggaaaccacctacagcgtggccactgtgtgccacccgaatggcagctgcctgcagctcgagccagatctgacgaatgtgatggccacatcccggaaatatgaagacctgttatgggcatgggagggctggcgagacaaggcggggagagccatcctccagttttacccgaaatacgtggaactcatcaaccaggctgcccggctcaatggctatgtagatgcaggggactcgtggaggtctatgtacgagacaccatccctggagcaagacctggagcggctcttccaggagctgcagccactctacctcaacctgcatgcctacgtgcgccgggccctgcaccgtcactacggggcccagcacatcaacctggaggggcccattcctgctcacctgctggggaacatgtgggcgcagacctggtccaacatctatgacttggtggtgcccttcccttcagccccctcgatggacaccacagaggctatgctaaagcagggctggacgcccaggaggatgtttaaggaggctgatgatttcttcacctccctggggctgctgcccgtgcctcctgagttctggaacaagtcgatgctggagaagccaaccgacgggcgggaggtggtctgccacgcctcggcctgggacttctacaacggcaaggacttccggatcaagcagtgcaccaccgtgaacttggaggacctggtggtggcccaccacgaaatgggccacatccagtatttcatgcagtacaaagacttacctgtggccttgagggagggtgccaaccccggcttccatgaggccattggggacgtgctagccctctcagtgtctacgcccaagcacctgcacagtctcaacctgctgagcagtgagggtggcagcgacgagcatgacatcaactttctgatgaagatggcccttgacaagatcgcctttatccccttcagctacctcgtcgatcagtggcgctggagggtatttgatggaagcatcaccaaggagaactataaccaggagtggtggagcctcaggctgaagtaccagggcctctgccccccagtgcccaggactcaaggtgactttgacccaggggccaagttccacattccttctagcgtgccttacatcaggtacttcgtcagcttcatcatccagttccagttccacgaggcactgtgccaggcagctggccacacgggccccctgcacaagtgtgacatctaccagtccaaggaggccgggcagcgcctggcgaccgccatgaagctgggcttcagtaggccgtggccggaagccatgcagctgatcacgggccagcccaacatgagcgcctcggccatgttgagctacttcaagccgctgctggactggctccgcacggagaacgagctgcatggggagaagctgggctggccgcagtacaactggacgccgaactccgctcgctcagaagggcccctcccagacagcggccgcgtcagcttcctgggcctggacctggatgcgcagcaggcccgcgtgggccagtggctgctgctcttcctgggcatcgccctgctggtagccaccctgggcctcagccagcggctcttcagcatccgccaccgcagcctccaccggcactcccacgggccccagttcggctccgaggtggagctgagacactcctgaggtgacccggctgggtcggccctgcccaagggcctcccaccagagactgggatgggaacactggtgggcagctgaggacacaccccacaccccagcccaccctgctcctcctgccctgtccctgtccccctcccctcccagtcctccagaccaccagccgccccagccccttctcccagcacacggctgcctgacactgagccccacctctccaagtctctctgtgaatacaattaaaggtcctgccctccc

SEQ ID NO: 155668 - DNA, 702 bp, Homo sapiens
  misc_feature (1)...(702): n = a,t,c or g
cgagccactgacgccgggaccgggaccgccgcngcngccgccaccatgagtgatcagcagctggactgtgccttggacctaatgaggcgcctgcctccccagcaaatcgagaaaaacctcagcgacctgatcgacctggtccccagtctatgtgaggatctcctgtcttctgttgaccagccactgaaaattgccagagacaaggtggtgggaaaggattaccttttgtgtgactacaacagagatggggactcctataggtcaccaatggaagtaacaaagtatgacccctcccttggaagaatggggggcaatgccgtcaagcttcgggctgagaaaagcttggaggttgggaaagccaacaaatggccttttgaccagtatccgaagaccttgttgcttctggaattgttggatcctggatgaatccgcaatcaggactatgtttgggcttgagctccagcctcatgaaccacccaaccccatcgaatgactgagagctgccaaggctcctgccacgttggagctcagaatcctccccgtgggggacactgttgctgcagccagcccttccaagggagccgcttgttttatggcctaaaaagtctctttatgctgagaaggtcacactggactttgctcacacagagatttgacccaagaaaaggaataaagaggccttggatacccaaaaaaaaaaaa

SEQ ID NO: 155669 - DNA, 1742 bp, Homo sapiens
cccacgcgtccggtaagcgccgggccctgctgcgggggggagagccactgacgccgggaccgggaccgccgccgccgccaccaccatgagtgatcaacacttggactgtgccttggacctaaagaggcgcctgcgtccccagcaaatagagaaaaacctcagcgacctgattgacctggtccccagtctatgtgaggatctcctgtcttctgttgaccagccactgaaaattgccagagacaaggtggtgggacaggattaccttttgtgtgactacaacatagatggggactcctataggtcaccatggagcaacaaggatgaccctcccttggaggatggggccatgccgtcagcttcggctgaggaaagctggaggtggaagccaacaatgcctttgacccagtatcgagacctgtatttttaaaaggtgggcgtctcatctgtcttacctctgggatctggatccatggctttggcttgagtggatcctccataaaagaaagggctgggaggatgggatcaaaagaagatcaaaaggctgctggggattccatcccacgtggtagaagtgcaggagaaatccagcggtcgcaccccccattacaagttgacctccacggtgatgctgtggctgcagaccaacaaatctgggttcttgcaccatgaacctcggaggcagccttaccagacagatggagaaggatgaaactgtgagtgactgctccccacaaattagcccaccatcgggcgcctggtagaggacatggaaaataaaatcagaagtacgctgaacgagatctactttgggaaaaacaaaggatatcgttcaatggggttgaggtctgtggcagactttttgcagacaattcaaaacaagaagctcttgaagaattgaccttggtgggaggctttgaaagagaaagcaagcaatgctaaaacctctgtttcatgctaaccagacaccgccgtgcactccgttagattccttttcttagaaaactcggttttctgctcccttccctcgtcccttccctcccccgacagggtcacataacagctgcaatcattgaccgcacagcgccatctctccctgagaataaagccgatagccaccccttctccggctccgagcctgcttctgccacacctcgctctcatgttctctccacatttccatagagaccgtgtggtttttgttcacccgggccccccgtcttcctccctgtcccccccaattaaaggccataaaacccactgtctgcccagcctcccttccctccccacctttttgggtacattgggtgtaaaaaaatgtaaaacaaaaaaattttatggaattaactgtgggtgtgtggaaaggaggaggaaggaaaaggctggacctcttattccgtgtgtgtttgggagttgcttggggttgggggtcgtggggacaggggacagctctgggaaccaaaggtggccctcgggtcccgtcctgcgcagactctcccgtcccacggaggcagcggggatgggggctgggggggggtgccgccgaccgttccgctcttccggccaggtgcttttctgtcaatttctatggaatgccaaaaggaggtttttgttttattttgtttttttgtaaagcttaagaaaaaaatctacatcttatacttgagcctccatacttaaaaaaagaaaagaaaagaaatcaataaaaagaaactggggcgcagttaaaaaaaaaaaaaaaaaaa

SEQ ID NO: 155670 - DNA, 1914 bp, Homo sapiens
atgactctagaggatcccccgggtttctgcgagcggctgctgagccgggtggccgccctgttccccgcgctgcggtctggcggcttccaggcgcactaccgcgcccattccagcagcttatgtccagctgagaacccctgggtgctcacgtgctgtcttttaaacaatctagatgaggacggggacttggttgccttttccagtgacgaggaattgacaatggccatgtcctacgtgaaggatgacatcttccgaatctacattaacgacagccctgcagtggagaacatctcatccttctgctttgtgtcgctgaaatcagcaggcagggcagatgctctaaaggaaagacagtcggggagcacgcatgcacacgtgcagttaaggctgcaggggtctagggggaacagtggccactcacaaagaccaagtaactacaaagttctagcaggttcccagcgtgactttaatggcacagacatcactgcagcagcagcagctccctcgggtttatacctggataatgtggtcaacaagcagagtgtctctcctcctatcccgcacctccgtgccttgctgagcagcagcgatgacccccctgcagaggtggacatctttgagctcctgaaagtgtcctatgagaaattcagcagcctgagggccgaagacattgagcagatgcggtttaaacagaggctgaaagtgatccagtccttggaggacacggccaagaggagtgtggatcgcttctcagaattgcaactgtccaggcagacacagcacgaacattttaaggagcttgataacttctacaaaatttcttcccacgaacaatcatacggcagccagcctcccatcctgcagccagcgctgggtgccgctcagcactgtgcatctcacagtgtgacatgccagagcacatcattcttacaattaaaaaaagggaaaaccaagctctatgctgaaaagcaactaaatagtacatggagcagacagacttcaggggcaaacctaagggttctacatgaagcacgagaagcacagtcgtccggcccagctccctccatcagccgcatggatgcccggcaagcccttgtcctcttgccttcctccagggaatcatcgcagaagagaacaagaacctgcagccccaggggagacgaggaccccgggaagttcaaggaggctgagctgaagatgcggaagcagtttgggatgcctgagggcgagaagctggtgaattactactcctgcagctactggaagggccgcgtgccccggcagggctggctgtacctgacggtcaaccacctgtgcttctactccttcctgctggggaaggaagaaaaaaaaagacatctgagcatctgcaagattattcctgtctgtgccaagtggggcgtccagttcagttccgagatgctgcaccagcacaggtgggtcttgagacagtgtgaccccaagcacctgggcagcctcccagacaaatcccaggccccaccaacactcactcaccaggatcaaaaaaggcctggcctttctctgctgggccctgggtgctgtgctggaacgctgcccctgcagcagctcacaggcctgcctggctgcaggttcttcttccgcagtgggaacatcgagcacccggaggacaagctcttcaacacgtctgtggaggtgctgcccttcgacaaccctcagtcagacaaggaggccctgcaggagggccgcaccgccaccctccggtaccctcggagccccgacggctacctccagatcggctccttctacaagggagtggcagagggagaggtggacccagccttcggccctctggaagcactgcgcctctcgatccagacggactcccctgtctgggtgattctgagcgagatcttcctgaaaaaggccgactaa

SEQ ID NO: 155671 - DNA, 1138 bp, Homo sapiens
gggagagtgtggcagctgcccttagccctctgggccattgaagttgatatcgatgtggagcacggagggaaaagaagccgccctgacccccgtttcttccagaggtttccggccacgggggagaagagcagctcacagccaagcagctgctgcctctgatcccagcaagccgggtgggaatgttgagggcgccacgcagtctctggcggagcagatgaggaagatcgccttggagtccgaggggcgccctgaggcaagcctgtgcccctttccgccacctgggaccacgggccagcctagtgatctgtggcctgcacctccgcctcattctcagcacctctgcagccccacttacaaacccgagggagctggctgctggcttgcagtggatgtctgttgccatttaaagtcacgctgggaacctgctagaactttgtagttacttggtctttgtgagtggccactgttccccctagacccctgcagccttaactgcacgtgtgcatgcgtgctccccgactgtctgccaggagccagggccatggtcaggcttggcctgttgcgcgtgtctcctgtgtgctcatggtgagttttgttccaggaacagatggagtcggataactgttcaggaggagatgatgactggacccatctgtcttcaaaagaagtggacccgtctacaggtgaactccagtccctacagatgccagaatccgaagggccaagctctttggacccctcccaggagggacccacagggctgaaggaagctgccttgtacccacatctcccgccaggcaagtgaaccaagaggttttgtacatattcctacctttccctttagagcatcctgccctcctctgatttcagcgacacaaacagaaggatgagatgttctccactgcagggctgtctgtaggtgtgggaggttaggagttggttttgtcctattatgtgtaccctgagcaatagcgagtaagctctgctaatgcagttctgaaaatgtttttctttaggcaaactccagagccaggaatattagttgtaggagtttataaaacttaacatgcagtccaggaattaaggcaggatgtattcgtccgctgggaggatccacgcaacgtcgcggcatgctatc

SEQ ID NO: 155672 - DNA, 2116 bp, Homo sapiens
gcgcggcggctgcgaccgggacggcccattttccgccagctcgccgctcgctatggcgtcgctcaccgtgaaggcctaccttctgggcaaggaggacgcggcgcgcgagattcgccgcttcagcttctgctgcagccccgagcctgaggcggaagccgaggctgcggcgggtccgggaccctgcgagcggctgctgagccgggtggccgccctgttccccgcgctgcggcctggcggcttccaggcgcactaccgcgatgaggacggggacttggttgccttttccagtgacgaggaattgacaatggccatgtcctacgtgaaggatgacatcttccgaatctacattaaagagaaaaaagagtgccggcgggaccaccgcccaccgtgtgctcaggaggcgccccgcaacatggtgcaccccaatgtgatctgcgatggctgcaatgggcctgtggtaggaacccgctacaagtgcagcgtctgcccagactacgacttgtgtagcgtctgcgagggaaagggcttgcaccgggggcacaccaagctcgcattccccagccccttcgggcacctgtctgagggcttctcgcacagccgctggctccggaaggtgaaacacggacacttcgggtggccaggatgggaaatgggtccaccaggaaactggagcccacgtcctcctcgtgcaggggaggcccgccctggccccacggcagaatcagcttctggtccatcggaggatccgagtgtgaatttcctgaagaacgttggggagagtgtggcagcttgcccttagccctctgggcattgaagttgatatcgatgtggagcacggagggaaaagaagccgcctgacccccgtctctccagagagttccagcacagaggagaagagccagctcacagccaagcagctgctgctctgaccccagcaagccgggtgggaatgtagagggcgccacgcagtctctgggcggagcagtatgaggaagatcgccttggagttccgaagggcgccctgaggaacagatggaagtcggataactgtttcagggaggagatgatgactgggacccatctgtcttcaaaagaaagttgaccccgtctacaggtgaactccagtcccctacagaatgccagaatccgaagggccaaagctctctgggacccctcccagggagggaacccacagggcttgaaaggaagctgcctttgtacccacatcttcccgccagaggttgaacccgcggcttgatttgagtcccttttcccagattgcttgttccatggggctttcttcttgattgaagggcggcttgggttcaaccagggttcctggcagaccaaagaactattgacattcggagcggctctgggacaccatccaagtattcaaaagcatcccccggccgttgttgaccactttttgcccaccttcttcttgcgtgcccctcttcttgtcttcatagttgtgtttaagctttgcgtagaattggcaggtctcctgtaacggggccagttttctctggccttctttccagggttcaggggttaggggttgcaagaagccattttaggggcaggcaaaacaagtggacatgaaggggaggggtccttgttgttgttgtgtgtggttgatgtttcctgggtgccctggctccttgcagcagggctgggcctgcgagacccaaggctcactgcagcgcgctcctgacccctccctgcaggggctacgttagcagcccagcacatagcttgcctaatggctttcactttctcttttgttttaaatgactcataggtccctgacatttagttgattattttctgctacagacctggtacactctgattttagataaagtaagcctaggtgttgtcagcaggcaggctggggaggccagtgttgtgggcttcctgctgggactgagaaggctcacgaagggcatccgcaatgttggtttcactgagagctgcctcctggtctcttcaccactgtagttctctcatttccaaaccatcagctgcttttaaaataagatctctttgtagccatcctgttaaatttgtaaacaatctaattaaatggcatcagcactttaaccaaaaaaaa

SEQ ID NO: 155673 - DNA, 729 bp, Homo sapiens
ttagcatccctgagtcccggtgacattggcaggtcctgccaagagtgaaaaagcggctttcacccctgaagactcataattgtgcattaccatcgacaaagctgtctgctgtgagggattacttattttattctgagaatttgaatttcccacaactgaacaaggactcttaacgtggatgttagcaggctttgaaattccaactgctgttgtgtttgttctgagtttatcacactccttttcttttgcagtatctgaaggttgctttttccacagggaaagacaggttgctagcacttccatggaacagctactgtcacttttagcaggcattccttttgttgaggattcttgtccactgcaaaaggagttgtccaaaaccctgccacttacattagaagtacttggagtttccatgtttttcaaattcagttggttaccagtcatttgggtatttggattcatttcacagctgtctggtttagaatcctgaatagtttgattagcatcttttaatactgtcttctgagtcttacgtgcctgtgaaagcaaagcgagaagtagcatattttcattttgaatttttgatttatattcctcagtggacatggacttgggaacagaaattgtttcgcaaactgctggtgaattttgctcagctctcatcagaaaatgttaccaaagttgagtattcaatactgcgtgggtcatctcaacagctgatgtctt

SEQ ID NO: 155674 - DNA, 5355 bp, Homo sapiens
atgaggaatcctgtgcattctcatataggggcaactgtatctcatcaaactgattttggagctaacgtacccaatatgccggcactacagagtcaactgataacatcagatacctattctatgcaaatgcagatgatcccttctaattctacacgacttcctgtagcttaccaaggaaatcagggacttaaccagtctttttcagagcaacaggttgattggacacaacagtgtatatctaagggactgacttacccagattacagaccacctccaaagctataccgttactcaccacaaagctttttaccagattctaccattcaaaaacaaaactttataccacatacatcattgcaagttaaaaatagtcagcttctaaattctgtattaactttaccatcaaggcagacctcagctgtaccatcacagcagtatgccacgcaaactgacaaaagacctcctcctcctccttacaactgtagatatggaagccagcctttgcaaagtactcagcatattactaaacacttgtctatggaagttcctcagagtcgagaaatgctgtcatctgaaataaggaccagctttcaacagcagtggcaaaaccctaatgaaaatgtcagcacaattggaaatttcactaacttgaaagtaaataccaacagcaaacagccttttaacagtcccattagatcttctgtggatggtgttcagactcttgctcaaactaatgaagagaaaataatggattcttgcaatccaacttcaaatcaagtactggacacaagtgttgcaaaagaaaagctagtaagggatattaaaacattagtagagataaaacagaagttttcagaacttgcaaggaaaattaaaatcaataaagatcttttgatggcagcaggttgtattaaaatgactaatacttcttatagtgaaccagctcagaattctaaattgtctctaaaacaaactgccaaaatccagtctggaccccagataactccagtaatgccagagaatgcagagagacaaacaccaacagtagtggaatctgcagaaacaaataagactcaatgtatgttgaattctgacattcaggaagtcaattgcagaaggtttaaccaagttgattctgttttaccaaatcctgtctattctgaaaagcggccaatgccagactcatctcatgatgtgaaagttctcacttcaaagacatcagctgttgagatgacccaggcagtattgaatactcagctttcatcagaaaatgttaccaaagttgagcaaaattcaccagcagtttgtgaaacaatttctgttcccaagtccatgtccactgaggaatataaatcaaaaattcaaaatgaaaatatgctacttctcgctttgctttcacaggcacgtaagactcagaagacagtattaaaagatgctaatcaaactattcaggattctaaaccagacagttgtgaaatgaatccaaatacccaaatgactggtaaccaactgaatttgaagaaacatggaactccaagtacttctaatcaaccttcagatactgcaaaagaaaaggagtgtgataaactcagaacaaacacaacagcagttggaatttcaaagcctgctaacatccacgttaagagtccttgttcagttgtgggaaattcaaattctcagaataaaataagtaatccctcacagcagacagctttgtcgatggtaatgcacaattatgagtcttcaggtataaatataacaaagggaacagaacttcagatagctgtagtgtcaccgttagttctgtcagaggtcaaaacattgtctgtcaaaggaataacacctgcagtgttacctgaaacagtgtatcccgttattaaagagggcagtgtttgtggttttacaaaatcaattggcagaaaatgcaaaggcaactgctgctttgaaagttgttgttagtggatcagtagcaagtacagcaacatcaaccaagatttttccactaactcagaaggaaaagcagaatgagtcaactaatggtaattcagaagtcacacctaatgtcaatcaaggaaagcataacaaattagagtcagctatccattctcctatgaacgatcagcaaatctcacaggagtcaaggaatagtactgttgtgagtagtgatacattacagattgacaatatttgttctctggttgaaggtgatacctcttacaattcccaaatagcaaagatattcagctctcttcccttgaaaatggttgagccacagaaaccttctctacccaatcagcaagggattggctgcagagaaccagaaaaacaattagataataccactgaaaataaagactttggttttcaaaaagataaacctgtacagtgcacagatgtttcacataaaatatgtgatcagtcaaagtcagagccacccttagagtcatcttttaacaatcttgaaacaaacagagttattctagagaaaagtagtttggagcatgccacctgaaaaaagcacagctaacgatacgtgctcgtcagctggctattcaggaggatatttaccctcaggaaatagatgcatccagcaactatactccccaagatcctgcaagaaatgaaatccacagtgataaggcacctgtcttatacctacatgaccagctgtcagaacttctaaaagagtttccttatggcattgaggctgtgaatacacgtgaaggttctgtgggccagcaaactacataccagacctcagaagatcaaactgctgataaaaccagttctgactccaaagacccagcagatcaaatacaaattacaatattaagctcagagcaaatgaaagaaatatttcctgaacaggatgatcaaccctatgtagtagacaagttggcagaacctcagaaagaagagcccatcacagaagtagttagccagtgtgacctgcaggcacctgcagctggacaaagtcgtgattctgtgatactggactctgagaaagatgatataccactgctgtgcattgggctggctctccatggtttacgaaggagtaccccagtgtcagtgtaattccatcaagaactcatcttcagaggaagagaaacaaaaagagcagtgttctcctttggataccaacagttgtaaacaaggagagagaacttctgatagagatgtcactgttgttcaatttaagagccttgtaaataatccaaagactcctccagatgggaaaagtcattttcctgaactacaagacgacagtagaaaagatacacccaaaacaaaacataaaagcttaccaaggacagaacaagaattagttgctggtcagttttcatctaaatgtgataaactaaatcccttgcaaaatcacaaaagaaaaaaattgaggtttcacgagggtaacctttcactccagtaataaaatgacagcatcttatgaacaagcttctcaggaaacccgacagaagaaacatgtaacacagaactcacgtccactaaaaacaaaaacagctttttttgccaaataaagatgtgtataagaagcatagttctttgggacagtcattatcaccagaaaagataaaattgaaactcaaatcagttagcttcaaacaaaaacgaaagttagaccaagggaaccgtattagatatggaagtaaagaaaaagaaacatgataaacaagaacagaaaggaagtgtgggagctacattcaaattaagtgactctttgtcaaacccaaacgaaagagccattgttaaagaaaagatggtatcaaatactaagtctgtagacacgaaagcgagttcatctaaatttagtagaattctaactcctaaggagtatttacaaaggcagaagcataaagaagctctgagtaataaagcatcgaagaaaatctgtgtgaaaaacgtgccatgtgattctgaacatatgagaccaagtaaacttgccgtgcaggttgaaagttgtgggaaatcaaatgagaaacacagcagcggcgtgcagacctctaaagaatcattaaatggcttgacaagccatggtaaaaacctcaaaatccaccattctcaggagtcagaaacatacaacattctaaggaatgttaaagaaaaagttggtgggaagcagcctgataaaatatggattgataagactaaattagacaaattaaccaatataagcaacgaagctcaattcagccaaatgcctccccaagtaaaggatcaaaagaaattatatctgaatagagttgggtttaaatgcactgaacgtgaaagcatttctctcaccaaattagaaagttcacccaggaagcttcataaagataagagacaggaaaataaacataagacctttttaccggtgaaaggtaacacagaaaaatcaaacatgctggagtttaaattatgtccagatatcttactaaagaatacaaactctgtggaagaacggaaggatgtaaagcctcatcctaggaaggagcaagcccctctgcaagtttcaggaataaaaagtacaaaagaagactggttaaaatttgttgctacaaagaaaaggacacagaaagacagccaagagagagataatgttaattcaagactctcgaagagaagcttcagtgcagatggatttgagatgctacaaaacccagtaaaagattcaaaagaaatgtttcaaacctacaaacagatgtacctgggagaagaggaagcagaagccttgggtaggcagtcctgtaaaataattacaagatgtggttttgtaattgccactgggaaatttctttccttttctgttcaaaatatttcgctgaaactaatgagaaatgccatgataaagatttctcagagttgggttccccactttcattgtatttccattgaaagtgcttaattaaaatggcttgagaacttttgggtagccatgtgtaagaaatgggatggtattcaccggggaaacaaggtatttgaatttctactttattgaaccaggatttaccattattttaaaaggaatgcttatacaaatcaatttgaaattctacccattcttgagggaggaccgttcctcagttaaggacttgtttattttaaatgggacctgtaaatatgttttggtttctaagctatattagcaaaatttatttttcaaaaatgccccctgtgatgtgaatgtcaaaatatattcttaagtgttttataactaattgtcacctttttttcagaagtcttattttatccttgtgattgtgagcgcccttttgggccttcgtattaacacactacttttcatacttgaaataaacatttattttttaaaaaaactaaaaaaaaaaaaaaaaa

SEQ ID NO: 155675 - DNA, 765 bp, Homo sapiens
cgtcgacttttttttctttttttttttcaggtaacaatgagacatatgcagctttatttaataatctgttaaaaagtcaatactctggcagagtgatgcaattccttaatctcagcagaaagcaaacagtctgtctgaaaaagccccttccccaagatttggaactgtgtaaccctgagcttacatctcaatgctcccaagagctgggctcttgctatgtggaaagttggtccccaacaatttttctcaaccctccaggcaaatactcctctgtctgggctgtgactcccctcacctaacagtaggacatgagggctggaaaacaactttaccgggggcaggggctaccccttacaggattgggcccttttctctcctacaaaggggagtttcatagggggttaacaatctttctaatgggctggggagcaatggactcatggcctgttaatcccaggcactttggggagggtgagggcaggtgggatcacccgagggtcagggagttttgagaccagcctggccaacatggtgaaactccatctctactaaaaatacataacttagctgggtatggtggcaggtgcctgtagtctcagctactcgggaggctgaggcaggagaatcgcttgaacccagggggcagaggttgcagtgagccaagtttgcgccattgcactccagcctgggtaacagcgagactctgtctcaaaaaaaaaaaaagactctgagaaatgggttctgtatcaatttaatttggcttcc

SEQ ID NO: 155676 - DNA, 1080 bp, Homo sapiens
tttttttttttttttttttaatggaattatagtaacatttcattttacataaaacaatttcccagagaatacatttaaaaaccatctagatactgattttttagcattacaaaaaattgagaggcacaattgaagtattcaaataaattgtgaggggtggaggtggggactatgctcactatctatgttgttccttagtcacttaaaggctctgcgtgcaagagtctttacatgaggcagtagtgcactttcatttagtagggaataaatccacataaaatatatactttttatacaggaaagtgttattggtgttggcattttcaattacttataaaaacttcatttggaattggcacaaaaggttctctttaaaattggataactccccagaagaccagggccttagaactgtcctaaataattccattaccaataattaggggttcccatttatccatagattaaaaaaactatgaagaattacgttattcaagtgggacattttaaaatttttttcataggaaaataggttctacatgtttcgcccctagtcagctaaatttcccaccccccaactttaaaacagatcacaggatgtccaaagttttaaatcagagtacctatatcacagtacagtgtggatatgtttccattaattcattttatgtctcattctattatagtatcaaattagcaaaaaggcacctgggtacattcttcagaacagttttggtcatttaaaaaaaatcacacatttataagcagtgatttcaatcatgtttaaaaacaaaaatattaaacaaattcatttcgtaatccagatgatacagaatccaagaaatttctgtaggcgcttcactttccatagaacttcttgttcagcaggtatatgagaaggtttacattcactttaaccttatcaaacattttcattacagctactccttcatattgcatctgaagtaaatccttggtgttgagatggaaaaggtgcaactcaatattcaggatttacttcagatgcaatatgaagtaaatcctgaatgttgagatggaaaaggtgcaactcaatattca

SEQ ID NO: 155677 - DNA, 389 bp, Homo sapiens
  misc_feature (1)...(389): n = a,t,c or g
cggacgcgtgggctccaatttgagtactaattaagtggtattcacatctgcaacataaaaaccaaaataatggcatcctcgtggaaggaattttgtcagaaaagtgctgtgtactttgctgtcttcctaggannnnnnnnnnnnnnnnnnnnnnnnnnnnnnnaatggttccacaggctgcataggaatacaagctaaccaatattttaattacagatcattaagcagctttgagtctggaaaatttgtcaaatgtaccgagcaattagaattggtaccaggagaaaatattcattcaacttcttgaaggatcaaagaaaaaattaaccttgaaaaacctgtttcgtaacatgtgaagtccagatccaagggaaccttacaaatccatt

SEQ ID NO: 155678 - DNA, 691 bp, Homo sapiens
aaagtacaatctttttttattttttatttatttatttatttttgagatggagtttagctctttcgcccaggctggagtgcagtggtgctatctcggctcaccgcaacctccgcctctcaggttcaagcaattctcctgcctcagcctcccaagtagctgggattacaggtgcccaccactacacctggctaatttttgtattttttagtagagacggggtttcaccatgttggccaggctggtctcaatctcttgacctcaggtgatccgcccgccttggcctcctaaagtgctgggattacagatgtgagccactgcgcctggccaataaagtaaaattttaagagaaaaacatggaatggaagaatatttgtacattaagtaactgacagcttactatataaaatgccatcaacatgttcgggcagtgggggctcaatggggataaataggcagtgtacacatgagtaactcaaggccatcatcacaaggaaacatgtagagtccctcttgaaaactaaagaattacaaattccaacttcaagggacagtaagacaatatctaactctaaacaaaatccaatggtagtagggaacctgcagcacttagactccccacatgacgccgtaattggatcagtctttccagagagtagtgcaataccaagaaatatgctatacatcattcttg

SEQ ID NO: 155679 - DNA, 367 bp, Homo sapiens
tgacaagtggtgcccgaccaggacctgaacgaggaaggtctgccagagcagagaaagtgaaactgatcagacgaactacgaacccctggacgggagagtctgccggcggagaatataagtctataggatcgggtgaaccaccaaccggcaattgaaagctgcacagcctgaaattacctttattcaattaatgcaaaaacaaaaggggagatgttggaggccgaaggaatgagggtcgtgaccaactcagtataccactggaggctctgtgagaaacagcaaactgttctcatgaaagcaggatgttggcgaactgacaaactctgtctgccgccagaaggaatgctgtgggcagtcatgtccaggt

SEQ ID NO: 155680 - DNA, 1621 bp, Homo sapiens
tcagtccataacgggtgaatggacagtggcatcagtgtggggatccttagaccccttttcagggagattctggtaatactcggtgaggtgtgacatctggatgcaggacttgccacactcattccacttgtagggcttctccccattgtgagtcctctgatggagggcgagggatgaggtttgcatgaaggctcttccacagtcaccacacatgaagggcttctctcccatgcggacttgctcatgctgggtgagaaacttgctgtggctgaaagtcttcccacattttccacatgcataaggatgctcgccacgtatgtacggcttctcaccgctgtggatcttgaggtgctgggtcaggtaggacccctggctgaaggcctttccacattctgtgtgtacctgctggtgcttgctgagggatgagctgtggctgaaagctttcccacattcctgacacgcatacagcttctctcccgtgtggcagcgtatgtgctcagccagggacaagctggggctgaatgccttgcagcatacccggcactcgtagggcctctcacccgtgtaggttccgtggcatgcaaggagggccgagaagtcagcaaaggctttgctgctcttggcaggcaaatggcttttccccggtgtggaatcaccagtgctgtacaaggtgtgtgctctcgcacacacgtatggcttctcacctgtgtgcacacgctggtgcttggcaagggatgagctctctcggaagcacttgccacagtggccacacatgtagggcttctcgcctgtgtggacgtgccagtgcttgactagagatgaattgttgctgaaggtacacccacattcctggcatgcatacagcttctcactggtgtgctgaacaaggtgacttctctgtccaaaggccttgccacactcttcgcacgtacagggtctccttttgttgggaatctgctgatagctcacaaggcacgtgttcttgccaaaggtatcttcccacccactacatggcagtacaccctccccagcgtggactccttgtggctgattaaggtctgggaaacagctgcaggcctccccacatacaccctctccttggcaggagcacccccgataggtggcatcaacacatgcaggactgtcgcggttgcttctggaccgaacgaaggacgacgaatgcagaaatgagacagacaaaaggatcgcacaggacactacagctagcatggccaagaacatggagtcaggggtttttgcctgaccctggcgctccagtagtttctcagcttcttgtgtcgttttcttgatctgtccccatgttatggggttggatgtcattgtgactccggtcggcccttgttctgtctttgcattcagattccgctggctcatggctcgtactggaggtaacaggcccacggttgaataccatggatccctccggtctcccgttccatggtcacacacacctggagggcacccacacggtttgtccatctccccttctttcaaacagatccttttgtctttgtcttcatttctgccttcgttctccttcgtttggtccagaagcaaccgtgacaagtggtgcccgaccagggacctgaacgaggaaggt

SEQ ID NO: 155681 - DNA, 411 bp, Homo sapiens
aggatatatccgtgaccgggacactcagtaagtatcaaaaagtcggaggtcgtaatactaatcagtccccatgttatagggatggatgtcatagggactccggtcggcccttgttctgtcttagcattcagattccgtaggctcatggctcgaacagaaggtacaaggcccacggttaaataccatggatccctccggtctcccgttccatggtcacacacacctggagggcacccacacggtttgtccatctccttatattctccgccggcagactctcccgtccaggggttcgtagttcgtctgatcagtttcactttctctgctctggcagaccttcctcgttcaggtccctggtcggacaccacttgtcacggctgcttcactgtggcagcctcctcagagagccta

SEQ ID NO: 155682 - DNA, 530 bp, Homo sapiens
gaggacaatggcaggaggacagtacagaccaaaccccaagcagagaaaatagaaggatccactttaagaactttctgatgagctcgtttcaatctttctcctactcagtctcaattttccacagcaagagtacctgtctgcagaaaccatgggttatgtgtaataacctcctgcagaagcttaatgtttgagaactaacccgagcaccagattgtttaagtaaaactttaagcagctgcacataatgttgctcctcaacagacagattctgccccatgttaccctgattcagaaacctcccgctcccgataccttctcagggaactgaccttatattctccgccggcagactctcccgtccaggggttcgtagttcgtctgatcagtttcactttctctgctctggcagaccttcctcgttcaggtccctggtcgggcaccacttgtcacgaatgctacactgtggcagcctcctcagagagcctagccgcccgatagtccgcgcgcccgtgagcgacgaaatatccatt

SEQ ID NO: 155683 - DNA, 2326 bp, Homo sapiens
  misc_feature (1)...(2326): n = a,t,c or g
ttttttgaattttcacagcagtagcatttataatatcagagagttggaaacaaccccaatgtctatgaactaatgagtaaacaaactgtggtatatccatacaatgcagtattattcagccataaagaggaatgaaaaactgatacatgctacaacatggatgaactctgaaaacgttcagtggtaaaaagccagacacaagaaaccacatattgtatgactccatttatatgaaggttcccagaaaaggcaaatctagacatataacgtggattagtggttgccagaggctgggaggaagagcgaataggcagtgatgataaggggtatgagggatactcacacacctgaggtcacacctgcacattacaggtggcatcaacacatggcaggactgtcgcggttgctttctggaccgaacgaaggaccgacgaatgcagaaatgagacagacaaaaggatctgtttggaaggaaggggtcaggggggctccttgattctagggaacagggacctgagctttttacagccctttcatatttattaggtagagtgaatagggaggaaggggataactgtcggtcagctattttgatttaacacagggcccacatggattccttccttttggttcaaacaggttcctgggatggtccttgtgggataaccctcaaggagccacggggaccctggggacattgactgcccccaagcattccttctggcggcagacagagttttgtcagttcgccaacatcctgctttcaatgagaacaagtttgctgtttgcctcacagagccctcccagtggtatactggagttgggtcacgaccctcattcccttcggggctcccaaacatctccccttttggtttttggcattaattgaataaaagggtaatttcaggctgtgcagctttcaaatgccggttggtggttcaaccccgaatcctaatagacgcaacaggacactaacagctangcatggccaaagaaacatggaagtcaagggttttttgcctggaccctggcgcttcaagtagtttctcaagcttctttgtgtcgttttctttgatctgtccccaatgttatggggttggatgtcattgtgaactccggtcgggcccttgttcgtgtcgtttgcattcagatttccgctggcttcatggctcgtacttggaggtaacaggcccacggttgaataccatggatccctccggtctcccgttccatggtcacacacacctggagggcacccacacgggtttgtccatctccttatattctccgccggcagactctcccgtccaggggttcgtagttcgtctgatcagtttcactttctctgctctggcagaccttcctcgttcaggtccctggtcgggcaccacttgtcacggttgttctggaccaaacgaaggagaacgaaggcagaaatgaagacaaagacaaaggatacactgccgccggcacttccggtacgcacttccgcctggtgccagcggccgcccaggacctcacctcccagaaggcccttcgccttcctgctggaaacggccatgcacgggatacaaggccttctgggaaatggagttccagcgctgtaatactcggtgaggtgtgacatctggatgcaggacttgccacactcatccacttgtagggcttctccccattgtgagtcctctgatggagggcgaggatgaggtttgcatgaaggctcttccacagtcaccacacatgaagggctttctcccatgcggacttgctcatgctgggtgagaaacttgctgtggctgaagtcttcccacattttccacatgcataaggatgctcgcctgtgtgcaccgctggtgtaggaccagggctgaggagtcaccgaatggcttcctttactcccacgtatgtacggcttctcaccgctgtggatcttgaggtgctgggtcagtaggacccctggctgaaggcctttccacattctgtgtgcaacgctggtgcttggcaagggatgagctctctcggaagcacttgccacagggccacacatgtagggcttctcgcctgtgtggacgtgccagtgcgggacaccagggaaacagtcaccatgccacaggagctccacagggtcgctgagctccgattcgaaggtgtggggcacccggagcggtagcggacctgtagttgccggcgtgctggggccccacgaagacagctcgaggttcgccgcggccccgggggtgcggaccgtcttcacggcctcgtctcgccctcgcgcagcagctcgaaggtgacgtcggggatgggtcctcgcagcgcaggacggcat

SEQ ID NO: 155684 - DNA, 7278 bp, Homo sapiens
  misc_feature (1)...(7278): n = a,t,c or g
tgttggcacaagattacaacctacaatttcaatgcccttccctcctacacagctcaaatggaaggaaactgattaacacatagaaaggaacggcaggctcacaggtttaagcatttgtttttacaaaaaggagtgggatatgggggtggtcaagttttacgggtaataacaacattctctctagatggcagggggtaagtctgcctgtcctccattgctggtaccacataagggatacattagtaaagtaaggtaagggttatatgtgtggctggcctgttctttagagaggaaggtgggatggtatctgctgtgtacctgtctcagaccaaacctggggctggaccagtgcccctttcttctcagccctcctccacagcctgactgtactgccagccgcacccatgagaaggaagtgttgaaggaagcctgaagacatccacctcgagaaaaggaaacaggaaaactattccttccgccttctctggaccaaattcactccctcagctccagagagtgctgcaaaaatcttccttagggacgctgtgaagacacggggaagaggccagccctgagcgggcaagaagaaagcttgaactttccatgcagtaccaagcaaggctattttggaaacaagcaaacaaacaaaaaatggaaaccaacaccatataaccacaggttgggtagctcctaaatcctggacagcatttggattgggggtaagggcaattttactccagctccttgtyttataacccgcacaaggtgccrrgaggttaaggaccacaactgacctctctttccctacaagcaccattccttggattcccagttttgttgagctcatttgaggtcatccttgccatcctcttaaaaaatgacacagcctcttggttattccattttctatccctttctayaattatgaacrcactctctaaacaggagatctatatatgctctcatcctgcaacccaagagattaggygacctaatgatgagaaggctaacttatttgctttcctgggtggtcctgatggaaatgaacagcagcagagttctggtgggatagagcagtctagtctgagccactgtgtgattccccaggggactggtccctgggtacatgggtccctggctctctgtctcagttccacagatattactcaacttggccatttacgcctcagctaaaacatatgagcatgagggaaaagggacaagaaatacttttgtcctctagaaaaacttaactcaatacatcttggctactttgcctcaacccacggggttccctggaaacatttgttgaacttggccaagaggagattgtatatggatggcacacctggaaaaggggagaaagcacactagttcatctcttttataagtagaatggtcccagggatgttaacctttctgatgctgatagtagatgagtggagtggggtaatcgtgaaaacttaaaaacccttaagctgtttggagactacwcaccacagtggagcaaaccaaggtggggcctcactgccctcctcagagcccatccctgaccatgtcattggataggatggaagacaaagtctytgaaatggaggctgggctggcaaaagtaagtatgaagatgctactactggccttccacttcctctctctgatacacctaagaaggtgagagacactagcttcaattccattttacaacagttctcaacaacctgaaatattcttgacttccttaagcacatggaaaactggtaagctatatctttctaactgaaattttacttattctaaccaaccttttctttgattatcaaccagtttgacagtcttcagatcacaaaacaatagaacagacctgacatttacaaaactgtactacatacttatttcttttacagtagagctgaccaattacttttctaactactaatgcaacaccatgccactgggccctggactctgatgtttctgatccctgagcaacacatctatgtccattcacagatggaaatgaaagagtgagattctcagaggctaaacaacattctgggaagcaaattggatttttgaagggagagtcctccttagaaaattctggagccaaacatgctcccagtcacgagggaatggkktragccgggccaggtttcctgtctgtgrgctatagctcccttcctgaactccctcmtgtyctttgggaaggacacaagcytcttgctcattaagcaaaggccctccaagtctcctttttacttcagcactttggaaacyytccaagacttaacttccgatctggggaggttctacgtggagcagacctatcccttcttattcctgttcctgggtgtctccataatcagcctctaccttccctggcataagtcatatctgttatgctgcaggaacygagtaaccaaagctagatatcccttggaccactgattagtgacacattttctccacaacaaagggaggttaaagacaaaggtttaaccctgagaaactttttttttggcaagataataaagaggttaaagaggctacgtggatctgtcactgctttagcttaccattttcaattcagcaccaaagtgctcagaaagacaggctcagwtcaggacgacttcttaaagggatacacaggcaatattactggcaaaatgattttccaaagctgagccacgcgccccaccctacagggaggggagtagaatcttatggcccagcattggcattgaggcatcttgctttttttcctcagaattccacaaaggcttaagagtgatctaaatgcctggctggaagctcaagtctaggagagctattttactgcactgttgagatgttctctgcaaggtagtcacagataataagcaatttagtagataattattctatacaagaattaatgttctctgaaacagtgattaatagaatcttcacatctggcctggctgggaggcttgggggcaggaaagggagggtggaaggatgggtagcacatcaaaatggtgatgaactggcaaaacgacaatgctgctgtttttgtatcctttaaagcctatatcccagggttttaaacgacgccgggggtgtgcttcacatctggcctggctgggaagcttgggggcaggaaagggaaggtggaaggatgggtagcacatcaaaatggtgatgaacctggcaaaacgacaatgctgctgttttgtatccctttaaagcctataacagtttaatgacgcttttttkgtgtgcttcctgataggaagtcaaataagttttagtattaagaactggggatataamccaaaggaaacctagagtcaactgactgctggaggaacagaagcaatgrctttctttccacccttcttagatagtaatcttacttttgttggctaaaagcactttcttcagcattctgagttaacacgggttccctataagctcccctccccaggtggacagtcytattttctaagacaagctcaaagctcaaactcaccaaattaccactataaacaaagcttcagggaagagacataacctwacttcaaaagcttcaggtcagagacrgccaaaatcatgtgactgctagcytcarstcaagyagtgtgcccaaatcattcacaaaatgggattccctttccttttcttttttttttttttggagacggagtcttgtctgtcgctaggctgcagtgcagtggcgggatctcggctcactgcaacatccacctcctgggttcaagcgattttcctgcttcagcttcccgagtagctgggactacaggagcgtgccahtacacctggctaatttttgtatttttagtagagatggggtttcaccatattggtcaggctggtcttgaactcctgaccttgtgatccacccgcttcggcttcccaaagtgctgggattacaggcgtgagccaccatgaccagccctccatttattaatttataaggggactagaaggacaaactatttgattaatttgaaggtgagaggtatcattttctcagatgctccaactaggcttctcacatccctcaaaggttatcagctaaagacaagagtttctgaggctaatgcaaaaacatggtcaaatgtgaaacksccytttwrgaggcagggtttgtgaaaggctgctggcytccaaaggagagtatgcmtaaactctctggrctcccaggacctgtggtgacctcaagctaacctgatgcacagacaacagtatcttttagggactgcagccaatgttcccccaatttacttttttttttataccttaaaatatcaaatgtttcatttttaggtgatatcccaagtgacacagaaacacagctcctccggatggtgaagtctccgctgcaaaactcacgaaacagcacagaggatgactctagggtgctctcccacttgctccaagttaggcaggtgccctgatggaggcaaggctgagccattaacatgcacagctccatatcctggaagcctctgtagccttgaggagataggctctatccaacaggactcagaataaatgactgccacctcaactgagcagtatgaactgcccacctcaactgggcagtctgacctcttccacagtctttaaagaaacaggagagccatttgcattatttaatcaccattcaataatctcctccctccccatagctgcttgagttaactgtcccacaagtgtaactgtgttttgtaaagatgagggttattttctgaaatgcagatgggactaggatgaagctgtattatcaattacagagacagccaactctcatttctcttaaagcaaaaattcattccactgtgatttctccaggtatttccggcaattctaaatccgccctttgatattagagaatattaaaatcacacagttgtggcaaaaatcacattgtggctattaaaccctttttgtgaacttaaaaaaagttgaaagtggctttaggctaaagctgttttttttttttttttttttaaagatagaggatgcggactccaataaaggcattaagaaagtactagatgaaaatgagaaatatgtgaaggataacatgtgaaatgtacactcaggtctaacaaatacctattatttctctggttaagaaggtttagcaggagcctccaatgagcactgtatgtagagaaaagggaaggagcaggaggaggaacagatctgcacagaatttttttcttaaaaaccacaaagggtgacttttttcttctaaggcaagccaggcctgagaggcatttacatggggctggctcctaatatcaaaacaaaatatttctttggccacaaagggaacttggactatggtaggcaacacattttacaaaacttactggcaaaacacttcccagagggccagtggacctactctggttccccagaggcttccaagaagcaaggccttcaagtgccttcatgttcccatgggngcttgtgccagtgcaatgccagaaggcggatattcctgctgtgaacgccaccctcgagaccttctgcagcctgagagggggtgatactcccacaccctttgatccttccagatggctcagcctagatctagcagtgagagagccctctccatgcagggcagatggagtggtggacacttgtgaaaacaaaacactaactgttccatcctgttatatttgctgtgaggaaaattaagattcctgttgtatgggctgcactgtttctggaagactacaggaaaatctaacatgggttgacacttcctgggtagcccttctgtacatacacacacacacacccaggggagaaggccaggagagaaaatcctggtccaaaagatcacatgaccttactagtgtttccccaatgactgtaatttataaactaaaaatttttacaaatccactgctatcttcttctgtcctgagtttggtagactttaatggatgctccagcaataaccagaatctaggacatgcagactcactgtgagcgagaagctagggatctgccctaaacataggaacctgtttctatcaagcctgaatgaggtcagctctggtagaattaatgacaaatcaatgtcagtgaaatattctgcaaacagggtagcttttgtgcctttcttttggattattttcctttggggagataagaggtattgccaacccatgggtcctaactaatctatcactaaaggactgtgacgacattcctcagtaaagacagtcatggtgtttactgtgcccaaggagggaaaatcccagatcatcagaatccccagtgcaacagaaaacagcacccagtttcaacaattctgatgttggacaaagcctctttttgtcagttaagaaagcgtaagcacaatctctcagtcaattgcattaacaggaatccattcatgtcactgaaaaatacttcttggcacagttcactttccgtgacccaaagacaccaacaacaatcaaaactgcactttcagggtagtatattgttacactagcccagtcaaaacatactcagaacatttaaaaatgtataaattactgttagcactgcagttccgttttattgtcttatttatttattgagacagagtcttactctgttgcccaggctggagtgcagtggcatgatcttggcttactgcaacttctgcctctcaggtttaagcaattctcatgcttcagcctaccaagtagctgggattacaggagtgcaccatcatgcccagctaatttttgtattttagtagagatggggttttgccatgttggtcaggctggtctcaaactcctggcctcaagtgacccacctgccttggcctcccaaagtgctgggattacaggtgtgagccactacacccagccctgcagtccctttttaaagagtactggactgttttcctgcaaagtactttcaaatccataccataaaggtagaatttatctgggaagaatgtgttttttgaattccacctggcacttggttaaatctactttattttgccctttatttatttgaacagaactttagaatgctctaggtcaggaaaagaaacagtgtgttcgtttttaagaaggatgtgtgaatagtaagttggcattcagactcaagtcccatggtattgttcttatccaatgggacctctccttgggaatataattcctttaccagaggtatcatggtatcccaagaatataactgctcccttggctctgtgtgtgaagattgggggagaggatgtaaactaagagtata

SEQ ID NO: 155685 - DNA, 513 bp, Homo sapiens
tgttctgattcagctcgtgtggatagcgttattgctggtcgacccatcgcgtccggtgttaaccaaggacgagccagcttcaagcagtaccagcagctttacatcacagtcacagaaaaaaggacagcaatcgggattcctgcaaagccgtaactgaggatgcatagccttatgtgaagatttcaacgagaagagatatattaagtcggaatggactaggattcctttagaataaagtggttctttaattttattttccacttaacagtgatcacctcatctgacctgcacatacatggagagatatgggtagtccctaatactgaccatgtctgcacacgattctttttcgtctatgatgactgcctagtggtatatgcatatattaatactcttttatgaggcttttactaatatattcttctagtaattgttaattatactggttctgttcattggtttatattttattatcttgttttgaatgtcttgttctgttttttgttatatatt

SEQ ID NO: 155686 - DNA, 536 bp, Homo sapiens
agtactccccctcacagcagccaaagggcttgtgaaccacttccctcctttgctcaatgccctcgttaggcacccagcccacctgcgccccattgtgctcttatttgtccaattccaaagatggaggagcgtccgctatgtgaataggaagataacgtcgacatttattgagcacttactgtgccaggagctgcactgagcaggctccttgtattatcttgcttaatcctcacaatgtcctggatttatcccgtttatgggtaaaaggacaatgaggcacagacaagatcagtcaacttgctgagaggaccacagttcatgagtggctcagcagcctggccagaagctctccttgccctcactttcacgtagagagtggctggcccttggctgaatgactgcatcttggggtagtctgcatgcctgatcgcacatgagacttgccccccatcgccctgtgaggcgcaaagtcacacagctccatcataataggctctagccactcagatgtgatcccttggagaagtgagttagtg

SEQ ID NO: 155687 - DNA, 436 bp, Homo sapiens
gaggctacttaagtgaagtagtagaagaaaatactccaccaaaaatggaaaaagaaggcttggagataatgattgggaagaagaaaggcatccagggtcattacaattcttgttacttagactcaaccttattctgcttatttgcttttagttctgttctggacactgtgttacttagacccaaagaaaagaacgatgtagaatattatagtgaaacccaagagctactgaggacagaaattgttaatcctctgagaatatatggatatgtgtgtgccacaaaaattatgaaactgaggaaaatacttgaaaaggtggaggctgcatcaggatttacctctgaagaaaaagatcagcaggtcaaaaggtacaagattgttacttctatcaaatttttatggaaaaaaatgagaaagttggcgttcccacaattcag

SEQ ID NO: 155688 - DNA, 388 bp, Homo sapiens
gaagagctaaacactgcacccgtccaagagagtccacccttggccatgcctcctgggaactcacatggtctagaagtgggctcattggctgaagttaaggagaaccctcctttctatggggtaatccgttggatcggtcagccaccaggactgaatgaagtgctcgctggactggaactggaagatgagtgtgcaggctgtacggatggaaccttcagaggcactcggtatttcacctgtgccctgaagaaggcgctgtttgtgaaactgaagagctgcaggcctgactctaggtttgcatcccttgccagaatatggagttatttgctgttctctgcatagaaacaagccactatgttgcttttgtgaagtatgggaaggacgattt

SEQ ID NO: 155689 - DNA, 384 bp, Homo sapiens
gggggcttacctcagaattcgtgtccttttaccaggtttattcactgttggccccagaatcctttcagaaaccaagaaatgagaatatgtcaagggttaaaggaggctttcacttccagaaatcagaagtaaaataaaggcttttagagcctgaaattagctttttggaaatgataggattataaaatcactggcaaaagggtttagaacttgactgccctataaagagttcttcctctgtgccataggtggtcagaatggcttcaacattcctcaagtcaccccatgcccagaagtaggagagtacttgaagatgtctctggaagacctgcattccttggactccaggagaatccaaggctgtgcacgaagactgctttgtga

SEQ ID NO: 155690 - DNA, 1742 bp, Homo sapiens
  misc_feature (1)...(1742): n = a,t,c or g
taccaggaaaggaggcctcccaaacttgcctttatgtcaagaggtgttggggacaaaggttcatccagtcataataaaccaaaggctacaggatctacctcagaccctggaaatagaaacagatctgaattattttataccttaaatgggtcttctgttgactcacaaccacaatccaaatcaaaaaatacatggtacattgatgaagttgcagaagaccctgcaaaatctcttacagagatatctacagactttgaccgttcttcaccaccactccagcctcctccatgtgaactcactgaccaccgagaacagattccactctttaccattcagtctcaccaagatgcccaataccaatggaagtattggccacagtccactttctctgtcagcccagtctgtaatggaagagctaaacactgcacccgtccaagagagtccacccttggccatgcctcctgggaactcacatggtctagaagtgggctcattggctgaagttaaggagaaccctcctttctatggggtaatccgttggatcggtcagccaccaggactgaatgaagtgctcgctggactggaactggaagatgagtgtgcaggctggtacggatggaaccttcaagaaggcactcggtatttcacctgtgccctgaagaaggcgctgtttgtgaaactgaagagctgcaggcctgactctaggtttggnattattgcagccggtttccaatcagattgagcgctgtaactctttagcatttggaggctacttaagtgaagtagtagaagaaaatactccaccaaaaatggaaaaagaaggcttggagataatgattgggaagaagaaaggcatccagggtcattacaattcttgttacttagactcaaccttattctgcttatttgcttttagttctgttctggacactgtgttacttagacccaaagaaaagaacgatgtagaatattatagtgaaacccaagagctactgaggacagaaattgttaatcctctgagaatatcagcaggtcaaaaggtacaagattgttacttctatcaaatttttatggaaaaaaatgagaaagttggcgttcccacaattcagcagttgttagaatggtcttttatcaacagtaacctgaaatttgcagaggcaccatcatgtctgattattcagatgcctcgatttggaaaagactttaaactatttaaaaaaatttttccttctctggaattaaatataacagatttacttgaagacactcccagacagtgccggatatgtggagggcttgcaatgtatgagtgtagagaatgctacgacgatccggacatctcagctggaaaaatcaagcagttttgtaaaacctgcaacactcaagtccaccttcatccgaagaggctgaatcataaatataacccagtgtcacttcccaaagacttacccgactgggactggagacacggctgcatcccttgccagaatatggagttatttgctgttctctgcatagaaacaagccactatgttgcttttgtgaagtatgggaaggacgattctgcctggctcttctttgacagcatggccgatcgggatgagtccaacaatgagtttgtacaaataactggggtcatcgggaaaggcaaagaaactgaaggcagagtcctaacgttgcatcttattcgagctggcagttctgttcacgtccattgccggcaatggatgtctttgtggtga

SEQ ID NO: 155691 - DNA, 4098 bp, Homo sapiens
  misc_feature (1)...(4098): n = a,t,c or g
cccgtccaagagagtccacccttggccatgcctcctgggaactcacatggtctagaagtgggctcattggctgaagttaaggagaaccctcctttctatggggtaatccgttggatcggtcagccaccaggactgaatgaagtgctcgctggactggaactggaagatgagtgtgcaggctgtacggatggaaccttcagaggcactcggtatttcacctgtgccctgaagaaggcgctgtttgtgaaactgaagagctgcaggcctgactctaggtttgcatcattgcagccggtttccaatcagattgagcgctgtaactctttagccatttgggaggcttacttaagtgaagtagtggaggaaaatactcccacccaaaaatgggaaaaagaaggcttggagataatgattggggaagaagaaaggcatccagggtcattacaattcttgttacttagactcaaccttattctgcttatttgcttttagttctgttctggacactgtgttacttagacccaaagaaaagaacgatgtagaatattatagtgaaacccaagagctactgaggacagaaattgttaatcctctgagaatatatggatatgtgtgtgccacaaaaattatgaaactgaggaaaatacttgaaaaggtggaggctgcatcaggatttacctctgaagaaaaagatcctgaggaattcttgaatattctgtttcatcatattttaagggtagaacctttgctaaaaataagatcagcaggtcaaaaggtacaagattgttacttctatcaaatttttatgggaaaaaaatgaggaaagttgggcgttcccacaatttcaggcagttgttaggaatggtcttttatcaacagtaacctgaaatttgcagaggcaccatacatgtctgattattcaggatgcctcgatttggaaaagactttaaaactatttaaaaaaatttttccttctctggaattaaatataacagatttacttgaagacactcccagacagtgccggatatgtggagggcttgcaatgtatgagtgtagagaatgctacgacgatccggacatctcagctggaaaaatcaagcagttttgtaaaacctgcaacactcaagtccaccttcatccgaagaggctgaatcataaatataacccagtgtcacttcccaaagacttaccccgactgggagattgngagacacggctgcatcccttgccagaatatggagttatttgctgttctctgcatagaaacaagccactatgttgcttttgtgaagtatgggaaggacgattctgcctggctcttctttggacagcatggccgatccgggatggtggtcagaatggcttcaacattcccccaagtcaccccatgcccagaagtaggagagtacttggaagatgtctcctggaagaccctgcattcccttggactcccaggagaatcccaaggctgtgcacgaagactgctttgtgatgccatatatgtgccatgtacccagagtccaacaatgagtttgtacaaataactgggggtcatcgggaaaggccaaaagaaactgaaggccagaagcccctaacgttgccatcttattcggagcctggcagttcctgttccaccgtcccattgcccggcaatggatgcccttgtggtgatgacccctcagaaaaggatgccccctgtttaaaaacaaattgcttttgtgtccctgaagtatttaataagaagcattttgcattctagaaagtatgtttgtgttggttttttaagaagtctaaatgaagttattaatacctgaagctttaagttaagtgcattgatcatatgatatttttggaagcatacaattttaattgtggaagtttaaagcctcttttagtcccattgagaatgtaaataaatgtgtccttctttatggaccaaggatatgaaatcatttttcttttgtagctaacggttgccttgaggaagaaataatttggttttattaagagtctactctcaatccagttattagagatgtactgagtttgatttgttaatcctttctatatactgctgatcttgcatgtctacaatctgctcagtttttctgtgtttctgcaatagtggtcagaaaaatacttaaattcccttaatggtgttgttttctatttgttctggttttgagataaatgagtgattctgtccccaaatgtccatttttgaagtgattttcctggaggattagggtatttagcagttgaagctcttcattcatagtagttactgtcagctaacaggttttttaaggcttttaactattaatattttatggaatggggcaaagtaaattgatgaaagaattggagtgataatagtcctttacaaacatacagtccataagaaaatgaatttggcatatagaattattacaatttcctgggagagatggatatttaaacctctattattttagacaagactgtctagaacttaagtttgatctgtcagccagtactcccattaaattcagtgtagtttcacttgatagaatcacatatgttatcgaaatgttagcagcagcttcatcctccttctgattaaagtaagtagaaatgggatgttttgtttaataacagccataagcgtgtgtttagaccacagcggatgttgtagaccaggaccatagatgatacatgtcagtgctgtggaatgtgcattctctgagtgttgttttgtggtatcattgtctttcctgaatgactttctaactgtgcagaaaggcagaaaagtcatccatatgtatatgtcatatggacttttataaaatattttaatgtggaccanaaagtggggaaagaatctttaccaaccctggcaattactttttttaaaggcacttttactctttggttttatccattccattttgctaatatttactagctttataaattacagtaagggtacaaaaactccatcttgtaattattttccatttttggaagtggaaaaagtacatattattttgcacaaggttttatactgctaagtgcttggttggggtggtgagatgatgattagaatcaggggtgaggctgagagactctgggtttagggcctagccccgccccccatctcccctggggtaaaaatggaagggtgtgggggtaaaaagatgccataaggcccttttcctagcctctgacagccctagaagtcccaatcacccctgtaataaatatgtgttgaatgaagaaatgggtgaatgagcttgtcaatgtgattttaaaaaattgactaccctggaggaatgattaggaatcctaaatgaagccagccctcggtatctgcaggtttctcatcccatggaattcaaccaactgcaaatggaaaatacgatttttttttaaaaaaaggatggttacatccgtattgaacatgtacagacttttttcttgtcattattctctgaacaatacaagaactctttatgtagcatttacatttattaggtattataagtaatctagagattatttaattaaaatatacaggaggatgtgtgtcagttatatgcaaattctgtaccattttgtatcagggaattgagcatcttcagatgttggtatctgcagggatcctggaaccaaacccctgcagatactaagggctgacgatctaggtaagactggatttaacagttggaaaaaaaaaaaaaaaaaggagagagaagacagttcctttcctgtagaaattaaaacaaaatacaaattgaggaagctctgctacccaggctgtcatggtagagaacttgaagaagacctgtttggatggacacctggtttcaaaagtcaggtgtggagactgttaaatgggagggcctcatccataaatgatttctggcaacgtcttcttcaggtggagcttgacgtctttttaatgttacttggggagggagtgctcattaagggatgccagggccagctctggtggttcctggggaggctgcgtccttccctgcttctgcatgtcatgaggcagcaggaaggtttcccctgcacctgtctgtcctggctccctctgggtagccccct

SEQ ID NO: 155692 - DNA, 452 bp, Homo sapiens
  misc_feature (1)...(452): n = a,t,c or g
attgagcctatggaaccgtcngcagaanctccggaagtatcacgcgaccgacctgatctcttagggatctgttgttggagaatttgtattgctgctttatcctttctagatggaagcttagaggatgctgtggatggtcttttacgttgcattacaaccacataaagagcagtataaagagtttcaggatctgaaccaagaagtcatgaatttggatgatattctaaaagtaagtaccttttcacagaaattggattaggattggagagaggtgtactaagccaacattctatttaagatgaggtatcatttnnnnnnnnnnnccctgtccaatcacaggattaatagctcatcattattttaaatggcactaatatgccagtagtgcatattaagttttattttccaaagcacagatcaacttatctaaattgattaggatttaaacaaag

SEQ ID NO: 155693 - DNA, 1609 bp, Homo sapiens
  misc_feature (1)...(1609): n = a,t,c or g
cagccttcaaaatctgaaancacctacaataaaactagagcacccttaattcaaccaagaaaatnccattttcaggaatactaaagggaaatagtaaacccatgaaaataattacaatgaaaaaaaggacgaaattaaaattttcaaaataagccttcaaatatctgcccaagaggaattccctttttttcgaagatggaagtcttgcctctgttgccccaggctgggagtgcagtggcatgatctcgggctcactgcaacctcccacctccccaggttcaagcgattctccggcctcaagctccctgggcagcttggatttacaggtatgtgcccatcacgtctggctaatttttgtattttcagtagagaaggggtttcacccatgttggcccaggctgatctcgatctcctgacctcaggtgatccgccagtctgggcctcccaaagtgctgggattacaggtgtgagccaccacgcccagcctccatattgttaacatatagttaacactttaaaactgatgtgctttaattaaaaagcaagcaaatatacgataaaacagacaaggaatcaaagcacagatcctgaaatcagaatctaaagaaaataatacagtggggttgtatacaacttagcttagtaagaaattataattataacagaagcgatcggagctaccacaaaactgtgtaagaataaacaggtaattttaacagatggttatgtaaattggcaggtcgggtaaagaacaaaataagcttacagaatatgccatttaaaaatcctaaccaaatatttcatttcataccgtatattaaaatgcaacctggaaaagaaaccctgatctcaattcagctttggagtctataggagtctactttctagaagatttcaaatttcatttgccaagacatcataattagctgtatggttcagtgccacattaggattgtcgacttcattcacagcaggcaagaaggcagatgtaaaaggaagcaggttatgacaggccatcctatattcttcatattgggaactacagttcccaaagctgccatcaagcagtgcttcagaaacctttattaatgtctttacatctttatcttttatagtttcatctagtctagtggctatagcaattgctttctcctgccttgacttgtccagaaaatacatcattttagcacctgaaataccaaggcatttcaaaatgaataaacacctatactttacattttatgtgatatcaactggccagtgacttcaaatatggttttaagtgtttaatcagtggtaagctggagctggctcctaccagctcaagagagccaagtgtgacatttcttccctacctcctattcagtagcatcccattgataggccatgatcagagtatttatatcatgaaaatacactacaaatcagagcttcttccttcacaaaatgatggttattaaacatttatcagatgaacagtgactcaacaacttcctccccttagaaataaaattgagaatgtaaatatggactgccctgtggcatcaatcagtatttcagccaaaactatgaaaaaagatattctaaaataaaaccggacgcgtgggtc

SEQ ID NO: 155694 - DNA, 1050 bp, Homo sapiens; identical to SEQ ID NO: 145880

SEQ ID NO: 155695 - DNA, 963 bp, Homo sapiens; identical to SEQ ID NO: 145881

SEQ ID NO: 155696 - DNA, 747 bp, Homo sapiens
tgagacggatttccctcttgttgccaggctggagtgcaatgacacgatctcggctcacggcaacctccacctcccaggttcaagcgattctcccgcctcagcctcccgagtagctgggactacaggcatgcaccactagtctcgcgacgttttaattagaattttagaattagaggagggcttagaactctgccctcatttttcagtgaggaaactgcccaagacaggacaaatacttaccctaatgcttagcctggctccagtgaaattagctccccagccaaagctgagctggatggaactaacaaggacacagcaggctgtccccagccctttcgggaggtggggagggataggaaggagaaaggttttggtgcctattgctgctgatggttgggcatcaggccaggccaggggccttcttggaggctctgggaaaggggaagggaaggccaccgggtgtgagagagagggcacttgtctccttcaaggctgatggaaggtaggatatgtgagtccttcctcttaagtggcaggaaacagaattttctcttttatttctttttttttcccctggatcctagaactgaggaaacactattttctcatcttactggtttttgggcccctactctattccttttatgcaaacctcacagaattttaaccagaaaggccaggcaggatggctcacgcctgtaatcacagcactttgggatcacttgaggttaggagctcgtgaccagc

SEQ ID NO: 155697 - DNA, 435 bp, Homo sapiens
  misc_feature (1)...(435): n = a,t,c or g
agtaccgctcgacccacgcgtgcgatagcccttgctatttgcaagctcattcatataactattgagcctctctaccgaagagttggagttcctaaaggtgctaaaggctcacctgttaatgctttgcaaaacaagagagcaccaaaacaagctgagagctttgaagatttgaggagagacgtgttcaatatgttctgttaccttggtcctcacctttctcacgatcccattttatttgcaaaagtggtgcgcataggcaagtcatttatgaaggagtttcagtctgatggaagcaaacaagaagataaagaaaaaacggaagttatccttagctgtttgcttagcattactgaccaggtactacttccatctctttctttgatggactgcaatgcttgtatgtctgaggaactatggngaatgtttaaaacattt

SEQ ID NO: 155698 - DNA, 267 bp, Homo sapiens
agtgtttggaaaactagaaatgtaccttattctgactatttctttttgtcttaacagaaagtgatgccaatactggaaaactaataatctttagtaatattgccttaatttaacagctctacattaatcatactcctccaccactgtccaagagtaaggagagagaaatggacaagaaagatttggacaagtcaaggactttaaaacaaaaacagaagcccttggtcaatgtagttcacaattcttggttctaggatcactcaaaca

SEQ ID NO: 155699 - DNA, 1074 bp, Homo sapiens
atgaagggagtaatgaatgtggccctggtgcattcaagtcaggaaccaaatggcgagacaccatcatctttatacagagttgcagcagtacttctacaatttaatcttattgatttagatgatctttatgtacatcttcttccggctgataattgcattatggatgaacacaaacgagaaattgcggaagctaagcaaattgttagaaagcttacgatggttgtgttgtcttctgaaaaaatggatgagcgagagaaagaaaaggaaaaagaagaggagaaagtagagaaaccacctgataaccaaaaacttggcttgttggaagccttattaaagattggtgattggcaacatgcacagaacattatggatcagatgcctccatactatgcagcttcacacaagctaatagcccttgctatttgcaagctcattcatataactattgagcctctctaccgaagtgtcacttcatgggccgtggaccatgcaggcttcttagagagtgacccctgtgactccacagtggggcacctgctgagcagagttggagttcctaaaggtgctaaaggctcacctgttaatgctttgcaaaacaagagagcaccaaaacaagctgagagctttgaagatttgaggagagacgtgttcaatatgttctgttaccttggtcctcacctttctcacgatcccattttatttgcaaaagtggtgcgcataggcaagtcatttatgaaggagcaaagtaagaaggtgggggagaaagactgctgtgttgcggcgaagttacgagcgcaagcgacccgtggcgcccagggctctccagactgggtacctcggtttgctttctcgcctgttcgctgttctggagatttgggcttggtaggcggcggttggacttatgtggccggtgaatggggggttggaaataaggtggacggagagcaataccaaatccctgagacaatgggagagattggaaccaaaaccaaggacttgaaaaatggaaatgtgaagattccaactgcttacccatttaactggcccatttggcctatggaaaatgccatatag

SEQ ID NO: 155700 - DNA, 1231 bp, Homo sapiens
ggaaggtttctttgctgcatgttagagactgtgaccaggtggcatagtgatagagccacatatgaaaaggaatgtggaaactatccaggattccttaccatattacgggcaactggatttgatggtggaaataaggctgatcaattagactatgaaaattttcgacatgttgtacataaatggcattacaaactaaccaaggcatcggtacattgccttgaaacaggcgaatatactcacatcaggaatatcttgattgtgctaacaaaaatacttccttggtacccaaaagttttgaatctgggtcaagctttggaaagaagagtacacaaaatctgccaagaagaaaaagagaagaggccagatctatatgcattggctatggggtaacaaaattatattttaatgtgatttacaagactagatgacagaaggattctgaagactttaaaatgttttacagtgttgaagtttatcttctgccttcaggagattatgggagattatgcgatcatgtttccacaggctggtgagagttaccacttctgattatcaacttccggtctatactggatgatagtttttttaaagtcatgtataatatttcttgattgggaggaaatataattttatcatcatagttaacagatcttcaagagtaaaaaaaaaaaagccatcttagtttaaggattagtttatagggaaattgtaatttttaagaaagctgggcgttctataaaaaccttcaagaacttattaaaaatgggtattttttaattctctagaaccacatagtagaatgaataacttgctaattttattcttaaaaacctcatgtttatgttttttgatttgggtttgtatatttaaacactttgtgcgactttccagctactctgggcagttgaaaaagtaggaaaagtccataccatgataccctgaaaatgagtttccatcacaaagacccccccctccgaggaatgcagttgcccagtgtgcaaaatgggccctggtggtgggccttcttcatcatcaataggaagtgcatctaaatcggatgaaagcagtactgaggagactgataaatcaagggagagatctcagtgtggtgtgaaagctgttaataaagcttctagtaccacacctaaagggaattcaagcaatggaaatagtggctctaacagcaacaaagctgttaaagaaaatgacaaagaaaaagggaaagagaaag

SEQ ID NO: 155701 - DNA, 3499 bp, Homo sapiens
cattactgaccaggtactacttccatctctttctttgatggactgcaatgcttgtatgtctgaggaactatggggaatgtttaaaacatttccatatcagcatagatatcgtctgtatggccagtggaagaatgaaacttataacagtcacccacttttagtaaaagttaaagctcaaacaatagacagagccaaatatatcatgaagcgcctaaccaaggaaaatgtgaagccttctggaagacaaattgggaagttgagccacagcaatccaaccattttgtttgattatgtatgttttgagatcttgtcacaaatacagaagtatgataacttaataacacctgtagtagattcattgaaatacctcacttcactgaattatgatgtcttggcctgtatcctttcaaattgtatcattgaagctttagctaatccagaaaaggaaagaatgaaacatgatgacacaaccatctcaagctggcttcagagtctggctagtttctgtggtgcagtttttcgtaaatatccaattgatcttgctggtcttcttcagtatgttgccaatcagctaaaggcgggcaaaagttttgacctgcttatattgaaagaagtggtacaaaaaatggcaggaatagaaattacagaggaaatgacaatggagcaactagaggctatgactggtggagagcagctaaaagctgagggtggttattttggtcagatcagaaacactaaaaaatcctctcagagattaaaggatgctctattggaccatgatcttgcccttcctctctgtctgcttatggctcagcagagaaatggggtaatctttcaggaaggtggagagaaacatttgaaacttgtgggaaagctctatgaccagtgtcatgataccctggtgcagtttggtgggtttttagcatctaatctgagcacagaagattatataaagcgagtgccttcaattgatgtactctgtaatgaatttcatacaccccatgatgcagcatttttcctgtctaggccaatgtatgcccatcatatttcgtcaaaataccgatgaacttaaaaaatcagaaaaagggaagtaaacagcaacataaagtccataaatacattacatcatgtgagatggtgatggctcctgtccatgaagcagtggtctccttacatgtttccaaagtctgggatgacatcagccctcaattctatgctacattctggtcattgacaatgtatgaccttgcagttccacacaccagctatgaacgagaagtcaataaacttaaagtccagatgaaagcaattgatgacaatcaggaaatgcccccaaataaaaagaaaaaagagaaggagcgctgtactgcccttcaggacaagcttcttgaagaagaaaagaaacagatggaacatgtacagagagttctacagagattgaaactggaaaaggacaactggcttttagcaaaatctaccaaaaatgagaccatcacaaaatttctacagctgtgtatatttcctcgatgtattttttcagcaattgatgctgtttactgtgctcgttttgttgaattggtacatcaacagaaaactccaaatttttccacacttctttgctatgatcgagttttctctgacataatttacacagttgcaagctgtactgaaaatgaagccagtcgatacggaaggtttctttgctgcatgttagagactgtgaccaggtggcatagtgatagagccacatatgaaaaaggaatgtggaaactatccaggattccttaccatattacgggcaactggatttgatggtggaaataaggctgatcaattagactatgaaaattttcgacatgttgtacataaatggcattacaaactaaccaaggcatcggtacattgccttgaaacaggcgaatatactcacatcaggaatatcttgattgtgctaacaaaaatacttccttggtacccaaaagttttgaatctgggtcaagctttggaaagaagagtacacaaaatctgccaagaagaaaaagagaagaggccagatctatatgcattggctatgggctactctgggcagttgaaaagtagaaagtcatacatgatacctgaaaatgagtttcatcacaaagacccccctccgaggaatgcagttgccagtgtgcaaaatgggcctggtggtgggccttcttcatcatcaataggaagtgcatctaaatcggatgaaagcagtactgaggagactgataaatcaagggagagatctcagtgtggtgtgaaagctgttaataaagcttctagtaccacacctaaagggaattcaagcaatggaaatagtggctctaacagcaacaaagctgttaaagaaaatgacaaagaaaaagggaaagagaaagaaaaagagaaaaaagaaaagactccagctactactccagaggccagggtacttggtaaagatggtaaagaaaaaccaaaggaagagcggccaaataaagatgaaaaagcaagagagaccaaggaaagaacgccgaagtctgacaaagagaaagaaaaattcaagaaggaagaaaaagctaaagatgagaaatttaagaccactgtccccaacgcagaatcaaaatcaactcaagaaagggaaagagagaaggagccatccagagaaagagatatagcaaaggaaatgaaatcaaaggaaaatgtttaaaggagggaggaaaaaacaccagttctggggtccttggaattcacctgtttccccaggatcagatatttcccagagccttgaaagggggaaccaaaaacgccgcaaaattgatactcacccttctccatcacattcctccacagtaaaagaaatgtttcatcgaactccaaggaatcttcagcaaagctctaccattaatcatactcctccacccactgtcccaagagtaaggagagagaaaatggacaagaaagatttggacaagtcaagggaaagatccagagaaagagagaaaaaagatgaaaagggacaggaaagagcgggaaaagggggttcactcaaaacaacgacccgtgaagttgccaccggaccttaacccaagagacgtaaagaggagaatggaacaatgggggtttcaaaacataaaagtgaaagtccttgtgaatctccttatccaaatcgagaaagacaaggaaaaaaataagtcaaaatcttcaggcaaagaaaaaggcagtgattcatttaaatctgagaagatggataaaatctcctccggtggcaaaaaggagtccaggcatgataaagaaaagatagaaaagaaagagaaacggggacagttcaggaggaaaggaagagaagaaacatcataagtcctcggacaagcacagataatgaagactttccatcaaggttatgcactttatgctttatgtgagatttaaaaagtattttacccatcttaaataaattgtgtttccatcatagtggatacagtgttcagaccct

SEQ ID NO: 155702 - DNA, 2012 bp, Homo sapiens
gacatttttgattgccataactgatagggtgctactgcatctagtgtataatggtcagggatgctcttaaacattctgtaatgcacaggtcagctcccacccgcacccccaccccctaccaagaattatttggctgaaaataccaataatcaggtgaagaaaccatgaactagaggtagccaaataaaaaagttgagttctcctttatgtgttcagtagtcttaagtttttaaggtagtgttgaaaaaagtctgtctttcagagatgatggatttgcttacaatgatacctgtctgcaagcattttttcccccaaaagtgcttaatagtaaaattagatcttgtagtagccgagattattgtatcatttatctgaaccacagcttttataaaatctttaaaggaaacaaataggggcccacatctttatgaataatgttagaaacattttttgtatatatatgcacaaatgaactgtttttctcttaggctaaagaagaaaaagaagaagaatcaacttcttcttcaagtgttttcttctgctgatgaataagggtcttcatcatcatcctcttcctcttctgggcacaaaaggcataagaaacataagaggaaccgttcagagtcttctcgcagttccagaaggcattcatctagggcatcctcaaatcagatagatcagaatagggaaagatgagtgctacccagttccagctaatacttcagcatcttttcctttaacccttaaacaagaagtgggaggaaactactggggaagcaggataggttacagtatgaaaagacacagataaaagagaaagatagatgccctctctcttcatcttcacttgaaataccggatgattttggaggtaggtctgaagatccaagagatttttataacagctataaaacccaagcaggtagtagcaaaacagaaaagccatataaatcagaaagacatttttccagctagaagaaattcctcagattccttctgtaggaattcagaggccaagatttatggttataggagatttgaaaaggatatagagggaagaaaagagcactatagaaggtgggaaccaggttctgtgaggcattctacctcaccagcaagctcagaatactcttggaagtcagttgagaaatacaaaaaatacgctcactctggatcacgtgatttcagtagacatgagcaaagataccgtttaaatacaaatcaaggagaatatgaaagagaggacaattatggggaggatatcaaaacagaggttccagaagaagatgcactaagtagcaaagaacactcagaaagcagtgttaagaaaaatttacctcagaatttactgaatatatttaatcagatagctgaatttgaaaaagaaaaaggaaataaggtcaaaaaattaatacacccaaggatatcgggcacccattaccacaaaatgcccattaagtgaagtttttggttgtattagtcataacagttgagtgcagaaatctctgcttctaaaattatttgtagagattacaggaaacaaatgcttttaagtaagtttttctcaaattttgtttcagttctaggtcccttgtcacagcttggtttttagactttttatgtatatgtttatgtacagtatattactcttgacagtttgaatttcttcacctaaagataattctctgaaagtactgtttcttcattctattgcggtatatgagaattcctgggtgcatcttattctgctgtttgagagaaaaatttggtgcattgaacacttggatcatttttataaaaattaatttcattttcttttctgttaaattaaaaatcgtcagcttttgaaagattatatgttcgaatgtttcttgaacacttttatatttatcagtttaaatattacattttttgcccaattttttttaaaatttttaaatggtagattatatgtcttaattttcctctaaagcccaatttgattaaaagtggtttgtgaacaatcaaaaaaa

SEQ ID NO: 155703 - DNA, 1030 bp, Homo sapiens
caaactcatcttcttccccagggaagccctcggccccccaagaaggaagacagttttgctaaaaaattggaaaccggcccacccagctgaccggaccggtcaatgcccgtccggaacgtctataaagaaggagaaagctcgagtcatcactgagaaagagaagaatttccaaagcccttgcttagtcttcgttatggcgcgtgccaaaagcccggcttcttcggcatacgggccaaaaagagcccaaggaagccccagaaccaggatgttgaaaaagaaaaaattaaaacccttcctgggaactttgaaatcagtctggcagtcatgcctgggtctcccacgtggtgtgtttccgtgggaacaacctgggccctgggatggggcttcactgcctgtgacttcctcctgccaaggggatttggggctttcttgaaaagacaagtccaagcccctggataatgctattactttcttgtgttgaagcactgttggttgtttggttagtgactgcatgtaaaacggtttttcttgtggggcaggttacagaggctgcacttcagagcggacttgtgctttttctttttaaagaggtaaggttgggctggtgctcacaagctgtaatcccaagcactttgagattgcgctgggaggttcacagaccagcgctggccacacatgtcagaactactaaaaataaagaaatcagccatgcttgggtgctgcacactttgtaagttgcagctcctgggaaggcagaggtgagggaatcacctttaacccaggagggcagaggctgcactgagccaggatcacgccactgcactctagcctgggcaacagtgagactgtctcaaaaaaaaaaaaaaagagacagggtcttcggcacccaggctggagtgcagtgccacaatcatggctcactgcagtcttgaactcatggcctcaagcagtcctccctcagcctcccaagtagaggggtttataggcacgagaccctgcacccaacctagagttgccttttttaagcaaa

SEQ ID NO: 155704 - DNA, 478 bp, Homo sapiens
  misc_feature (1)...(478): n = a,t,c or g
agacgacttcaactgcaacgtctgggatgcactcaaagccgaccgggcaggtgtcttggctgggcatgacaaccgcgtcactgcctggaactaacgccagtagcatgtggatgccatggagactggaagaccattccaacttggacgcgttaccatgagagcatatcctatccaaccgtactaacgtggacaccctacacctcccctcagaacttcaaaagggcaagatcttttttccttcacttattgctgaaaccaagagcacaattcccattgagagaaagatctctgtgctgtaaactaaaacaaattgtgcattcctttccggggccatcgtctttgttttcttttttgtcttgaatggaattttaaaaggaaatatataataaaaatggtttaaccagaaggtaaacttggagtgtaattgttcagacagacacactttttccaccagtgtatttggaatttttagtanctg

SEQ ID NO: 155705 - DNA, 320 bp, Homo sapiens
ttctttccaaatggcaatgcatttgccactggctcagacgacgccacctgcaggctgtttgaccttcgtgctgaccaggagctcatgacttactcccatgacaacatcatctgcgggatcacctctgtctccttctccaagagcgggcgcctcctccttgctgggtacgacgacttcaactgcaacgtctgggatgcactcaaagccgaccgggcagaaataacctcttacagttgtaaccattgcggctctgtccacttctcgttgctgctctgtggcacatatcggaagcagtacagcgcgcggctctacacgcttgg

SEQ ID NO: 155706 - DNA, 1209 bp, Homo sapiens
  misc_feature (1)...(1209): n = a,t,c or g
tatgaggctgggtgcaaggcctgctggattcagctcatcacttaggcctgttctttgccaggttaccacatgactagccacccaagaagttaaggctgatgtccccttgtcattcgctcctgctccagtgccctgtgggacatcgagaccggccagcagacgaccacgtttaccggacacactggagatgtcatgagcctttctcttgctcctgacaccagactgttcgtctctggtgcttgtgatgcttcagccaaactctgggatgtatattcccaatgtttctttctgagcgtttacatgatgtcttgatttgctttctctttccagttctttccaaatggcaatgcatttgccactggctcagacgacgccacctgcaggctgtttgaccttcgtgctgaccaggagctcatgaccttaactccccatgacaacatcatctgcgggatcacctctgtctcccttctccaagagcgggcgcctcctccttgctgggtacgacgacttcaactgcaacgtctgggatgcactcaaagccgaccgggcaggtgtcttggctgggtcatgacaaccgcgtcagctgcctgggcgtgactgacgatggcatggctgtggcgacagggtcctgggatagcttcctcaagatctggaactaacgccagtaggtaatgcagcagcccaaatgcccttctctgaggagaaactgtgcgtgtttctcataggaacatttgaagttgtcattaacgggtttctagatagaatgtttgatgtaggcatttgatttgggaatttgttgttgtggggaaacgttttacagaaagctgaagttcacgttgccctcagcttgcagacattcattgcagtgatgggaagagcagtgacctgggctgtgcgtctgcactttagattctctgcctcttttcacatttctttaaactctgtttaaaacagcatgtgggatgccatgggagactgggaaggaccattccaacttgggacggcgttaccatgaggaggcatatcctattcccaaccgttacttaacgtgggacacccttacacctccccttcaggaactttcaaaaggggcaagatctttttttccttcacttatttgcctggaaacccaggggcacaattcccatttgagggaaaggtctttgtggtgttaaactaaaacaatttgtggcnttcctttccggggcc

SEQ ID NO: 155707 - DNA, 1795 bp, Homo sapiens
ctgaagatgtcataagctttctctgctcctgacaccagactgttcgtctctggtagcttgtaatgcttcagccaaactctggaatggtgggagaaggcatgtgcgggcagaccttcactggccaacgagtctgacatcaatgcccatttgcttctttccaaatggcaatgcatttgccactggctccagacgacgccacctgcagggctgtttgaccttcgtgctgaccaggagctcatgacttatccccatgacaacatcatctgcgggatcacctctgtctccttctcccaagagcgggcgcctccctcctgggatgggtacgacgaacttcaactgcaacgtctgggatgcactcaaaagccgaaccgggcaggtgttcttggctggggcatgacaacccgcgtcaacctgcctggggcgtgactgaccgatggcatggcttgtggcgacagggtcctggggatagctttcctcaagatcttgggaactaacgcccagtaggcatgttgggatgcccatgggagactgggaagaccatttccaaacttgggacgcgttaaccattgaggagcatattcctatccaaccagtactaaccgtggacaccctacacctcccctcagaacttcaaaagggcaagatctttatttccttcacttatttgctgaaaccaagagcacaattcccattggagagaaagatctctgtgctgttaaactaaaacaaattgtggcattccttgccggggccattcgtctttgttttcttttttgtcttggaatgaatttcaaaagggaaatatataataaaaatgttaaccagaaggtaaacttgagtgtaattgtcagacagagaccacttttccaccagtgtatttgaattttagaccagtgaccctggttttgtggcattcatgcaaaacatgctgagggctttgttcatctgggtcatcgtgtccaaatttcagtcatgtttgtaggccaaggattttgggaaggcatttcatatttccttttttaaaatgtattcctttgtgttcaacagttaatccaaaaccagagagtctagggcagcctctctgatgttgtcaatgatgtaaattcagtccctggtttttaattttctgtctgatgtcacagatcattgttgcacacaaacgtggcatagaaaagaacatgttcagaagccatggggccaagcacatgcggggacggtctcaaatgcgtgatcagagaatccttcacctttgctgaaaagtgagctcagatccagcaccatgttcctcctgacccatcctgtctatcttctcagttgagtttttaatctcactttgggtttccttgtgaagttggagggaagtttataatagcctaacactaccccacccccaactaggaggaacctctgttttcaagagagatgcctgtcctgtgcttggatagtcagtcaattatttgtgtatgaaacaatgtacaaatcaatgttttgaaaataatgatctcagactttctaagttaaattttaaaaattttgattgtttgccatattgggtgggtttactcttagaatcgcatgctgtagaaatgctcaaaagtgcatatgggactcagtccttaggtgttctttttcttttaagaaataacctcttacagttgtaaccattgcggctctgtccacttctcgttgctgctctgtggcacatatcggaagcagtacagcgcgcggctctacacgcttgggtagcgggataagtcactgttttctttatttctttaaaaaaaaaaaaaaaaaa

SEQ ID NO: 155708 - DNA, 672 bp, Homo sapiens
gtagagtcgaggtttcactctgttggccaggctggtcttgaactcctgacctcaagtgatccgcccctgcccttggcctcccaaagtgctgggattataggctgggtatgagctaccacgcctagcctattattatttttgagacaaggtctcgctctgtcacccaggatggagagtgcagtagtgcaaccatggcttactgcagccttggcatcctgggctcaaggaatcctcctgtctcagcctcccaggaggcatgcaccaccacacctggctaattttattttttgtagaaatagggtctcactatgttgttcaggctggtcttgaactcatgagcgtaaacaatgctcctgcctcaagcttccccaaagggattacaggtgtgagccaccatgcccggccaactggtcatgttttaaatgttcaatagactcagatgactagtgaccactgaactgagcagcatggacatggaacagttccatcattgcagaaaattctttgggacaatgctactctagagtcttagaggtatttagcctcctcttctatctcagggatgttcagctccctctgctttataaaaagttcactttccagcccccagacactgaatcaaccaggtcctggtggaaaacaaccataacttggctgtagaaggggtttctt

SEQ ID NO: 155709 - DNA, 536 bp, Homo sapiens
ccagtggcccggagctgggtttgtcgcaaaacttatgtgaccccgcggagacccttcgagaaatctcgtctcgaccaagagctgaagctgatcggcaacgccctgctgcggcggctggtccgcattggggtgctggatgagggcaagatgaagctggattacatcctgggcctgaagatagaggatttcttagagagacgcctgcagacccaggtcttcaagctgggcttggccaagtccatccaccacgctcgcgtgctgatccgccagcgccatatcagggtccgcaagcaggtggtgaacatcccgtccttcattgtccgcctggattcccagaagcacatcgacttctctctgcgctctccctacgggggtggccgcccgggccgcgtgaagaggaagaatgccaagaagggccagggtggggctggggctggagacgacgaggaggaggattaagtccacctgtccctcctgggctgctggattgtctcgttttcctgccaaataaacaggatcagcgctttacaaaaaaa

SEQ ID NO: 155710 - DNA, 706 bp, Homo sapiens
  misc_feature (1)...(706): n = a,t,c or g
agggtcaaattacnnctggccaagatcgcaagggccnctccgggaactgctnacgctgaatgagaaggaccacggcgtctgttcgaaggcaacgcctggctgcggcggctggtccgcattggggtgctggatgagggcaagatgaagctggattacatctgggccntgaagatagaggatttcttagagagacgcctgcagaccaggtccttcaagctgggcttggccaagtccatccaccacgctcgcgtgctgatccgccagcgccataatcagccctcggaggtgatgggtgtgaactcacccagaggggtacagattcacccttgcacacagctcaccagggagctggggcagcctcttgccccaatagcccagcgcaagggtcacttgcgcttttagccgtacaccttgtgaaggcctcttgccaggcatgtgggcagctggacagggtccgcaagcaggtggtgaacatcccgtccttcattgtccgcctggattcccagaagcacatcgacttctctctgcgctctccctacgggggtggccgcccgggccgcgtgaagaggaagaatgccaagaagggccagggtggggctggggctggagacgacgaggaggaggattaagtccacctgtccctcctgggctgctggattgtctcgttttcctgccaaataaacaggatcagcgctttacaaaaaaa

SEQ ID NO: 155711 - DNA, 743 bp, Homo sapiens
ccagtggcccggagctgggtttgtcgcaaaacttatggtgacccccgcggaggacctttcgagaaaatctcgtctcgaccaagtagctgaagctgatcggcggagtatggggctccggaaccaaacgtgaggttctgaagggtcaaatttaccctggcccaagattccgcaaaggccgccccgggaaactggctgaccgcttgatgagaaggaccccacgggcgttctgttcgaaaggcaaacgcccctgctgcgggcggcctggtcccgcaattggggtgctgggatgaagggcaaaagatgaaagctggaattacatccctgggccctgaagattagaggatttctttagagagacgccttgcaagacccaggtctttcaaagcttgggcttggccaagtccatccatccaaccacgcttcgcgtgccttggatcccgccagcgccatatcagggtccgcaaagcaggtgggtgaacatcccgtccttcattgtccgccctggattcccagaaagcacatcgacttctctttgcgctctccctacgggggtggccgcccggccccgcgtgaagaggaagaatgccaagaagggccagggtggggctggggctggagacgacgaggaggaggattaagtccacctgtccctcctgggctgctggattgtctcgttttcctgccaaataaacaggatcagcgctttacaaaaaaaaaaaaaaaaaaaaaaaaaaagtcgacgc

SEQ ID NO: 155712 - DNA, 688 bp, Homo sapiens
tggtctgcattggggtcttgctctgttgcctagggtgtggagtgcggtggcatgatcatgcctcactatagccttgacctcctgggctcaagcgatcctcccacctgagtctcctgagtacctgggaccacaggcacatgctaacgcacccacttaatttttttattcgtagagccgaggtctcactatgttgcccagactggtctcaagctcttgggctcaagcagtcctcctgcctcagcctcccaaagtgccaggattacaggtgtgagccaccacacccagtccaaaaagtgattttctaattccatagtttcttctacatttcttaactggaattttgtaaggaagagttatccttattcatttatttacccatttacttgtaggagcatgtatcataaattcttaatctatggggtgtagttagctactgtaaaattgatgcacatatttttccagattcaataagtaggatccccatcaagctatcttctgaatctttaaaaatgtattctccttatttcatgggtatataattattttctggggcaacagtttgttcatgggtacatttgtctccagccctaggactcaggaaaaatgtaatttattttaatgggaggaatactatttaggaaggctggcagtctctgtgtagggaggtgttcctaggtaatagtgccct

SEQ ID NO: 155713 - DNA, 415 bp, Homo sapiens
atggttcctgacggagacttcgcccttcatgtggtccaacctgggcattggcctatctatctccctgtctgtggttggggcagcctggggcatctatattaccggctcctccatcattggtggaggagtgaaggcccccaggatcaagaccaagaacctggccgatgctcaaaaccccagcctctttgtaaagattctcatcgtggagatctttggcagcgccattggcctctttggggtcatcgtcgcaattcttcagacctccagagtgaagatgggtgactagatgatatgtgtgggtggggccgcgcctcacttttatttattgctggttttcctgggacagctggagctgtgtcccttatcctttcagaggcttggggttcaaggccctccctgcactcccctcttgctg

SEQ ID NO: 155714 - DNA, 1098 bp, Homo sapiens
atgacggggctagcactgctctactccggggtcttcgtggccttctgggcctgcgcgctggccgtggcttgttgggtaaacagcggaacggactgggccggcgggatctggctggagcgcttgctccctcggtcccgcctcggattcgggcttgcgggtggcgaccctgcctgcgcaggagtctgctacaccatttttgatttgggcttccgctttgatgtggcatggttcctgacggagacttcgcccttcatgtggtccaacctggggcattggcctagctatctccctgtctgtggttgggggcagcctgggggcattctatattaaccggctcctccattcatgtggtggaaggaagttgaaaggcccccagggattcaaagaccaagaacctgggtcagcatcatcttcttgtgaggctgtggccaatctacggcatcatcatgggcaattgttcattgagcaacatgactggagcctttcaagtgccacagaaccccaaggccatcggcaattcgggaactaaccatggcagggctactcccatggtttgggggctggccttcaccgtaagccttgtctaaacctcttctgtggaagtctgcgtgggcatcgtgggcacgtggggctgcccctggcaaatgcctcagaaccccacagcctctctttgtaaaagattctccatcgtggagatcttttggcaagcgccattggcactctttggggtcatcggtcgcaaattcttcaagacctccatgagtgaaagatgggtgactagatgatatgtgtggggtggggccgtgccgtcacttttatttattgctggttttccctgggaacagctggaggctgtgtcccttagcctttcagaggcttggtgttccagggccctccctgcactcccctcttgctgcgtgttgattttggaggcactgcagtccaggccgagtcctcagtgcggggagcaggctgctgctgctgacgactctgttgcagctgcgcacctgtgtcccccacctccaccctcaacccatcttcctagtgttttgtgaaataaacttggtatttgtctgggtcaaaataaaaaaaaaaaaa

SEQ ID NO: 155715 - DNA, 350 bp, Homo sapiens
agatgaagattcccttcatagtgttccagttgcacaaatgggtaactatcaggaatatctgaagacattggcttctccactgcgagagattgatccagaccaacccaaaagactgcatacttttggcaatccgtttaaacaagataagaagggaatgatgattgatgaagcagatgagtttgtagcagggccacaaaacaaagtgaaacgtccaggggaacccaacagtcctatgtcatctaagagaaggcggaatgctactatcattcacgatggccatgaggagaagatggaaaatggtcagatcacacctgatggcttcctgtcaaaatctgctccatcagagctta

SEQ ID NO: 155716 - DNA, 1935 bp, Homo sapiens
aatctgctgaaaacgcacaagtttattgttgggacaagatgaagattcccttcatagtgttccagttgcacaaatgggtaactatcaggaatatctgaagacattggcttctccactgcgagagattgatccagaccaacccaaaagactgcatacttttggcaatccgtttaaacaagataagaagggaatgatgattgatgaagcagatgagtttgtagcagggccacaaaacaaagtgaaacgtccaggggaacccaacatgtcctatgtcatctaagagaaggcggagtatgtccctgctgttgaggaaaccacaaacaccacctacctgtaactaaccatgtgggcggaaagggaccaccctcagcctcgtggttcccatcttatccaaacctcataaaacccacccttgtacatacagatgctactatcattcacgatggccatgaggagaagatggaaaatggtcagatcacacctgatggcttcctgtcaaaatctgctccatcagagcttataaatatgacaggagatcttatgccacccaaccaagtggattctctgtctgacgacttcacaagtctcagcaaagatgggctgattcaaaaacctggtagtaacgcatttgtaggaggagccaaaaactgcagcctctccgtagatgaccaaaaagacccagtagcatctactttgggagctatgccaaatacattacaaatcactcctgctatggcacaaggaatcaatgctgatataaaacatcaattaatgaaggaagttcgaaagtttggtcgaaaatatgaaagaattttcattttgcttgaagaagtgcaaggacctctggagatgaagaaacagtttgttgaatttaccatcaaggaagccgcaaggtttaaaagacgagtcctaattcagtaccttgagaaggtactagaaaaaataaattcccaccaccttcacaacaacattagtcacatcaacagcagatcatcatgttagtgcaaagaccagtgagaaaaaaatgacaagttttctgtgctgtaggatggaacaggatattgttgaagcctcctgggaatgtttgagtccaggggaattgctttccagatgctaagaagcagcagtggggcttttggaattttatgattatctggcagtgaaagctgggcttttgccttaataattttrrrakkgtatggaattgttttgttttgttttcctcaattgtgggaagcttgatgtttataattcacaggctaaattcggtaaacaccactscccctacckcgggtaatgagaggtcactcacttgaactttgccattccagacattctcagagtggcgaggggccacctgcaagtggagcacaacttggtgctctttactgtgtccttcagaaagaataggtgtacagaaaggaaatgggcaatcttatgtgtgctggaacaaagtttttcaacaattcctagttgtgcctttttaaaccatggcaatatttcagggatagtttgaatccaaagaagtaagaagctgcctatttggggtaaccttatttcctctgtgggaaggggcagggagagtcacccaaacaatcctacctccaactctcttctcttttgtcgtagagacattacaaagtgcacttgaggctgcccccccaccctctgacatttgttcttgcatgtgatgatagaaagtccttcagatggacttatacattcctgtgctttggaagcgacaagaagaacaaaatatgtgtatatttcctttaatgtttatacaaaagtttatatggagcagtattgttatgtttgtatgaatttgcaaaaattaaagtgtacaaagaagattttgattttgcagtatataaaataaatcattttattgattttcacaagttcattaatgctggataaatttctacttaaaaa

SEQ ID NO: 155717 - DNA, 2078 bp, Homo sapiens
  misc_feature (1)...(2078): n = a,t,c or g
aacccttttattcccaaattggtaaagaataaataatataatttacaatatggtacaaaaaataaccaggaaaggcaggcattctgctttatacatacactgtatatgcatatttataatctataaaacaaattcatatctgaaacgagcggaggcctcgctatggcttaaccgagtaagagagaaaaggggagcggggcgcgggaggcaaggccaggggctgggctccccacacctcacccaccccaaggacacgcagccactgtgacatcaggagagcgctgacagccgcgaagggtgtgctgtgggtttttttccttcgttgtaaattactctttccttgctttctttttttaacttgagacccagtttcgctcttcttgcccaggctggagtgcactggcgcgatctcgactcactgcaacctccgccgctgaggttcaagtgattctcctacctcaagtctcctcagtagctgggattatgggcatgcgccaccacgcccggctaattctgtacttttagtagagacagggtctctccatgttagtcagggtggtctcatactccccacctcaggtgatccgcccgcctcggcctcccaaagtgctgggattacaggcgtgacgaactgcgcccggcctccttccttgttttcttaagacaaaagtgctgtatttcctgacaaatgcatcggctagagctcaaggtttaaagagaaaacacaactgtcttcctcctccctcattcccggtgtcttatgccccacaactttctttgcagaagaaattttgaattcaatgctgtgatctaattaaagatgctattaaactaaaaaggttatccaccagaaatgaggccacggcctctcatgcccagaacctggaggtgcggcaaagcaaggaggccaaccgcggaaacgccgccaacaccccactccctgagctggcaccctacagctacaagacacagaaggacaaaacagccaggaagccacgaactaggcatcccccaaggcacgcaatgcccgcttatcactgcacatccacaacagaattgaggccagaggactaacttccctggaccacagatgctctgtcccaatctccagaaaagtcgaatcaacagaaagatcccaggcaacgtcagagggattcaggaaagctttttctaagaaactgatctcatcttaattacagcatgctcaaatgcaccaaaggaaagccacaggctcatacttagacgatcaccgcttctgttggaaaggcagaagatgcagggaagtctctgtttggatcttttgaaaattccagcctttaacagttgcctatgtttgcacataaatattcatttaggccagaagaaaatgtatccattgtttttctgcaacaaatgacaccattttcccttaatgtggcaagcaaatgccgtatcacctgtcctagttactagagaagcagaaccctcctagaactcttgtcagctttattacaggagaaggaggtaggcccgtccttcttccttaacccatctcccccnactggatggcaaatggcctgcagttggctgctcccccaggaatcctacgctggagaacccaagtggtaaggtgctgtcctaaagagcctacgaaagccagactctgacctcccaaaacttcaccccactgagttgtcaggggctaacaggtaccctgacaggcagttcacaaaccctcctgtcccctggcaacagtgcacacagctcagtgctgttgggacttggcatctctggtctaagcctgtgggagtatgagaaagctaagcagtggcctgaactcggcctggtatcctaaccctctagagacgcagcaaagccagatgcccagagggagatctccttgtcttctctggctcaatgagatgctaattttggaagctggtatacgtagcacaaaacacaagctagtgtaaagatgctgtagttcaaacactgctgtctctctcctaatcaagtggcatgtttcttttttcacccctaagaggtttgggactgtttgcttaagatctcatgtcaatgtctgaaggagggaagccagc

SEQ ID NO: 155718 - DNA, 1431 bp, Homo sapiens
ttttttttttttttttttaactgttacataaacktacgtkatktaaataaaaccaggaaagacccgtttcccccttacacaccagcacatgggcacacgcacacccacaccctccctccctttcggctgtctgcccatggccacctcaaaccccgaggttctcattgtgaccaacctccctcaacctgtagaccccccgtgcagagtccagttgcccacgcatcccaggttgctggcagaacatgggcctagaaaagagcactccatcttcctgggggtggggtcaaaaggaagggaactggttctcccaaggcacccagatctgggtgtgggcttccctacaaacttgggagcactgccagggcagctgggagctgctcccctgcggagggccagaaactttttcaccccaaggccaacccctccctgttaacaaagggaagttaaggagggttgggcagccaagcttccagtgtgccccgagggattcctgcagtaggtattttcagtttggggaagagcaagggagagcaattgagcaccaaattccctaaccccgtcctgcaggagggtgctgagtcagttcagcatctctctacccagaaaaagtaaacacaactgtgcagcaagagtgagggtgggaatgacaggggcctaagccttcaggacctcatgaacttcacccccaacatgggccctcttagggacccactagcaccttggcaatgttgaggacccagcccagcggaaacaccatacccacaggagccagtctgaagttggtgatgctccctatgttgacagtggggttgggtttctctccctgacaccagcttcctgcaggccctgtaagttctgctttggggcacacatcgcagagtgcctcaggtcatgaaagggaatgctgaagggaaaggtggtgtcttccggaggcacacagtacatcttacaggttacacacgggcaggctggagcaggacggggggcagggctcagcagcatacctagggtaccctccaaagttgccttgggaaggggggcggggctggaaaccaacgggaggggtgactgtccaatcccctccgacgggagtactcaggcccagcacccattttctctgatgagcttcccagtgccttctagaccaagttccctgagggaaaaagccaaacagatggaaagagagggagcagaaagggaaagcaaagggtcaatgccctgcagatcgtgatgagctggcaggcagaggcagacagagcgccgagggcgagccttctgaatgggtaaggcaaagagagccgcctgctgaggggaagggggaggctctgagaacgccagggcaggcacagaggactcgaacacagctggcctctcccagggaagcactggagaaggggaccttcgggaagacgaggccccagaggagagggc

SEQ ID NO: 155719 - DNA, 386 bp, Homo sapiens
cccacgcgtccgctcccttaaatcctcaaaaagacttaagatggaattaatagattcaattcaagtcccagatattggaggggttcaataaggttttaaatatttaaagtgtgttctgtgtaaattatttgaattttcctgaaatctagaccctttgcaaaaggacctatttgcatcttgtcccctctgaaaatggtgttcagtggattgcgtgtgttctgttataggttcactactgtgatagacaaagtggcaaagagtgtgtgacctgtctgacattagcccctgtgcagatgactttccatgctattggaagctccattgaagccagccatgatcaggcagccttaagtgccttgaaacaattttctgaacaaggactggat

SEQ ID NO: 155720 - DNA, 318 bp, Homo sapiens
atgggcccagggaaagggagacaggcaggacagcgacggcagtggaaccagacagctgtgaggaaaggacatacagcaatgacaccaagaggtggtgctcaagtcaccctggaggaaatggaggtgtcccagagaggcagcatttggggtgagccacagggagctggggcgcaaagccactcagattggctgcagccaccagggcgagtgggaatccaggacaccgcagccttaagtgccttgaaacaattttctgaacaaggactggatccaatcgatggagcaatgaatatcgaaaaaggttctcttgaaaagtga

SEQ ID NO: 155721 - DNA, 2402 bp, Homo sapiens
ggaatgaattttttggggaaggaaagactttacaagctgctagacactttgctgcaatgaaagccctccaagcactgcagaatgaacctattccagaaagatctcctcagaatggtgaatcaggaaaggatatggatgatgacaaagatgcaaataagtctgagatcagcttagtgtttgaaattgctctgaagcgaaatatgcctgtcagttttgaggttattaaagaaagtggaccaccacatatgaaaagctttgttactcgagtgtcagtaggagagttctctgcagaaggagaaggaaatagcaaaaaactctccaagaagcgcgctgcgaccaccgtcttacaggagcttaaaaaacttccacctcttcctgtggtggaaaagccaaaactatttttttaaaaaacgccctaaaacaatagtaaaggccggaccagaatatggccaagggatgaaccctattagccgcctggcgcaaattcaacaggccaaaaaggaaaaggagccggattatgttttgctttcagaaagaggaatgccctgacgtcgagaatttgtgatgcaggtgaaggtaggcaatgaagttgctacaggaacaggacctaataaaaaggccaaaaaaaaaaaaaagtgttgcagtagcaatgctattacaacttggttataaagcatccattaatcttcaggatcaacttgagaagacaggggaaaacaaaggatggagtgatccaacgcctgggtttcctgaaccaacaaataatactccaaaaggaattcttcatttgtctcctgatgtttatcaagagatggaagccagccaccacaaagtaacctctggcactactctaggctatttgtcacccagagatatgaaccaaccttcaagctcttttcttcagtatatctcccacatcgtatagttcagtctacattcgccaggcatctccttatgaatggaacatcttctacagctgaagccataggtttaaaaggaagttctcctactcccccttgttcctccagtacaaccttcaaaacaacttggaatatttagcaagggattcaaggctttcagggttcactactgtgatagacaaaagtggcaaagagtgtgtgacctgtctgacattagcccctgtgcagatggactttccatgctattggaagctccattgaagccagccatgatcaggcagccttaagtgccttgaaacaattttctgaacaaggactggatccaatcgatggatcaatgaatatcgaaaaagggtctcttgaaaaacaagccaagcatctgataaagaaagtggaccataaccaggcacccccgggctccatcgctcacgactgcaagatatcaaactcggccgtctagcagctcccagaacccgcggctgccaccgcatccttataaacctgtcagcacgcatgagggtgtctgtgttcagggaaatgaatgactaataccattatttgagtcttatgtgaagacaacactattctaacacgagagataatatacatggtactgtttattcaactggggaaaaataaaactttgagcatttcccttggaactcgagatcagatcataactcatttgcctagaggcagcagaaatctgatcctgctactggagcttaaaataacaagtaaagaaaagtgttagaaacaaagctaaaattttaacatgattaataatagagaagttgggtttggttctgttgttatgattgttttgtcgtggtgcttgtgttcagttatattctctctctctctcatttcaaatactgcttgacaattcgaaaatgaaccaatgatgtgctgtggaatgtgatggttgtcttcatatagagtcacatggtttctctttttatgcagatatttataatcttcatcctatatcagtaggaataactataaggtgcactacaaaaagatgtatgcaaacaaacatgttttaaatcaggtcagatatctgatgaaaaatacgaactaatgttaagagcaagtagtttcaacatactccaggaactgagaaacaaaacaaagcaattgtgggttttgagctcccatatactcttagcaaagtaaggggccgtcttgcccctatatatcatcttccccggattccactccctgttgtgggaatcgcgcccacccccatccgtgtgttgtagccactcacggtttgcatcaagagtgttttttgtaactgcctctggacttgggacagtgagtaggatcaaaaataaataatgtacatgacggggaagggaaaaacctgttggagttgcttccagccagccacgctccgggccaagcatgttggaatcccagcgtggagcagatgcagtaaaaatgtggttggttttctgtgtgaaaaaaaaaaaaaaa

SEQ ID NO: 155722 - DNA, 1024 bp, Homo sapiens
  misc_feature (1)...(1024): n = a,t,c or g
ttttgaagttcaacatctttaatcagaaaaatgcaaatcaaaaccacgagatatcaaaatatacccaatagaatggctaaaattaaaaacgctgacaataccaagctttgtcaagaattcttacaaattactggtgggagtataggcatttgcacaagtgaaaatatgttcacaaaaagacttgtaatttcatgcttatagcagctttattcataaaattcctcaaatggaaaaaattcaaacattcatcaacaggtgaatagataatcaaattgtaagataggcatatgacagaatactactaggcaataaaaaaggcacaagctacagatcgcatgcaacatgagtgaatcttcaaaacaaagaaataatgcatgccgagattgtctttctgaagaaattcccctcattctttgggatcccgaggttctcaaaggcatagctggcaacaggccctgaaacagcttcttctggactaccctactagtcttggtagatttcctcgatctttggcattccttcttttcttccatggtcttcatttactggctggtccttcttgcctatcttgaattattctatactattatgaggagaacacaggttcttccatcctggaacttcagttctaagccatgctgggccaatatatacattgagccagactgtgtgcacactggtagttccaaggtgccacaatcttcaaaacatttgaggagnnnnnnnnnnnnnnnnnnnnnnnnnnnnnnnnnnnnnnnnnnnnnnnnnnnnnnnnnnnnnnnnnnnnnnnnnnnnnnnnnnnnnnnnnnnnnnnnnnnnnnnnnnnnggaaacttgcaatcgtggcagaaggggaaacaagcacgtccttcttcgcatgatggcagtaataagtgttgagcaaaagggggaaaagccccttatacaactaacaggacttgtgagaactcagtatcatgagaacagcagtgtgggggtaaccannnnnnnnnnnnnnnnnnnnnnnnnnnnnnnnnnnnnnnaac

SEQ ID NO: 155723 - DNA, 1975 bp, Homo sapiens
ctggagaacccttgatatacatcatacgacatgtcatattctaaggcactgatagcatttctggcatttctgattattgtgacatcaataagccttgcttgtggttctcaccaacatctatgatctacatagaaagagatcctgcaatgtagatgaacagcaagagcttgttgaaaggtatgatgaaagcaacctgatgaatgtgcagccaatccatgcagatattatgttggagacttatcataggaggattgctagatgaaggaagacttttttctggctgaatttcagagcatcccgcgggtgttcagcaagtttcctataaaggaagctcgaaagactcactaaccagaataaaaaccggtatgttgacattcttccttatgattataaccgtgttgaactctctgagataaacggagatgcagggtcaaactacattaaatgccagctatattgatggtttcaaagaacccaggaaatacattgctgcacaaggtcccagggatgaaactgttgatgatttctggaggatgatttgggaacagaaagccacagttattgtcatggtcactcgatgtgaagaaggaaacaggaacaagtgtgcagaatactggccgtcaatggaagagggcactcgggcttttggagagtgttgttgtaaagatctaaccaagcacaaaagatgtcctagattacatcattcagaaattgaacattgtaaataaaaaagaaaaagcaactggaagagaggtgactcacattcagttcaccagctggccagaccacggggtgcctgaggatcctcacttgctcctcaaactgagaaggagagtgaatgccttcagcaatttcttcagtggtcccattgtggtgcactgcagtgctggtgttgggcgcacaggaacctatatcggaattgatgccatgctagaaggcctggaagccgagaacaaagtggatgtttatggttatgttgtcaagctaaggcgacagagatgcctgatggttcaagtagaggtatgttctaacctttagtgattattctcactttggttttttggacttaaatcttttccaagtgataataatgatattttttaaaaatccaaattcttcacaacctcaaacagtagatgatttcctgaaaactaaaacgtggtaatcaccagaaatacttagaagcatttttcattagtgcctaaaagtactgtggaagaaagatgaccacaaaatatataatttttaaaataatgaactactgttaacatatatcagattggcaaaaaaagtaaaaatgctgaaaatagatttggcatcatctcataaaattaaactgaagagacagaatagtatagtaatcaacagctggttttagaaactacacttacaggtttcaaatcttgcttttaattattaatacgagggtgagtggtattgtttattaagtaattttagtctgactgcacctcagttaagtcatctgtaaaatggagacaatgataatacctcacagacttataaccacaaaagtaatacaaataaagcacttaaacaagtccctggcccatgctatgcatttggtgattgtaagtgatggtaattactgaaaatgtctgtatttgacccagcaaaatcacatatatgcatatacccaagagaagcatcaactagaaacatttgcaagaatgtgcattgcattcagcattgtccaaatagcccaaaaaaaaaaaaaaaaaaaaaaaaaaagtgaaatacatatcaatgaaagaatggaaacaccgtaaatatgtatcaataggggaataggaagacaaaatgtggacatgtgaactctctgtacaacaaatgctatgttgtggtagaaagcaatgatctaggtttgtgtctgtctgtttggagagatgctcagatgaaaacaatgagtgagtaaagctgccatacgaaacattcaagatataatttatgtgattta

SEQ ID NO: 155724 - DNA, 1323 bp, Homo sapiens
atggaagattcgaggaaggcccagaagagggatactaaaattgaaagggaagagcagctctactggccatctagaaaaagcagagggaaaagcaaaggggacttggtattgcacactacatacaagcccagccatagtgggggtagagcagtaagtgggctcttcggttctccgattccaagtcttggctcttggacagcatttttagacccaccctgggccagagtagagcccattgccctgaagggtttgacccagcgcagtcctaatggtggtggacacagggtgtgctttgtcataccaccagcacctccagatggctcagaacagaaaaagagactctgttcattcagaagaaaagaacagtctctgcctggtaatctagagaattcttttggatcttgtccaagactatcaaggcagtacgtctatgagtctgcaagaaccacagcattaatgagattggggtgccctctaaagcagatacagcttatatcacaagacctaagtcctttcgaatatcgggaaagccttcccatgaaggacaagcaaaacaaacaccaaagaatatctttaagcatcaacaccatccaagaaactataatctctccaaatgaactaagtaagtcaccagggaccaattctggagaaacggagatacatgacctttcagatagagaattcaaaatagctgtgttgaggacactcaaagaaattcaagataacacagagaaggaattcataattgtatcagataaatttaacaaagagaattgaaataattaaaaagaatcaagcagaaattctggagctgagaaatgcaattggcatacagaagaatgcatcacagtcttttaatagcagaaatggtcgagaggaagaaataattagtgagcttgaaaacaggctatttgaaaatacacagaggagacaaaacaaaagaataaaaaacaataaagcatgcctgcaggatctagaatataggcttaaaagggcaaatctaagagttattggccttaaagaggaggtagagaaagcaataggggtagaaagtttattcaaagggataataacagagaacttcccaagcctagaacaagatatcaatatccaagtacaagaaggttatggaacaccaagtagatttaatccaaagaagactacctcaaggcatttaatagtcaaactcccaaagatcagagataaagaaaggatcctaaaagtaacaagagaaaataaacaagtaacatagaatggaactcatatatgtctggcagcagacttttcagtggtagccttataggccaggagagagtggcatga

SEQ ID NO: 155725 - DNA, 868 bp, Homo sapiens
ccgacgcctcatcgtggtgctttcggacgccttcctgagccgggcctggtgcagccacagcttccggtgggtcccgcgcggggttgggtgggccccagcgtagcacccacccccctgacggtcccgccccgcagggagggcctgtgccggctgctggagctcacccgcagacccatcttcatcaccttcgagggccagaggcgcgaccccgccgacccggcggtccgcctgctgcgccacagcgcgccacctggtgaccttgctgctctggaggcccggctccgtgactccttcctccgatttttggaaagaagtgcagctggcgctgccgcggtaaggtgcagtacaggcctgtggaaggagacccccagacgcagctgcaggacgacaaggaccccatgctgattcttcgaggcccgagtccctgagggccgggccctgggacttcagaggtggacccggacccctgaaggcggacctgggtgtccgggggcctgtttttggagagccatcaagctccaccgcacaccagtggggtctcgctgggagagagccggagcagcgaagtggacgtctcggatctcggctcgcgaaactacagtgccccgcacagacttctacttgccttggtgtcaaaggatgaatatgtagctcccaccccagagtggcaggatcatagggacagcgggggccagggcagcggcgtcgctcctctgctcaacaggaccacaacccctgccagcagccctgggaccctgccagcagccctgggaccctgccagcagccctgggaaaaggctgtggcctcagggcgcctcccagtgccagaaaataaagtccttttggattctgaaaaaaaaaaaaaaaa

SEQ ID NO: 155726 - DNA, 2755 bp, Homo sapiens
ctggctccggctgcgagcagggatgtccgcccgggcggtatgggccaggctgtgaacagctgtgtgggtgtctcaacgggggctcctgtgatgcggccacgggggcctgccgctgccccactgggttcctcgggacggactgcaacctcacctgtccgcagggccgcttcggccccaactgcacccacgtgtgtgggtgtgggcagggggcggcctgcgaccctgtgaccggcacctgcctctgccccccggggagagccggcgtccgctgtgagcgaggctgcccccagaaccggtttggcgtgggctgcgagcacacctgctcctgcagaaatgggggcctgtgccacgccagcaacggcagctgctcctgtggcctgggctggacggggcggcactgtgagctggcctgtccccctgggcgctacggagctgcctgccatctggagtgctcctgccacaacaacagcacgtgtgagcctgccacgggcacctgccgctgcggccccggcttctatggccaggcctgcgagcacccctgtccccctggcttccacggggctggctgccaggggttgtgccggtgtcaacatggagccccctgcgaccccatcagtggccgatgcctctgccctgccggcttccacggccacttctgtgagagggggtgtgagccaggttcatttggagagggctgccaccagcgctgtgactgtgacgggggggcaccctgtgaccctgtcaccggactctgcctttgcccaccagggcgctcaggagccacctgtaacctggattgcagaaggggccagtttgggcccagctgcaccctgcactgtgactgcgggggtggggctgactgcgaccctgtcagtgggcagtgtcactgtgtggatggctacatggggcccacgtgccgggaaggtgggcccctccggctccccgagaacccgtccttagcccagggctcagcgggcacactgtccgcctccagcagacccacatcccggagcggtggaccagcgaggcactagtagaggcagtcccgtggagcccgcctctccagtcccagccagaggggaccctggcctttggtgaccactgagaaggacacttcacgggcccagagctcctggtactgcccttcctttgagggccgtggagggctgtggacagcccagcaacctgtcgctcttggaggctggtgtggccttgaggagggaagcctcgcatggccagctggaagagaggcgcctcctggcctggctctgcagaacccaaggggcacgctctgggcctgggctgaggaagtcccgctctccccgcggctctgagttggactgaggacacggtgtgggcgccagtgtgggtgcaggcgcaggtgcaggcacagggccactgtcctccaggcaggctttttgggtgctaggccctgggactggaagtcgcccagcccgtatttatgtaaaggtatttatgggccactgcacatgcccgctgcagccctgggatcagctggaagctcactagtcatctcctgcccaactccccagaaaccctgattcaggtctgcaggctcctgcgggctcaccacggctgctggctccggtaccatgtaaacctaggaaggtaaaggagcaggcaacctcctcgtggcctgtgtgtttgctgtgttacgtggactctgtgtgggctcctccctggggcccggccagcataacggtgcacccagggacctcccagtgcacccggggccctttgcaggggtgggggtgccacacaagtgaagaagttgggactcatctcagttcccagtgctattgaagagaacgctggggctgcattcattaccgctgagacccagagactggctgttcccagagaatggcccagggggaggagggctggtgtggaggggcaacctggactgaggccgaactcccttgggctcaccccacccacccctacctgagcatcagcagtggggggagggcagcatcgcaggggcagggactccctgggtgaggacagaccagccctcccgagcacctggcactcatgggctgaggctgacttctcctggaagaagggcccagagtggaaggaagaggcagagggtagaggtggtggctgggggctcctctgcagagtggggtggccaatggagagggctgcactcacaccgcaacataggactctctctcccttaagaaggcccccttagggtctgggctgccgcccccatcaccctaaaaccagccaaggtagctgaggccccagggcagacaatttcaccagcaggaggaggaggagtccagtgagcttggttgctcacagacagcaagggagctgtcacagaggaagcttgatgaatggaccgctgtggggagactttaaagtagaacagtgataagggagggcaggatggtggggatgcaaaagcagcagccagagagagacgggacttggggtgcagacggagtgtggaaaacgcataccttgaaatgaagcatccagcagatggggtgagtggatacagctcaggagattctcccaggaatagcagggaggcgtaaagagagacaacgtacagagatagatgaatggaaatgggtaagggaggtgttcattcacatccatctaactgcaaaatacaaaagtaagaagtcattgacatgaagcaacgacgaccaagacgttctcagatctaaaggtgaatgatctcagtcagcctggaaatgcacaaggtggaaaa

SEQ ID NO: 155727 - DNA, 1054 bp, Homo sapiens
attcggcacgacggtgagagactgcagaaggtatgaataccaggaaacagataactcagaagcatctgggaaatttgccatggaattaatgaagaaaagccctcagcacatcatccttctactctaatcaatatgaaatagcattcagtaactcctattaattcactctgaagagaaaccttttgaggacaatctgtatggtaaagctctcagctcgaattctcaccttcatgggcccagaagattatgtactgagagaatcctgaagaatggaacagctgtagaaagccttcagtgctatcagcagggattcatgtgacagctcacactaagggagaaaacctgtgaaggtctcagaaggcttcagtgacagtcatcccttaagacacactggaaatcacacaatggaacaacactcagaaatgcggaataccctgcagcaaaagtgttcacattactgagcaaactatagtgtggtattctgcagttgactatgggaaagccttgaatgttctatcggtttttaaggggacttgagaattaattctggagagaatgccccatttgaacatcatcaatattggagagctttctggttttctacatttgttaaggaaacttgtgaagcattcacactacagagaaacttggaaattttaagaagaagagaaagccttcagtgatgcctctgtgttagggaaaatatggaacttctccctggatgcaaaacctatgagtatattaatattggaaaatttttcagtgattcttctctttcttgtatatgagagaacttacatggagaaacccctaggaatgtaatcagtgttaggatgcctcagcctgaactcttcactgagtggccacaattttcacttggaaccaaaaagtataatcactgttttgagtgtgggatatcctttatccagtgtctcatctgtagattggactgctggctcattaatttttttagtctttttttcttttaatataaacatttgtgtatagctgttccctacaataaacattaacatatttcataaaaaaaaaaaaa

SEQ ID NO: 155728 - DNA, 429 bp, Homo sapiens
  misc_feature (1)...(429): n = a,t,c or g
gaaatagaggatctgaactaaaccataacccagttataccttacttaacatctatacagaacacttcaccgaacacctcctgcatacaaattcttctcaagtgtacatgaaacattctctaggatagaccatgatgttagagcacaaaacaagcctaaatgagttttaaaggttaaagtaatataaagtacctcctnnnnnnnnnnnnnnnnnnnnnnnnnnnnnnnnnnnnnnnnnnnnnnnnnnnnnnnnnnnnnnnnnnnnnnnnnnnnnnnnnnnnnnnnnnnnnnnnnnnnnnnnnnnnnnnnnnnnnnnnnnnnnnnnnnnnnnnnnnnnnnnnnnnnnnnnnnnnnnnnnnnnnnnnnnnnnnnnnnnnnnnnnnnnnnnnnnnnnnnnnnnnnnnnnnnnnnnnnnnnnnnnnnnnnnnnn

SEQ ID NO: 155729 - DNA, 429 bp, Homo sapiens
cctcccccacctccattcccactaatcccggattagggctgacactccaagcccgctctcgcctggacagctacagcttagtgctccccctcctgcctctgccttgtcctgatatcactctgtcctacccagggaggagaccagttcttggcctgtcgcttatggattgagaagacactggtaataacttaatcatgtccagcattctgtctgaaaagtggaattttctgtccaattgagacaataactcctcccattccaagttttaccccacctttgtattttaagatggaaagaaaccctaaactcttctaacccagccccttctccaaaaggggagactgaggcccgggaactggaggaatttgcccaggtctgcgcattggtggctgcaagctggtccctggggggaagcaagatcaacttggg

SEQ ID NO: 155730 - DNA, 1196 bp, Homo sapiens
gagatagggttgcctataatggagtgcagtagcttgaccatagctcactgtagcctcaacctcccaggcacaagcaatcctcctgcctcagcctccaagtagctgggactacaggtgcatgccaccacgcccgacttatttttttttcctttttttttttttttttaatagaaacagggtttcaccatgttgcccaggctggtctcaaactcctggactcaggcgattcaccagcctcagcctcccacagtgctggggttacaggagtgagccaccatgcccagttaaaaatacactttttatttaaaaaaaaaaagagaacactcctttatatttcctttatatttttgaaaactacataccccaaaataaagcatatcaaaaactgtaaaaaaaaaaaaaaaaaaaccctaatatcagatattccagacacaacaataccataatttaatcacttaaaatcttactcaaaactaaatcaatgatcttttaggccaggtgtggtggctcatgatagtaatcacagtactttgggaggccaaggcaggaggatcacctgaggtcaggagttcaagaccagcatggccaacacaatgaaaatccatctctactaaaaatacaaaaattagccaggctaatggcacactcctgtaataccagctacttaggaggctgaggcaggagaatcgcttgaacctgggaggcaaaggttgcagtgagccgagatcatgccactgcactccaggctggacaacagagcaagactccgcatcaaaaaaaaaaaaaagatattttaatatattcagatacacaaatatgaaataaaactaagtagagctggtattcatttacacataattatcttataccgtttggaataagaatttggggcacgttagcaaaccaaaaggctcagaaagacgtcgtgatatttagttcttgtctccctctacaaatgtgaagcactcttctatccggcattcttaagtggagttcctattttcaaatttgcaaaccattctggtgctaagcaatctcaaaaaaaccatttattaaaacccaaaggaaaaaaattctaataccttggggaggttgaagccaaaatggatccacttaagttccaaggaagccttgaagacccaggctgtggccaaccaataattaaaccccctttttttttaaaattccaaaaattg

SEQ ID NO: 155731 - DNA, 397 bp, Homo sapiens
ggggagccgccgggttgagcctatccgctgcggggagggcgggacttcctgcgcgggggcccgagccgctcagtctccctgctctccgtggtcccggctcgcgtgtagcggcggcggcggcgtctccgtgaggaggcgcgcggggccatgacgtcagcgtccacaaaggtcggagagatcttctcggcggccggcgccgccttcacgaagctcggggagctgacgatgcagctgcatcccgtggccgactcttctcctgcgggcgcgaagtggacggagacggaaatagagatgctgagggctgctgtgaagcgatttggggacgatcttaatcacatcagctgtgtcatcaagggcccagataaaggccactgtgaaacgcaaggtatatgaagat

SEQ ID NO: 155732 - DNA, 338 bp, Homo sapiens
agtctcatcttctctgattctctctcttctatctcgggtactaacacactggcagcctttctgagctggatgctcccttacatcccttggatactccaagcacgccctgccttgggccttctgcacttgctattggctgcctgcaatgtcgttggccagtcagccacatgacccagtccctcacttcctttgggtctttgctcaagctcacattctcagtgaggccttttctgacctccagtgtttaaaatctcaccccttatcacagacaaccccaacccctttgaccttcatctgatggacatttttatacagaaaacaataaagatttccctctc

SEQ ID NO: 155733 - DNA, 466 bp, Homo sapiens
ccactgtgaaacgcaaggtatatgaagattctggcatcccccttccagctgagtcacccaagaaagggcccaagaaggtggcatctggtgtcttgtcacctcctccagctgcccctcctcccagcagctccagtgtccctgaggccgggggtcccccccataaagaaacagaaggctgacagcctgaccctggattctggccttctcatgacctctgctgatcctcctctcctctcctgctgagccttccacctctgacctctcactgttcatgccggacctgtggatctcctgggactccgagcaaggcctgcacgagagagggctgaaaggctgctggggctgccacctcgctattcccgcataagcatctgcccccaacccctttgaccttcatctgatggacatttttatacagaaaacaataaagatttccctctcaaaaaataaaaaaaaaaaagttttg

SEQ ID NO: 155734 - DNA, 925 bp, Homo sapiens
  misc_feature (1)...(925): n = a,t,c or g
cgagccgctcagtctccctgctctccgtggtcccggctcgcgtgtagcggcggcggcggcgtcatccgtgaggaggcgcgcggggccatgacgtcagcgtccacaaaggtcggagagatcttctcggcggccggcgccgccttcacgaagctcggggagctgacgatgcagctgcatcccgtggccgactcttctcctgcgggcgcgaagtggacggagacggaaatagagatgctgagggctgctgtgaagcgatttggggacgatcttaatcacatcagctgtgtcatcaaggaacggacagtggcccagataaaggccactgttgaaacgcaaggtatattgaagatttttgggcatccccctttccagcttgagtcacccaagaaagggcccaagaaggtgggcatctggtgtttttgttcacctcctccagctggcccctcctcccaagcagctcccagtgttccctgagggccgggggtccccccccataaaagaaacagaaaggctgatgtgacacttcaggtgctcttgaacgacctccgatggccaacagtgacgtgggtggatatttgaagggcttaggagaaactccctccagcttaagaaattcaactttcggaccaggacagcctgacccctggattctgggccttcttcatggacctctgctgatcctcctctccgtctcctgctgagccttccacctctgacctctcactgttcatgccggacctgtggatctcctggggactccgagcaagngcctgcacgagagaggggctgaaagggctgctgggggctgccaacctcgctattcccggcataagcatctgcccccaacccctttgaccttcatctgatggacatttttatacagaaaacaataaagatttccctctcagcaaaaaaaaaaaaaaaa

SEQ ID NO: 155735 - DNA, 1316 bp, Homo sapiens
ggtgcgaaattccagagaacaagaagcgttcccaggacgacagggcccgggcagctgaagtgtctcgaggataaagtctcacggctggaaacagagttagatgaggagaagaacaccgtggagctgctaacagatcgggttgaatcgtggccgggaccaggtggatcagctgaggacagagctcatgcaggaaaggtctgctccggcaggacctggaagtgtgacaaaatctccttggagagacagaacaaggacctgaagacccggttggccagctcagaaggcttccagaaagcctagtgccagcctctctcagcttgagtcccagaatcagttgttgcagggagcggctaccggctgaacagagggtgaagaccgttctgcggtctaccaatcgaaaactggagcggaaagttaactaactatccctccagattgaagacgaacgtcatcatgtgagtgacacaaacagaccagctaagcctgagggtgaaggctttgaagcgtcaggtgggatgaagcaaaagaggaaattgagcgactggacggcctgagggaagaaggcccagcgtgaggtggaggagcagcatgaggtcaatgaacagctccaggcccggatcaagtctctggagaaggactcctggcgcaaagcttcccgctcagctgctgagtcagctctcaaaaacgaagggctgagctcagatgaggaattcgacagtgtctacgatccctcgtccattgcatcactgcttacggagagcaacctacagaccagctcctgttagctcgtggtcctcaaggactcagaaacacaggctcgaggcctatcgccagcaagtgctgctctgctctgcccaccctgggttctggattccttgaggaccacgagctaacaggagctggtctgtaggttgctctccgtaagcagtgatgcaatggacgagggatcgtagacactgtcgaattcctcatctgagctcagcccttcgtttttgagagctgactcagcagctgagcgggaagctttgcgcctgactcagagagaagaataatggttggggaggggaaaatagaaatattaagacagccaccctttttgtacaaaggaaaccccaattcttctaaggcctaaagtttattcacaaaatccccaactaatcagatttggggaggtacaggatggtggctgagatactaataaataaatatactggcttccaaccagaaacaagtgactacacagtaccatgttagagattctcctccttatccagcacaggagagaccattccctccctgctctagtgtccctatgg

SEQ ID NO: 155736 - DNA, 5511 bp, Homo sapiens
caccatatttcaatatcacgatttaggagggaggcaagtataaagtgtagaaatctgaattatggaagagatttctttttttttcataaagaaatgccactttattattttcaagtagataggtagtacctcaaactaatgtcttacaaaaggtcaccaataaagatcctgtagatgtttctttaacaaatacataaagattgatgataattagcccatgcactcgctgcttctaaaaggatatttctaaagtgcctgaaaagtattgtttttggtagactaaacatgccacctctagcaatattgtttatgctcttaatttactaaaaaaatgccatttttattgattgtgcaaagataaacttttgtccacagttagtaatctccaattaatcggatccaaattaatattgtctcccacttagattcccaggcccaaggcaatgactcccttacttccttgcttctgataaagcaaaattccagtgcaatgaaatgacagcctttgggaggtggtttatgggtctgacccaatgcttgtcttttgtgcttccttcctgtctgccttaggtcttccattttcctcagatgtctttctcacttgcatgacctatctaggtctctctctacaggacattcccagtgccttctaagccaggcttagagaatgggcaaggctgcctgcagagcaaaagtgttagatagggagtaagggaaagaaagctatctcctgtaggaacctgaaaccaactctccagcccagggtaagtgggcacaatgatcgtcggtttgaagggcatttgcctggagggaacagccctgccacctaagacgtcaaaagcaaatcattttttttttttttgagatggagtctcaccctttcgcccaggctggagtgtaatggcacgatctcagctcactgcaacctcttcctcacaggttcaagcaattctcctgcctcagcctcctgagtagctgagattacaggcgtgtgccaccatgactggctaattttttgtacttttagtagagacagggtttcaccatgttggccaggctcgcctcgaactcctgacctcatgatccacctgcctcggcctcccaaagtgctgggattacaggcatgagccaccgcacccagaaaaagcaaatctcttagtatttttcctcttgtccaaaggttctgaccatgttcatgacctaagcttgtccctggaagcatacatgtccctgggagacaggaaggttcagggaacttctccaccctgattctagccaatggccagcgaactccttttccagggttggcttggcagtgtcggggaatgatgcaggttcatcgggatgggcatgaaaagaaagggaatggaagaggctgggaaagaacttgtggccatccctttcagaacagcatggagctctgaggacttagtattacagaaggtgaagtgttattaagtacatgagtgacatccggaccttgtggactaagaggacccctaaccaagggtcagcggggaactctgtggcacacaagtgtggcatttctggaagctcttgattgccttctggtcctgcctctgctgctaccctgatgagatctgagtttgttctgctggtggggtattctaaaatgtgggacgtagagctggagtccacgacatctatctggagactcatgtcaaatgtcctgtcattggcactacctcacttcctttgttgtttccttcctccagccagccctacctccatctcccacctgtctgcccagctctccctgaaggtcccttaccagcctcgactgggagacaagtccaccttttccagtctcaggctcttgcactcaccagaagaaccttttgtgattgcaaggtctgaaggggaagccagggatagagtcctgcaggaagctaacgggggtggaagtgggaaatggagtgaggctggggtgatctgagagggcttccttctggtttagatgggttcctgcttttggatgctgatctattacagtaggaagtggggttgaagggatgggagtgggcagggtggggtaacccttaattcctcagaaaaaatagacaacatagtggagtgggatggaaaaggatctggtcggggggactctaacacatagtgtctaatctgattgttcacagttaggtctatggggtcatcaccccaatttatataccccgcaacttagcctgctgagttgcctcattatctctccccaaatgttgccacccaatgccacccgttatttccatccctctccatcaccatccccacaacacctccagagctccccatctttccatgcctggttcttcttccaatggggtcagtagtatgtctccttctccacccagccaccaggataccgccgcaggatgagctttcggacctcatcatagatgaagatgaggaggctgtaggggaaggcgcagaaccaccaggtgactttgagcgggtacatgcggagggctacacccatgcctgggcagtaagagagaaaggcagccaacgccgtctcctccaggagcccaaaaatcaggatcttgttcttcatgccctgctggaagactgagttgcggcgggtcttgcagatgatgaggtcagcccactgcaccaccacgatgctggcaaagaatgccgtgtggcacgtgaactccaccaccttccgctgctcataggtccactcctgtccatagctgtcctccagatcattcatggtccggtcatcccagtcgaggcggattcccagtagccgtgatggcaggaaaccgttctctgccaggatcacaaagtaggtgaagaagccacccagtgcctggatcatcccgatctgtccgtaggccatgctgatgagcctctcattcaccagcttgtccgtctgggagtttcgtggctgccgcttcatgatatcactctcagctgcctcataggccaaggagatggcagggaccatatctgtgcccaggtcaatgcaaaggatggtcacagtgcccagaggtagggggatgttggcaatgatgaacagcaggaagggggtgatctcggggatgttgctggtcagggtgtaggcgatggatttcttcaagttgtcaaagatcaggcggccctcctccacccccgtgacgatggaggcaaagttgtcatccagcaggatcatgtcggctgcctgcttagagacgtcagagccagagatgcccatggcaatgccaatgtcagccttcttcaatgcaggggagtcgttcaccccgtcacccgtcacggccacaatggctccctgcctctgacatccctccacaatgatgagcttctgctggggagacgttcgagcaaagacgatctctgtgtggttcttgaggatctcatcgagctgctccgatgtcatgtccttcaggtcagagccgtgcaccacgcatgccttggcttctctggggttgacttgactcatgggaatgttgagccgggctgcaatgtcctccacagtctcgttaccctctgatatgatgcccacgcctttggcaatggccttggctgtgatagggtgatccccggttaccatgatcaccttgatgcctgcgcttcggcacttgcccacagcatctggcacagcagcccggggagggtcaatcatagacatgagccccacaaagcaaagcttctccgtgggaaagttcagctcatccgtgtcgaatttgaagccccgaggaaactttccagatggcagattcagttgacagaatcccagcacacgctccccaagtccccccagctccatgtaggcattttgaaaggcatcttgcatctccttgtcgagcgggatctccttgccctgcaccaggatggtggagcaccggtccagaatgcgctctggggcccccttcatcaccagcacgtggctctgggggctgtcttctcgctcgtggatagacagctggtacttgttggtagagttgaaaggaatctctgccaccttggggtttctgtctctcattttcctcactgagccacaggagagctcaatgcacttgagcagagctgactcagaggcatcaccagctgtgtcccgcttagacacggagatgttctcctgtcctgccttgaagacggcgcggttgcagagaccagcaattcgagacagggccgtccacgtaggggatcgtttgtcaaaagtggccccagactgatcttcggtggtgtcagcctcatggatttggttgtcgaaccacatgtgggcgacggtcatgcggttctgggtgagggtgcccgtcttgtccgagcagatggtggacgtggagcccagcgtctccaccgcctccaggttcttcaccaggcagttcttccgtgccatgcgcttggctgtcagggtcaggcacacagtgacagtggccagaagcccctcaggcacgttggccactatgatgccgatgaggaagatgactgcctccagccagctgtagcccaggatgagggagagcacgaagaaggagacccccaggaatacagcgacccctgtgatcagctggatgaagtgttcaatctccattgctatgggtgtccgcccaacctccaggcctgaggcgagagtagctatgcggcccatcaccgtccggtctcctgtggcaatcacaatgcccctggcagtgccttcaacacagttggtggagaagaaacagatattgcgggtctccagggggttctcatgggtgaactcgggggagcgggtctggggctccgactctcctgttaaggatgagttatccaccttacagccatgagaagagatgatccggaggtcagcagggacgcggtctccacccttcacctccaccaggtctcccaccaccacttcctctgcgttgatctgcatcttctctccctcccggatcacaagggcttgctgaggtaccatgttcttgaaggaatccatgatcttggagctcttggcctcctggtagtaggagaagcagccagtgacaatgaccacagctgccagcaccacacccagatatagattgtcgttggatggttcatcctccatggcagcctggatgccgtaggccaggaagcagaggatagccccaatccacagcaggatggagaaccccccgaaaagctgacggcagaacttgacccactcaggggttgtgggaggtggtgtgagggcgttgggcccatctcgagccagaacgtcctgagcccgctggttggtgaggcccttggacaggtccacttggtatttgcggcccagctcatccaaggacagcttgtggtcatccattgccacctccttcttcagctcatccagttccttctccttctgtttcttcttgccgcccccattctctgccgtggtggcggcaggtgagtactcacggccagccccacggcccatcttggggcagagtggctgagggaccttagcgggagaggtcaccaggaggatcccaagcccacaccagcccgtctgggacagtcggagaccctggcagacagaga

SEQ ID NO: 155737 - DNA, 526 bp, Homo sapiens
ttttaatgatttagaaaagctttattgtggggacatgctttaagaatcagctctgtatttgtgccaaggagatcaggtattggtgtgcaaacagatcccattaatactctgatttgaaccatgaattccacctactctgcgttgaagccctccagtagactgatagatgtaatcaaatgatcagctaccaagtttaattcctttgcctgtgtgcagcaacagttggtagttttacaagttaagttgatggtctggcttagaacacggaggttgtttgacatctttaaatggatgatttaactgttgtgaggaagagaagttcaagaaaaagccctgctttgtgagtttcttggaaggattggagagagggtaggtgaaatgccaggaacatattccagacactcattaatagtagctgctggggctctcagagcagataaactccgactcccgcttgagaaaagaactcaatcattttatcttgtttttggagcaactaacttgcccacctcacagcagggaaagg

SEQ ID NO: 155738 - DNA, 6501 bp, Homo sapiens
ttttttttttttttttgtatttttagtagagacgggtttcaccatgttggtcaggctggtcttgaactcctgacctcaagtgatccacctgccttggcctcccaaagtgctgggattacaggcatgagccaccgcaacaagccaggaaagacttctaagggcaggtgacatcaaagagcaggtgacattaaagccaaagctagaatgataagaagcatgcagtgatctatagtgatcggggggaagaggcatctggtagagggaacagcaagtgcaaaggccctgaggtaggaccaagcctcatcttttgacagtagggaggaggccagtgctgttggaacagagtgaactggggagagggtgggaagggaaggcacagttgggcaggggcagattgtgtggagtttttcgggctgctggaaagaccttttcttttcttttttttttttttttttttttttttttgagacagagtctcactttgttgcccaggctggagtgcaatggcgccatctcggctcactgcaacctctgcctcccgggttcaagtgactctcatgctttagcctcccaagtagctagaattacaggcacacaccaccatgcctggctagtttttgtatttttagtagagacggggtttcgccatgttggccaggctggtctcaaactcctggcctcaagtgatccgcccaccttggcctcccaaagtgctgggattacaggcgtgagccaccatgcctggccccaagtatgaatattaaataccactggtggtgccttgaagccctttcccatggggattgaagaaaaaccacagttaagactcaaagtaggggacaaatagcttggttgtaggccattgacgtgatccctgaaagattgtttgaacaatgttacccacaaccatccaaacttattaggaaggataaagattttctaaagctatattgaggtgaagagaagagactattcctccaactcaacgtggggatgaaaaaaaggtaaaaaccagagtttacaaaaattcacttttaatattcaaatgaaagcaacccccttctcctgcctctctgaacatggccagcatttcagacaccctaccacctcccaggctctggctgcctgataaaaaaatcccaatttttgccaaaacctcaaataccacaaaacactaaaagaacagatgtgagcaacttatttaagttctacatttagtagctgatggacacataaggctttcaagaagacactcttctcttcacaacatattaaataagtcctagcacaactgactgcttccaaaactaccacccaagcgtgccaccactcttggctgaacagaaactcttcctcatgacaagggcactatgctgatttcagcagaactgaaggaccacgactctcccagaatatctgtatttttacctctcagacttctcctgcaatgtcctaatgatcatgtaaatagtcttcaatgagaaacaggacatcaaaccttccaaacaggcagaaaatgctctgctaataccatgggagagggtgatcagtttttggcagaacaaaatggcatcaccaccttagtactgaaattagtaggagtaatagaacaatttctcctcaaatataatggctaggatcatacctaaaacccactggcctctaccatgagtgaaagaaaaggagacaataggcttgattgtacaatcccctcagtatacgtgtgtcaggtacacagagaaaagactgctaaccagtaacgtttcaatactaagagaagctattaatgtggcaaacaaccaagaggtaatatctagtttctaggtttaaaaaaaaacaatatatatatatatttataataaagttttaaatacaaagtgctttttatatatcgagaatgatacagtgttgtgaataaatccctgtttgtaatcttgcttacaagagttaactggtaaataagtattttctttcctctttccagacaatgttcaacaagtaaacaccctggtgttaggagcttgagaatcagaggccattgccagcaatgtctattacattacagcaaagccaaacttttcaaataaaatttcaccccaaatccaagaaaaattatttttattttaagaaaaaaagtttctatttagaagtaaataacccagtacgattgtggaaaagatgacatggtagtagcaccctgtcctaccctggtgataacctcaggtatgttacacagcttaaaagcatgtgcaatattacctttctttttaacctaaatcatctaactgatgggcagaaaaggtctcagaatagttgcttttcttgtttgtttttttaattttttttttctggtcggcgtagctttgtggacttttaagtttaagcagctttatctataatgtgggagcatggttctgtagactaccttgctaaacttaggactccttttacaaacacattccagtgctcataaagaactggtagtattagctcagtgtaccctctaaagagtatctcccccaccttgaaagagtgtattctcaagattcttcttgggcagttttgtcccccttaagtataaccactcatagaatcctgcctatctgccctctcactctggttggtggagtgtcaccttagcactctatgaactactcaagttcacagggaactctcagccacaacttgtggctccttctcactaagtgtggtcatggaccactctctttgtaaagcaccataatctaagacagagcaggggctgtggcagcccgtggtaccgtggtcagtcacagcagcttggtgtctaccagccacagagaagaccccactgtatggaggctacaattaaccaaacaggatttgggaaagcaaaccaatgagaaatacctatctctggcaccctagagaattacaattagataaaattgtccaaactcaatgttagaactaaaatacaaaacactgccttatcaagagtctgaaacaccttgtgacagtagtggcatcttacagaaactgacaagggcactatgtcagccttgtaccgtaaattatctgtttcatatttagaaagtcactctcttagcatctccatagttttagttaaaatatcctttagaaagactaaaaccagacaacagagctctgttaaccaatttctcatcctaggaatcacattatttctagcttttatataagtagcacttccttcagtgaaatagctaccaaaacaaatccacattacctaagtatctatagcaagagcaaaataaaatttcagcatgaccttgtaataatgagtgatccaaagctgctgccacccaaaatggaactggtgggtggagtccagttccaagtgcaggtgtctctgtccacctgtttcgatcacaaccagtcagaaggtttcccttgccagctgggcggtgggttaactcaccccattacccattccaggccaggactggaacacacaaatttgaggaattagatttttttaattggcctacttagagctggtctttcagaaatatcttcctttttttttttaagcttctctcataatagcaagtagcacgcatcatctgtgcccagatttgcattaattaccatagtttatttttgtgcatgccactcaagggccagatcctatttttagttagcctcagttgtattctgctcagcctttgcagcttcgtaggacttagtacaagaagtcacatgccggtggaaactgtccctccacataaacctctttgcacagatattacactcatacggctttatgcctgtgtgaattttcatgtggcccacgagatggtgcttcattttgaatttcttaccgcagaccccacagccgtaaggccgaagaccgaggtgcatgctcatgtgccgatctctctgactcttgtgagtgaaacttttcccacactgacaaggatacagcttgtcagtggctgagaatcctaagtgggaagcttcttctttaatccctgttaccatttcaatattctcactgtaacctgctgcgagggcagcctcctgtctgtgcccaattagattcccatctgacctctctccggaaaactcttccatggaagagccatagaaatccacctgctcatcataattgctttcatcagcctgttcatcaaactcagcttccactttcttctccccgatgtggaagtcctcctccactcccgaaggctgcaccgtgtgctctgtctgcacggtgttgatggactctgtgacctggtgctcgtcgtaggtcgcgtgcacatccatgccctcgcaagcctgttctaagcgctcgggcttcacgtggatccagcgtttgtgagccatgatgctgggcttgctgtacatgggccgggtgtagtggaactcggcgctgtcgctggcgccctcctccccatcctggcttgccatttccgtgctcaggcggtcatgctctgtggacgagttgctgggcaggtattcgtgctcggtgagctgggatgacagctcgtctttggtgctctcctcttcattttcaccatctctcagttcttgggctttgggaaaatcagtatgacccccagagcccagctcaaagctctctaccaggccattataactactgctgcttggtgactggtggtcactgccatgatttagcttctgacaaaggactgtagggtttccctctaaaacttcagtgcatttgtctaccacatgccacatctggaggaagcttgccgctgtcaagtaactaacaatttctggagcgggcattactagacgtcctgtataactagataggagaatgttctcaaacactcttgggttcatcacatcaggcaaaacaattctcctgctgtttttcaggagtacctggtcacaaaagtagggtgaactggcagcaagaacggctttgtgtgcccggaaaatgtggccttggacaacaatggagacgtcacataattgtccttgctggcgctgctggttcagtttctgtagaatggtgctggaaaaatcaggaaattctacccgaaaagagtttgttccaggctccatttcatcacaaatcttgttcggtgctacaagagaaagaaaaattagtacaaattccagcccaaagataaacttattttatcccctcctccattgttaagacaagttccaaagttccacaaagtcctctagcctatgggccccactgggtaagggattcaatccctagagcaaagcttgcaggtgcgtgtttgccaaaggcaggactcaccaccactccttgtggaactcctgattttggttctgtgtctgtgggtaagagaactgaatccatagggacaagatttgtaagctatacaaatctcccaagtaaaaccaagtactgtaaatatttacagttaaaacaaacaagatacccattcaaataatataatttttttttaaacgagatggggtcttgctctgttgcccaggctggagtgcagtggcacaatcatagttcactgcagccttgaactcttgggtaatcaagctatcatcctgcttcagcctcctgagtagctgggactgtatgtacatgccaccatgtccagctagttttttttttttttttttgagatagagttttgctcttgttgcccaggctggagtgcaatggtgtgatctcggctcactgccacctccaccttctggtttcgagcgattctcctgccttggcctcccaagtagctgggattataggcgcccgccactacacctggttaattttttttttttgtatttttagtagagatggggtttcactatgttggccaggctggtctcgaactcctgaccgcatgatccaccccgcctcggcctcccaaagtgctgggattacaggcatgagccaccatgtctggctgattaattttttttttaactgtaagagtttgatcttttcaaatgtgttcagaaactaatttggattctttgattctagtatctcaacgtggtttatttttagattctgataagtgaaatggatgtccttgtggagctctggcctccccagcttatctatcagtcctgctgtcctcacctccttgcctctttccatgcttacccttaagccaccatctttctcaagctagcgtgtgtgtttctagtgtagttgggccctccaatattcaaggggtccagcatgtggtgcttgtagctgtgtctccgtagagctcagtaaatagttcttagaacacggaggttgtttgacatctttaaatggatgatttaactgttgtgaggaagagaagttcaagaaaaagccctgctttgtgagtttcttggaaggattggagagaggggaggtgaaatgccaggaacatattccagacactcattaatagtagctgctggggctctcagagcagataaactccgactcccgcttgagaaaagaactcaatcattttatcttgtttttggagcaactaacttgcccacctcacagcagggaaaggtttgctg

SEQ ID NO: 155739 - DNA, 688 bp, Homo sapiens
gatcaagcgattctcctacctcagcctcccaaatagctgggactacaaggtgccctccagcatgcctggctgatttttgtatttttagttaaggtgaggtttcaccaatgttggccaggcgggtttcgaaatcccttgacctcaaaatgattctaacccactcagctcccaaagtgctgggattacaggcatgagccacccacaaccgtcccccactattttactttttaaaatgacattccctactgattgatttttatcttgctataagttcgatgacacccgtgaatctaataaggttcactgctgacacagtacaagttacatagctaaaatacatagcattgaagactaattttaaggattgacaagagtttattttctattgagcaatatcttaaaggaagcaaccacctttgggaaagtggatctgctgctcctacgcccatgcttgtatacatatgtaaataaacatattcatttaccctaaaaaaaacaataaaccaaggatggggccccggtcttaaagaatccctaggggggcgaaactttgcttgaatgacatgaaaaattttttccttatggggaggcaattaaaagctgggggcgtggcctcttttttaaacctagaaaggggaaaagcctaggcctggggatcttttgaaagaaccatttcttgtgggggggg

SEQ ID NO: 155740 - DNA, 543 bp, Homo sapiens
tttgtgtacaattcaataatgtttattatgtgtaattgaacattcacaggaaatttatgcttctatattatcattaacttttgttgttcttgttgtcatttttgagatagggtctcagtctgtcacccaggctggagtacagtggttaattcacagggtttcactcgcagccttaacctactgggctcaagtgatcctcctgcttcaaccctccctgtgtaagctgggaaccacggggtgcatgccaccatgccctgggctaattttttgattttttgtaaaaatcaggtctcactttgtttgcccaggctggtctcaaactcctagggttcaagcaatcctcccatcatgggcctcccaggcgtgctggaatttatggggtatgaggccactgcccctgcgtattattattaacttttaaaaatgtatgtcacatatgccataatcatttccaactctttcaaagttttttttaaatttcagctcaaaatattagaatgaaatgcacactcaagactaaagaagctatattctatgttcgag

SEQ ID NO: 155741 - DNA, 1077 bp, Homo sapiens
ttttttttttttgagacggatctcactctgtcgcccaggctggagtgcagtggggcgatcttggcttactgtaatcttctgcctcccaggttcaagcgattctcctgcctcagcctcctgagcatctgggactacaggcgcccgcaccatgcccagctaattttttgtattttcagtagagacggggtttcaccctgttagccaggatggtctcgatctcctcacctcgtgatctgcccgcctcagcctcccaaagagctgggattacaggcatgagccacttgcgcctggccttggttttactttttaaaaatttctatgaagctgctctagaaaactaaaggacgaaaactttactgtcataattccaagttcagtcagggatttctcagaattgaggtgtgcagcatccagattcccctttatgtggatagggatccctgtgccatgtcttgcacttacctaagaactataggaattctccatgtacctcctacagtttttctagcagtgttggacaatggattctaaaggttcctggagactttgttaaatttctcataattccagagggaaggccaaaatattgagaatactcaatgataggatgagtttccactctacttccttatcctcaaggcacacaccagagttccactgggtgaggacagggaagtaggatgtcccacccccctctgagggttttcatgcattaatcccgccatatggggtgatggttggacctgcctttagttctctaagtaaaggtctaaaaatgcacctgtggtttctgaacttgggtatacgctattacataagcactaccatagaagttacatgccttaatcctgtaatacttctgtgtggtatcattctgctaatatattgtccacagggccaaaccccaagttacgcagcgccacagtacttgtcagccactccatctcctcagtgacacaggtgataaggtacctctcccctgaggcaaagtcccgacacatctgtggtaagtgcacatacccagaaatgggcagattttgaaagtgaatgcaaaaaacttaattccgtacgcgtggg

SEQ ID NO: 155742 - DNA, 882 bp, Homo sapiens
ttacaattgaaactctgggaattcaaaattaacatccttgcccatgagcttcttatagacaccagaaaagggttcaaccttgtgttccacattgttctgctgtgcttcgtccaaatgaatctttatgaggtggctgccatccagtttcacgtggattctcttgcccacaatttcgcttgggaagaccaagtcctcaaggatggcatcatgcacagctgtgagagtacagctcctgggaagcttttgcttattgtttgtacagcttttttgagttggcttaggcagaattctccttagctggacttgggttttctggaaagatttcagttgaggaacgggaacaaagattatgatagctttccgaccaccaccaacttcaatttccttggctgccgtaatattcagctcccagagctgagccttgaggtccaagttcatctccagctccagaagagcctgggagattccggattcaaactcatccggcttctcgccattgggcttcacgatcttggcccttgaactgaacatggtcttctccttgctgagcgctgtgttggtgaggtttgttgatgagtcccataacattgtgtctagttgatcttcttcctcttctccttcttcttcttctccttcttcttcttcttcttcttcttcttcttcttcttcttcttcttcttcttcttcttcttcttcttcttcttcttcttcctcctcctcctcctcctcctcctcctcctcctcctcctcttcttcttcttcttcttcttcttcttctttttttttttttttttgagacagagtctcgctctgtcgcccaggctggagtgcagtggcgccatctgggctcactgcaagctctgcctcccaggttcgcgccat

SEQ ID NO: 155743 - DNA, 1990 bp, Homo sapiens
ctctaaagggaaatcccaaccttctttggtcttgtagttttgaacagggagggtatcctgtattacacctccaatacggctcagtcttaggaggaagcattcaaagtcttccagttcagatgccaaaaaaaccccattcctggccagcttatctaaaatttcattcctcatgtagttgttacaggaagtattctggttaataacatcaacagtcagaaggggccatttgttctgctgaagtgaagcataactatgctgggtttgaaattctccaatccataagataatgtttaaccaatcatggcgagctgtgaggtatctccagagggcttcaggggaatatgatttgtattctacatgaaaaaaaacacattttaaaatataattaattatgtctattgacatgtaactcaacactaaattactgagtaaatataacaatctggacatagatatttatacaatatattaattattcaggtcctctgttttactattttcctttttttgagacaggatctcgctgtgttgcccaggctggagtgcagtggtgcactcgtggcagcctcgacctcctgggctcaagtggtactcctacttcagctgcccaagtagcagggactacagggatgtgccatcatgaccaggtaaatttttttttttttttttttttttttttttttttttttttttttttttttttttttttttttttttttttttttttttttgagacagagtctcgctctgtagcccaggctggagtgcagtggcgcaatcttggctcactgcaacctctgcctcccaggttcaagcgattctcctgcctcggcctcccaagtagctgggattacaggaatgcaccaccacacccagctaattgttgtatttttagtagaggcggggtttcacaatgttggccaagctggtcttgaactcaggtgattcgcctgcctcagcctcccaaagtgctgggattataggcgtgagccaccacgcccgtccacccaggtattttaaaaaatatatattctgtagagatgggggtctcactatgttgctaggctggtcttgaactcctggcctcaagcaatcttctcatctcggtttcccaaatttctgggattacaggtgtgagccaccgtgcctggccacattgttcattttataatcaatgctacagccaaagaactagatgtagcttctaattactctggtggttaaaatgaaacttacgtattagctgtaccattccctttcctggttcaaccctttttttcccttctctttcccttaatgtaaataaaaactttgtttcagatggggaaggatgaaaagaaaaaaataaattaaaaataataaacaaacaaaaacttcagccataatagtaagccagaattttactctctgaattgctactgtttaccactgttagttatgacccagatcccccatatcagatggcatagatccccaatttacacaagaagctcaagactatttgaaaaaacagattgtcactttgaagctggaatgaaaactcagccttgaaatctcaattaactattgggtgcttttattagcacattataaatccctcccagaaactctgagataagaaagagatcttaatgcaacgacttgcattttaaagaacctgaatattatttcccgaaaggaattctaaaattgagacacatcaaaatattcaaatatcaatacccaatttaatcctcattcagtatgttcatatttcaggctctctcacacttgccttctggacttatcctggggagaaggatggattcttgtgttagttgatcccaccacagagcccaatttaacacaattctatggtcctgtttgttaaattcatctttacaatcatatttcaggaatgagtccaaaacagacttgtgcttgaaaaaatcttgttcctttatccagtacctaaaaacagtgatataaatttttttttttttaattttgg

SEQ ID NO: 155744 - DNA, 806 bp, Homo sapiens
gagacagggtctcactttgtcacccaggctggagtgtagtggtgcaatcttggcttactgcaacctttgactcccgggctcaagcaattttcccatctcagtcccccaagtagctgggaccacaagtgtgtaccatcatgcccagctaattccttttgtactttgggtaagtgaagaagagtttccactatgttgcccccaggatggtcctcaaactccctgagcctcaagtgatctgccccatctcagcctcccaaagtgctgggattacaagtgtgagctactgcatccagcctgcaattggttttgactgcacaagaaaaaacataaaaaggttccatgaaccttttataacctcttataattgttacggttttatttctttcctcatttttctatgtccaatcagttttaggtccttaaaaaaatagcagagatagtgtaaacctgtctaacaaatagacccagaaaaatatctaaattaaattcagaaaatgtttctattttattttaccccaaattttaaactatcttcatttaccacagattactaatgccctgtgaacttgaaaagcgtttgggcttatttacttaatttatgagtactaatttatttatgtcaagttggtaccatacaggcaatctataaacatagacacgtatccataaaatataaacacaaataaatactttatatcattttttctttttttgagacagagtttcactcttattgcccaggctggagtgcaatggtgcaatctcgcctcactgcaacttccgtcgcccgggtaacagagtatcac

SEQ ID NO: 155745 - DNA, 851 bp, Homo sapiens
  misc_feature (1)...(851): n = a,t,c or g
ttgagacagagttttgctggctggcccaggctggagtgcaatggcaccatcccagcttactgcaacctccacctccttggctcaagcaatcctcccgcctcctcaccacgcccggctaatttttgtagttttagtagagatgaggtttctctatgttgcctaggctggtcttgaactcctgagttcaagtgatctaccaccttggcatcgcaaagtgctgggattacaagcgtgagccattgtacctggcctaacattactcatttataaaacatcacgttgacccaaaaaaggccttcaccttaaaaaagcaaaaccaaaataatcctttgactgtgtattaatgagaattttcaacccagccaccatttttatgagttctatgcttgatctataaggtcccggagggcagtgctaagtattttcatttccactgggcacttaacactctggaactatctacgtggcaaagtaaattcgtgtgggaaatactgatgttataagcttttcatagaaggcaaagggaacttgaaattagaaaaccccagaaacagtcacaattgctaagctcacttcttcatctaaaaaggatgatttagactaaatcactgttactcaaactttagtcattctcaaaccaccttcatggcttttgccacattcatgcgcccctataatattatatattattatgtattttaaatatcctgttatgcaccannnnnnnnnnnnnnnnnnnnnnnnnnnnnnnnnnnnnnnnnnnnnnnnnnnnnnnnnnnnnnnnnnnnnnnnnnnnnnnnnnnnnnnnnnnnatcatagccgtcattatgtcacagcacaacttattactt

SEQ ID NO: 155746 - DNA, 821 bp, Homo sapiens
ttttttttaattaacttgactttattgatagttacagcacaatttattaattaacttgactttattgatagttacagcacaatctgtccaaaaccaccagaatatacattcttttcaagagctcaaatggaacatttaccacaaaagaccatattctgggcttcaaaataagcctaaataaatacaaaagcatttaggacctatgaatcagaagactgaatatgcacatatacaaaatgagaatcattctctcacatacaaaacttatataggtagtaaagatacagttgattaggtagatttgaatgttgaatcactgacatttcctgaaggtagagctacaaattacttttttaaaaccactaaccccaccccccaccttaccctcacttaccccttttttggcccttacccaccctactttagtcatacccctataccatgttactccggacccaaatggctctcataaacaatctcagtatatgtgggttgctaagtctatgaccattccttcaaccatttagcatttccttggtgcttgcacagtttggacatcttacatgcaatctaggtaaaggaaaacgggaaacaaatttgtgagttaatgttccagaggtcagagaacatataatatgtatggtaaggaaaatgtatagtatgtacaaaaaagataaatattaatgttttcaagatcatttacttatattctgataaagttttccgtgaacggcaaataggacaaaaatgactatggtaggattaaaatcataaaaaggcatggtcaaatgaactttcaggtactgaacctagatactgat

SEQ ID NO: 155747 - DNA, 1128 bp, Homo sapiens
agctgctggagcccggtacccactcagctctgtctgatgccctctccatagcccagctggagccgtgaacactggggtcccctggcagagtcctcatgacccatcctgggctctctgtccagattgcagcaaaggagtgggcgtggctctgtgtccagggccccagggtctgctcctgctgaggaccagctgtggctgggccaggacagaggactcaaccctgctcctcccggtaggccagctgccgagccgggctatgttctggaacccagtgaatcttgggggccaggcactgtgctaggcaccagcaggggtaacacgaagaagacccggcccttagggcatcaggaagactagctcccctgccccggaggatctgctcagtgctgatggcagcccagctgtgtggactcagggggctctgagggctagggaaacaggaagggcctctttgacaaggtaggagctgtgcttggaggggcaggaaaagaactgagcatgtcgcaggcagcgggcccagcctgagcaaatggcaggatgtgaacttccccatcgcaaatgcagttctcagcccactgcagtggatacaaggaagggcctttttcggggccggagaagagaccaagagaccaggcccgggcagcagcctaccggccacgtggaacactggctccggagttattctctgtcaaatctactccccggacctcaaccatggcaagaaccagaggtccaaagaggcccagacccaggtccttgtgctcagtcctgcggcaaaccaggcccagaccctgcaagcatttgttgatgcccttgcaggcccactgggagaaagatgcctcaggcaggtctcagcctgggggtggcaggggtggggcagagagaatactgacagcagaggtcttggtgggctgcacgtgcctgcgaagatgtggtggacaaggaggctctcgggctgggccttggaggggtggcagcggaaggacagcccaggtggctgaggcctgatgggaagccggggaaggccagggtggaagggcggcttgagggacgccaggagaagactgaatgccaagctaggaaggaggcggctctcgatcacggggtgggtgcccccgacaccgggtc

SEQ ID NO: 155748 - DNA, 523 bp, Homo sapiens
  misc_feature (1)...(523): n = a,t,c or g
ctgccttcaattttaaaattagtgatacaaagaaggagggaaccatgcagattcctttgaagatggtgattaacaacactactgcattcatctccacagaggtacagcaaaagtgatttagttagcgataacctctaattctattttttttatttttattttttgagacagtcttgctctgtcaaccaggctggagtgcagtagcntgtcttaactcactgcaacctccacctcctgggttcaagcgattctcctgcctcagcctcccaagtcgctgggattacaagtgcccaccaccatgcacacctaatttttgtgtttttagtagatggggtttctccatgttggccaggctggtctcgaacttatgacttcaggtgatccgcccggctttgggctncccaaaagtgctggggattataaggcgngaaaccttgttgcctgggcctgtaacctctaaattcttcgtttgctggctgtcctagagatcctgagaantacttttaataaaatcanttttttg

SEQ ID NO: 155749 - DNA, 2141 bp, Homo sapiens
ttttttgtagagatggggttttaccaagttgcccaggctagtctcaaactcctggcctcaagcaatcctctcaccttggctacctaaagtgctgaacaaccacagagaagcactctatttttccctctattacattagcaaatacacagaaggacaatttagaaacagattatacccaggaacaatatgtcaggattacttatggaggtatttattatttttatttatttttgagacagagtcttgcactgtcatcaggctggagtgcagtggctcactgcaacctccgcctcccaggttcaagcaattcacctgcctcagactccatagtagctgggattacaggtcgtccaccaaccatggccaattaatttttgtatttyyygcgtacagacagggtttcaccatgttggccagggatggtctcgatctcgttgacctttgtgatccgcctgcctcggcctcccaaagtgctgggattacagggcgtgagcacccggcccctgggacttacttatgggagggttttaaaaaatcttttaagtccagggcctgacgtttaggaggaagggttacaaagggcggccaggatctgagtatttccaaaaagctcctggaggcagcatttgaggtttcctttccagttgaatcacttgactttaagtcgactggggtacctttgggtttttttgggccattttttgggggtgtgggaagcttttctcacagatttactaggagtggtgaaaaaacttggcctctgggctttttggagtctgtctcccatcttttgttccccaccgaaggacttgattcctttcactgctcttctttgatttttggcttcttctctgggcttttccctgcggtctcaaactctgcagcttttggggtctcagatgctggcaaagcctttcttttcttcccacgaggtgtgctgggattaggactctttgctggagacttctttcctgtggcatgtttttgaatctctactttttcattagctggagtcttctttcctattggtaccagctgtgggatttcgtcttcggattcatttgttgctttaacttgggcttttcctctgccacgttttttcttcccatgctctggggtctgttccttctttgattcaggtttcttcactgtagtatcaccactttcaggtgccacatcatctttactaagaactgatgcagtcttcctagcctgctgcctcttcttcttcctctccttttgtttttcaaaatttctttctcttcgttttctccttgcctcttttttcttcttattaagcaaagatcttttggtggcttcatcccaattgctgacaaacgaggaaaagatgggaagtgcagccgatttctcagttttcacaaacaggagtttcacgctctcccacttctctggcaatttttctgaaagtcctttggtgacagcaacaatgttttcaatgatgtgctcaatttgcattccaacgtgaccaatacgtatagcactgcaagaaccacttttagaaatgtttaagaccgttccacctatacagtcattgatctctcttgataaattcttggacagaaggtttacagatactggaactttctttctttgatagaaatgtctcccaatgagtgagggtaagagccgcctaattctggcatcagtaaggaagaaatcaaaactgctcagaaggcggagcttggcttcataggatttatattccttctttagagtttggagggagataatctgagaaacggttttaattccatgcttgtttaaaagctttctataaaactgttctgtcttttcaggagttgaattgggttcatccttcgtaaataaacagatatcttctgaatctgatcgaatactatgaggcaaggtcaatctgaccctcagttctttacttggaattttccataataccaccattaaaaataaactttcattctcattcaaaagcaacccataattgtttttcctggacttgcaatgcgtcaagagagcgtccactgcctttctaacctgttctttatccagctgcttccgtgctgtcggggccgctggagtcgaggtggaggttccagtagcggctgcagaagacagcgaggccgaggccgaatcctccatcttgt

SEQ ID NO: 155750 - DNA, 394 bp, Homo sapiens
cttgaaaggatgtcttttggccatatccagactaaggaagacatcctacaagagaatacgatttttattgctactgaagtgcagatccagcctaatccagattgaacacctgaagctaaggcgtttatatcgacgatgcttgtcctaccgaaaggaggaccgaattgatgtccatcagctgacctgtgatccctacttgatgcctcacatgcgaatgtcagtctctacatgtagccctgctggagctgctattgcatctacctctggggcttctagtagcagttcttctaattgagactgacttcaaggctcactgcgtgttcatcacacacaaagtggacaaatggcgttcagcagcgggtttggaacatagcgaatccgaatggatctgatg

SEQ ID NO: 155751 - DNA, 745 bp, Homo sapiens
gaaggaagccttttggccataaccagtctcagcaagacatcctacaagagaatacgattcttaaagctactgaagtgcagttcccgccaaagccagtagtaacacctgaagcaaaggcgtttattcgacgatgcttggcctaccgaaaggaggaccgcattgatgtccagcagctggcctgtgatccctacttgttgcctcacatccgaaagtcagtctctacaagtagccctgctggagctgctattgcatcaacctctggggcgtccaataacagttcttctaattgagactgactccaaggccacaaactgttcaacacacacaaagtggacaaatggcgttcagcagcgggtttggaacatagcgaatccgaatggatctgatgaaacctgtaccaggtgcttttattttcttgcttttttcccatccatagagcatgacagcatcgattctcattgaggagaaaccttgggcagctccggccaggccttgtaggaaaaggccccgcccgaggttccagcgtcaacggccactgtgtgtggctgctctgagtgaggaaaaaattaaaaagaaaaactggttccatgtactgtgaacttgaaaacttgcagactcaggggggtccctgatgcagtgcttcagatgaagaatgtggacttgaaaatacagactgggctagtccagtgtctatatttaaacttgttcttttcttttaataaagtttaggtaacatctcctgaaa

SEQ ID NO: 155752 - DNA, 1249 bp, Homo sapiens
  misc_feature (1)...(1249): n = a,t,c or g
ccacccctcatgacacagaatacttgagccactgatttttcatttctttttttttttttcctcggcccctcctcagccacctgagttgctctatctgcaagcctgactctgccagcctcccctggtagagaggaggtttacccactccctgcacgcctgccgtccctgccccgctgggagccccttcaagtgtggctggcgttgggggcagtgaagttgcctctttcccctccttggtctggccccaagtggtctggggaagcccccaggcacacctaagcgtcgtggagcattgttctgccacatgcctggaatactgaccccgggatgcctggggccaggtggaccaagcccccagccaacccaccttcaaccctagccctgtcccccccaaggatgggtgaaagcttcagccagggggtctgaggggtaagcccggcccagaaagaggctggaaccctccctgccctcaagtcctagacccccctaccttctctgctgaccccaaaccctgcccagagcctgatgtttcccaatacccaagatgtctttcacagggcacagcccttgcagagcatctttgggtcatttggaagaggacacggtatccccctctggcccagagtatgtcagagaaggaagagtagggctttttttgttttgtttttttttaaaggtgcttgcttgtttaatgtaaataatagaaagccttaatatcttttctgtaacacggagtaatattttaatgttcatgttttggatgtacataatatatttataacaaagcagcaagagtctacttaaccttggctgcctcgtggtgtttcctggctgggtgcgggtggggggtatcaaggagcctgggaccgtgaggccccacctcctcgccccattcccaagctccccccaaccctggcctcaaggatgagaagctgtcacctgganacaagtgaattaaatgttgacatcctgctccaaagccttttggaggggattgggtgaggacagtggtctttcctgttgatcaatgatgataaagtaatgatggctgatcccctatttgtgacttccttcagcaaatattcactggcacctggtgtgtgccaggctctgtcctgtacacaggtacagcggtgaaaggaccaacaaagacctatcctggtggagctgacctcctgggaaaagagtcaataaacaaataaatgcacatgaaaaaaaaaaaaaaaaaaaaaaaaaaaagtcgtatcga

SEQ ID NO: 155753 - DNA, 574 bp, Homo sapiens
  misc_feature (1)...(574): n = a,t,c or g
gggggtttnnngggcctcgaccggctgtggtgaagcggcagaacaggcaggttccctcgacccaggaccccctgttcccaggctatggcccccagtgccctgtagacctggcaggccccccgtgcttgcgacccctatttgggggtctgggtggctactggagggccttgcagaggggcagagaaggcaggaccatgacatctagggcctctgaactttctccggggcgcagcgtgacggctggcatcatcattgttggagatgagatccttaaggactggacctacagagacatctgggattttctgcgtcagctgtttgtcccatactgtatcctgtatgaccgaggatacacatcactggggagtcgggagaataccgtgcggaacccggccctgaagtgcctgagcccaggaggacaccccacataccgtccagcctatctactggagaacgaagaagaggagcggaactcccgcacatgacctcccaccctaggagggagggaaggacaccgtcctagggtataacctggcaataaaccgtgcctctcactgtgaaaaaaaaaaaaaaa

SEQ ID NO: 155754 - DNA, 741 bp, Homo sapiens
ttttttttttcacagtgagaggcacggtttattgccaggttataccctaggacggtgtccttccctccctcctagggtgggaggtcatgtgcgggagttccgctcctcttcttcgttctccagtagataggctggacggtatgtggggtgtctgtcacccaaggctggagtatagtggctcagtcaccagttcactgcagcctccaacctcctggcttcaagggccaccccagccttccgagtagctgggactacaggcgcgtgccaccacattcagctcattttaaattttttttgtagaaatggggtcttgccatgttgcccaggctggtgttgaattcctggtctcaagtgatcctcctgcctcagcctcccaaagtgctggaattataggtgtgagccaccacgcctggcctgctttcttctttctgtccccactgccaccaagcaggtccttagcacctttcacctggacaatggcgacagcttcctggccaggctcccagcctccagccacagtgctttgatgtctccggagtaaccgttttaatgcgtcactgtgattgcatcactcttggactcaaaagccatttgttgtttccaactgtatacagaagaaagttcaaattcctttgcagagtatttggggctgtctgtggcgtataccctatcttcttttccagccccatctccctctaattgtctacaaagggtttagtggttaagggtctgtgttctgat

SEQ ID NO: 155755 - DNA, 399 bp, Homo sapiens; identical to SEQ ID NO: 114110

SEQ ID NO: 155756 - DNA, 1608 bp, Homo sapiens; identical to SEQ ID NO: 120530

SEQ ID NO: 155757 - DNA, 716 bp, Homo sapiens
ttacatttctaccagcagaattatgataatcccagtgacttcacattcttgacaacacttggcattgtcaattcttttaataatattcattctaatgtgtatgtagtagtgagaggtgacagcgtgctggcagtcctcacagccctcactcgctctcagcgcctcctctgcctgggctcccactttggcggcacttgaggagcccttcggcctgacactgcactgtgggagcctctttctaggctggccaaggctggagcccactccctcagcttgcaggtaggtgtggagggagaggcgcgagcgggaaccggggctgcctgcggcgcttgcaggccagctggcgttccgggtgggcgtaggcttggtgggccctgcactcggagcagccagccagccctgctggccccactccatgggctcctgtgcggcccgagcctccccgacgagcaccaccccctgctccacggcgcccagtcccatcgaccacccaagggctgaggaatgcgagcgcacggcacaagactggcaggcagctccacctgcagccccagtgtgggatccactaggtgaagccagctgggctcctgagtcgtgaagatctgcagcttcactcctgagcccagcaagaccacgagcccaccgggagcaacgaacaactccaggtgctaccttaagagctgtaacactcacggcgaaggtctgcagcttcactc

SEQ ID NO: 155758 - DNA, 963 bp, Homo sapiens
atgtccaagaatgaccccaaaagattttcaatgaccagttctatggttaccaacctattgggccacgtcatagacatcaagtggatgagcattgcctttatcaatgacagggcttggccatcagcgtttgtgtcagatgagaatcatgcaaggatccagtgtgatgggcagcatcgcttcgaggtcagtgttagtgagctgcctgatgagacagatgtctcctccacggttctggatcttgaccatcagggcctgggccccccaccccctccagcagagcctgatccactccagctgctgctccagcaactctttggcttgggccagctcagctgtgtggtggggccagggccctggaggggcctgtcttcagccagggacaagcagaacattatggtcagcatcatccacaaggtcaagaggccacagagccccctgagggcagtatactggccccttcgatattgtatcctacccagcaggagggccacagtgaactagatctacttggtgtgaactttgaagtcctcacctctgcttgtcacctatcaggctatcaggatgaactgataaatcagctgaagggagcaaagtcacagtgcgtgagaattgttttggagatttactcaggagcccagctggcttcacttagtggatcccgcaccggggctgcaggtggagctgcctaccagtgccgcacggtgcgcttgcattcctcagcccttgggtggtcgaatgggactgggcgccgtggagcagggggtggtgctcgtcgaggaggctcgggccgcacaggagcccttggagtggggaggagatttagcattccttggagacctgaagggatgcagtgagcttaagagtttccaagagcttatcaatcagtcagcccttgttcatccccgagaggatgtgtggtggtatcggggtggacctttactgggcactctgctgaataactag

SEQ ID NO: 155759 - DNA, 905 bp, Homo sapiens
atgaccattcgatttagcaataaggagatcaataacgacctcagggagggcagtatcagcaggaggatcgtagaagttaaagacttaaaacaaactttggcaattaagacaggataccaagattcaaatgcctggttggaatggatcaaatattccatccacacgttaaacaaaagcaattgttatgcttgtgcacatggcaggccagaggccctgattgtccctcttcccactaaggtggtcctccagttgaccaggcatgggctgcagggtagctattttccaggattctacggcctggagtaacaagttgtgccaagctctctctctgctatatctcaaagtccagcaccctgcgggtcagcccctgagggccgtccagcttccgtctcccaacactaagttcacttcatgtctctcatggcagggaggagacttagcattccttggagacctgaagggatgcagtgagcttaagaattttcaagagcttatcagtcagtcagcccttgttcatccccgagcggatgtgtgatggtattgtcgtggacctttattgggcactctgccgaataactagagtggcacttgtgctttagcctatttggctatccctttcaccctggcatttcatcaaccagaggaaggaaaaaaaaaaataataagacatcgtaaagcgagagaagccccttatgggtctttcaactctcacatctatttagatgcaatcgaagccccgcaaggaacaccagatcaatttaaagtccgaaatcaaatagctacaggatttaagtcaatattttggtagatgacagtcaataaaaatgtagattagataaactgcatctattacacccaacagcaatgagctaaaaatgagttgaaaaaaaaaaaaaaaaaattcc

SEQ ID NO: 155760 - DNA, 5907 bp, Homo sapiens
ttttttttttttttttttttttttttttttaaacttgcaatgtttgtctttattttgttctttatattttcaaagtgaaaagaaatagtactgagtcaatttctttttgtttttttaaatatttgttctatgtatttacaagccttaaagttgctctaaagatttcaagagatattaagagtacttttctcagggtagcactttttttttttttaaacaattcttgggagttctgtgggtccacagcatttccttctgtttcaatgttatgtatgttttgattactattgtgatttttttaaaattttctgaagcaagctgagaggcaggcagaaatgatttgatggccaaaaaaaaaaaaaaatctttcttaaccttggttcaccccaaactttctcaaatctgggactaaatggctataccttaaaacaaacatgaggtgacatcttgaaggggagggaaattttcattctctgcttttctattatacaagttgtttacagaaactgcaaattaaaaaattacactggcatttgcagtccttaaaataaattaaaagttctcaacttttttttttttttgctaaacatttttttaagtatgagtccttgtttaaaaagaaaagattaaaacagaaaatattttctataaataatacatgtattttggttttagtgctcccgccctaaggtttgaagtttacttttatccagtacctttttcctccatgatcacctttttttctctttcccctctcccactcgtgcacacgtgggggtttctgcgagaattggccttgctgcactgtgattgggcgaaggacgtgaaactttttaaaaaaaatacttaaaattggttcttttgtttcattttgtgtatttgaagttttaggttatcctcagactcctcttctgcttcccgcaggccacgtgaagaatgccgtgacaggatttcagaggccacggcccttcccattctgctctgcagggtccttgctgctctcccatttgtagaaggcatcctcggagatcacctcctcgtcatatagacaatcaaaaaacatccgcagcaaattggcagggttgatcaagttttactatcgatgcttgtagtgcataaagtgcttgcagttccttctctgtatctgagtctaggtacttgagtaagatcggcactctctgcttgataacagcagtgtccactctgaaggtagaagagtcggctataatagctgctttacaaacagcagtcattaaagctctaaggaatgtaggtgaactcatctggatttcgtctagattagcctctacccagtcaaagatctgttcatcattcgctttgtcctcaataatgagtttctcgagtcgcttatacagctcttcggcagacagttctttctttgaaagtgcttcagaggaacagggactgtcagactctatgaagtccaacttctgctccaaaagaaaattatgtacatcttctccttctggtaaaaagtccttccagctgaggtcagcctccctccataaggctcccactttcttatggctcatttgtttgcatagtaggtgcaatatttcagatagcaagaccccagctcttccaacaggaagtaaaggtttgctaaattctatggtaagttctctcatggagattccaccttcttttaacatgggggtcaccagttcagcaaggtacaaccaaatatggggaatatcaatggccatgtcatctgccaattccaaagtttctgaaaaacctttgaaaaagtcctgtttgctgagtttttctgactgtaccagctgatagagtagttggcccatgtgatccctggtgatctggctcctttccagggtggactccactcccactctcacaaaaacatgtagtaggccctgggcattcagctcttccacacactgcatggcttccttaaaatcattaatgtgtagaaattcatcaatgatagatttcgacttcctctccagttcctcttctgataatgcagccttgtcatgagctgacattgctgaaatttctggttttgctgactcccttgttttatttcgctcagcctcagtgctgttcctctccacatccacacctcctgtgagctgcttcacggtctccagcatctctctccgctgctcttcttgagactgattgtctagcaggtctttactgctgccacccctcatgaaagtatttggccgagctgttgcagatggaaggggcttgtcattcttctccctgcccatacttccacgactagttaaggtccttcgggaatcaaactctacaggcgtggatggcgtggaccctgagggtgctggaggttgcagggcagagaatctgtttaaactggaagcacttgaccgtaaggcatcagtctcacttgcctttgctccaccactgctgccttttccccagctgcctagctgtgctttaggtaccagctgaattttttcatcaattgtaggcttagtgatttttaggaattttgaggggtccagtacccgactgttcttggccccttgtacagtgttccacccaccttcgtccactctctggacacctggtcttctcttctctttggtcatgagttgctggaccttcctttgctcttcttgttcttctattttagcctctttgtgaatctgttcgatagttttaggcccttgatctgctcttcgagatacccaattgcacagccttaggtctataacatcttgaagcatgaaccgaatcctagatgaggtttttctttctttcacaattttctccatctgattaaagtactggtccatacgtggctttgctttttcaaagtccaagtctttgccaatggtggtgagcaggcgacacaggcactccagggattcttcatcatggttctttagcagcttcaccacacagtcatgcatgatggcttcagtcagcattttgagtttaaagagttctccaataaacttgatgttgcccaatggatctccgccgggctttgtccttggcttcttccagttcatcatgaagccttgtccttcctctggagcactggcagcctcaagttctttctgcttcttctcaaagacatcatcatctgctttatctttttcaaactccttctggcaacggttcagtagcagcttccggaaattcactgtgttaccaggcttgtctgccatgggtactttcagcgttactagacatcgacacatgtttgcgtaacgcacagagaaactgggttcatcaatagccttctcaaagaccaggtcaataactcctttcagccgctcctctgtgtcaacagtaagtcctgacacttgcttcatcagttgattgaacatctgtggtgtcaatttatttaagatacttcgaacttttctaaaaagctcctgggttttaatgttttcgggatcatcggcttggctgtctcgtttttggcttggcttccaggcattttctgcctttttcaggtgtacatcttcttttacagaaactgtgatgatctttctgggttctcttctttggccaggttgagatcttcgtgacccaacattcaacaaaggtacgcctcttccaccaggtgtctgccttccaaaatcagcaaaggctggtgtaaagtctggtcctcgaggcaaaattcgaggatccagagttcgcattggcaatttgggttggttgatcttgtcaagaaccacatcactgataggaggcaggccctctggtttttgtatacaggcaggcatgaactggaagtccagcagaaactccctgtcatactgcttcttaccttcagtatcagtaggcttccaggattctggtttaaatggaaatgtaaccccatcaccagaactatctgtggagcctgaattagcatctattccttcaccctcagaaacactctcagcaccattacgtactggctcagcttcttctccattttcttccacagctttcactttttttaggtcagaggggtctctttcaggatgaaacccctggctcattttatcttgttcagattcaagtactttgtcaatggaaagctcctcttcagctttaagctccaattctgcctctaacatctcttcagtggttcgggtccgatcttttggtttcttccatgtctttggtacagttatagctatttgagctgggacagggctccttcttgaatttaagttttgagaatccaaaatctcttctgtttgcccatctgcttctacctctattttgttctgaatctcttttgcatcttcactaaggcaagttcttatgctctcgtcctcctctaggactctctggactgtgatggcagcactcggagaactaacagtagtggcagcagcaggaacaatgactggagtgtgaggaggagaagctggaggagttggaggagttggaggaaaggaaggaactgtggaaggggtgatgggagctgggatacactccagtttcatttcttctgggggattttcgagaatctccaattcaagagtcaatggcaatacttcctgttttactatttccacaatgctctccgtggctgataatttttcgctaactccatttatttcattaattaggttagtactagaaaccagtggaatatcattaggtgctacactacagggtttcttgcatatatcatcatcattttcatttgttggtaaagggtctgatgtttctgtgcaagatgtgaggctgggtataggaattgtgtcttctcttggggatgagagttcacatctgtcatctatagcagtggtgaatattggttggctactaagagcagaagaggtgggggctgcaattgtacttcgagcaacagaagaaacagtggtaggtgatggaggcagaggaagctctgctatggatactattgcagtagtttcagatgtctggccttcttgttctttcttctctccactgaggactagcctaaggactggggaaggagactttaacactggatctggttttggcttctcctcttgcttctggtcgctagctgcagtgacaggggtgctggcagcaagatgagcgctctccacagtcccataaaccacagggctgtgctcggggacctggctgggcagctgctgaggaggagtaggtgtggacgtgggtcttcctatgggtggagtaggatttctgctgccacctccagacataatctcctctgttatgtctttacctccctggtttggatcccgaattcttatagtttttttctctctcttggctggaggcggctgttgctgcgtaggcactatgataggtgctgactgatacaccggctgacttgggtaaaaaggcgttccataagcattggggaagtccccaggtcctggtccaggataaaaaggacctggccccggtggttgaactggatattgttgggggggcccaacataaggagggccactatgacggtactgtggtatacagtactgaggcccctggggcactgggtacggcatgggcagatggttaaccatcatgatgtgctgattagcctggtacactgcagtgggtgtctgtgcaccaggacgaatggaaggactgctgttcgggatggtagctctaggaggctgtatttgaggcctctggaaaaacggagaacgggtttgaggttgtgaattcattgtctgaggggtttgagggtataccagcgtggttggacctgcattctgtccagagggataaggggtttgagagagtccaggggacgatgcatgtcccgggggcgttgccgcaagatttggatgccccttgtttatttcatgtgctgaataaggggatggggtaggggttcccggctgtcttgccacttgtgttaccttgggaaaatgatgtgatcgctccaaacttcagtttcctcatcaatactctgtgggattg

SEQ ID NO: 155761 - DNA, 4428 bp, Homo sapiens
gggtctccatagtttagttttttccagaatgtcatatagttggaatcatacagtatacagcctcttcagattggcttctagtcacctggcaatgtgcatttaaatttcctctatgtcttttcatgggttgatagctcatttctttttagcactgaataatattttggttgtaccacagttcacccattcatatactaaaggacatcttagttgcttccaggttttagcaattatgaatcaagctgctataaacattcatgtgtaggtttttgtgtagacataagtttgcacctcctttgggtaaaatgcaaagagtgatattgctgtatcagatggtaagaatatgtttaattttatcagaaactgccagactgtcttgcaaaatggttacacctgtttgtattcccttcagcaatacgttgaagttcttgttgcatcgcatcttggccagcatttgtttttgtcagtgtttcggattgtcaccattctagtaggttttgtagtgctgtctcattttaatttgcagttccgtcaatgtaatttgcaattctatcaatggcatacgatgtaaagtttcattttaacaatcatatatctgaagaatattttcccagatattcatgggtgaagatatttaggaatgcatgtattgaggggagaaaacttgggtatatatatataaagagattgtcttatattttttaaactacccctcactaactagcagcgaataacatatattggaaattgttgtttttaattgcctgaatttcaaatgttaagttttccaagcattcactattgattaggttggaaagtttacatgctattgagttgtatcaatagaaacgtatatttttttccttttcattttaaaacgtttaaaaatttttttggagtgaggtctcattctgtcacccaggctggagtgcagtgacgcaatcataggtcaccatacctctaattcctgacctcaagggatcctcctgcgttggtcccccaaaaccctgagattgcaggcactggacaccatgcctgacccttatttacttttttttttttaaagtggagtctccctctgtcgcccacgctggagtgcagtggcacgatctcagctcactgctaactctgtctcctgatcaagtgattctcctgtctcagccttctaagtagctgggatacaggggtgcaccaccatgcccggctaactttttttttttttttttttttttgagacagagtctttctctgttgcccaggctagagagcagtggtgttatcatggctcattgcagcctccaccttctggtttcaagcgattttcctgcctcagcctcccgagtagctgggactacaggtgcccaccaccacacctggctgattttttgtgtttttaatagagatgggtttcaccatgttgaccaggctggtctcaaactcctgacctcaggtgatctgcccgcttcggcctcccaaactgcttggattacaggcttgagccaccgtgcttggccttaatttcttttgtatttttagtatttatggggtttcaccatgttggccaggctggtccctaactcctgacctcaagtgatctgcctgcctcagcctcccatagtgctgggattacaagtgtgagccaccatgtccggcccagtttacttttattagaaaagattcatttgctgatgtatattgttcagtatcttaatacttttttcatgagttaatactttcttggcaaagaggcctaatatcttgaggtttttaaaaatacccatgaatatttcatgtaagtgatttttgcttcattctttgtgtctacaatttgttatctaatatttctggctcctaacgattttcttttttgttttttttgagatgcagtcttgctgtgtcgccaagcttttcatagagatggggtttcaccatcatggccaggctggtctcgatcccctgacctcaggtgatctgcctgcctcagccccccaaagtgctgaggttacagggagtgagccaccgcgcctgggccaacagttcttatttaatctttcttcatggaaagtttaattgggttataaaccttattgttctgttatggtaaccttctttagtgaagggaaaaggtaatagaatatagtttgctcacactaaaatattttcaattgctaaatatagttttttttagggaatttatttttaggaatatttagatattcctaattgattaaaaaggctgaatcctgttgtcagaacttactatatttttctctagaattatatattttttagtggatttaaatgttctacattattttagcattttcgttttttgagacatagaacctaaatagcatgtggtgattcctggacaattcttaaagctttttttgagataaacatgagaggtctttatcaataaagaattttgactgtgacctaaaaaagagtattgattgtgcccattaagattgcattcactcaaacaagagttatattgataaagtgttagatgaatacctctcgtcattgatcattaaatggtgttccagttgacacagttaaagcagtttttatttagttcagtgagtgtatccccaagtttaggtggtcatactacactttagctttacctgagtactgtgttaagtcattcctttaaattaggttattggtaatacacacacacatatacacccacaaaatatacgtgttgagtatcccttatctaaaatgtttgggactagaagtgtattggaatttggatttttttgaattttgaaacatttgtgtattatgtaatgagatatcttggggatgggatccagatccaaatatgaaattcacttatgtttcatatatgtcttatatacatagcctgaaggtaacttcatagaatttaatttttttattttttattttttatttttttgagacggagtcttgctgtatcgcccaggctggagtgcagtggcgtgatcttggctcactgcaggctccgcctcccgggttcatgccattctcctgcctcagcctcccgagtagctgggactacaggtgccctccaccatgcccagctaatttttttgtgtttttggtagagacggggtttcgccgtgttagctgggatggtcttgatctcttgacctcgcgatccatccgcctcagcctcccaaagtgctgggattatgtgtctgtccaaaaaaaattttttttaagagacagtgtctcactgtgtgacacaggcttgtcttgaattcctgggctcgagcaattggcatctcagcctcccaaagtgctgggattataggcatgaaccactatgcctggctcagtagaatattttaagtaattttgtgcgtgaaagttttgcctacattttgacttagacccatcacatgaggtcaagtatggaatcttccactttgggcatcgtgttggtgtttaaaaagttttggattttggagcacttggggttttggatggttatgctaaccttgtttcatgatagcccaagtactaaatattaaaggaaaaatatccatgttctgcacaaaaagtgccatgtgccagtagtggcatgtttaccatgccactttggaaaatatttgttaggttaatttaccttacttagtgcaagcttcctgttctatattttcatgaaagaaaactgactgcgattttaaaaatattgcttctcaaaccttttggcttccatatttctttaattttccatatcactattaaaaattattgagggcgccaaagtcctgctaaaggattatatcaatatttaccatattataagccaaagcgaggttttaaagaaaacgttacagagttaagagtcgctttcttgtacatttttgcaaatgtcttttaatgttccctttagtgtagtgggaagaatggtgttgttttatgttttgtaaatttgttttactctataaaaaatggttggcttcccacgtttgcttttgcagtccatctattgcagaaagctttttaattaaaacgcatcaaagaagacctgactttatacggagaagtgataagggaggagtatgttaataacctttaaagataattgtggatttttttgatactactgtaaaacttaaaagtactcttacatcgaaattaattgggttggctgggcatggtggctcacacctgtaatcacagcactttggggggttgaggcgggtggatcacttgagctcaggagttcaagaccatcccaagtaacatggtgaaaccccatttctgcaaaagacacaaaaattatctgggcgtgatggtatctgcctatagttccagctacccttgaggctgaggcaggaggattgcttgaatctgggagtcagaggctgcatgagttgagatcacgccattgcaccccagcctgggcaacagagtgagactgac

SEQ ID NO: 155762 - DNA, 483 bp, Homo sapiens
tttttttgagatggagtctcgctctgttgccagactggagtgcaatggtgcgatctccgctcactgcaacctccacctcctgggttcaaacgattctcctgcctcagcctcccgagtagctgggactacaggcaccgccaccacgcccggctaatttttgtatttttagtagagacagggtttcaccatgttagccaggatggtctccgtctcttgacctcgtgatccacccgccttggcctcccaaagtgcggggattacagacgcgagctaccgtgcccagccgcaacattgattttttaagtaaagtcgtgaacgtttatttatttatatcaaaatatatttgttgaattttgccatatgtctaatatattgcttggtgctgatgattcagtggtgtgtgggcacttgaattgatgaattttaacatagtatattacaatagtatttggatgtttaatcaataaatgagtaaattctctg

SEQ ID NO: 155763 - DNA, 415 bp, Homo sapiens
  misc_feature (1)...(415): n = a,t,c or g
acctataaaagatattttaaacttgtatctaatacttccaggtgtttggctgtttgatctatgcaaaagtacagccnnnnnnnnnnnnnnnnnnnnnnnnnnnnnnnnnnnnnnnnnnnnnnnnnnnnnnnnnnnnnnnnnnnnnnnnnnnnnnnttagattatgaataaaatggaaagcttattttactgctttaatgcagacatcctcataaaacaagactactttcaccaccaccagcatttatacatatatacaaagccagtttaagtacatatacatccacttacacatatttgtaaccactaagcccaaattaattttcccatattccagccgtagcaaatgaatcgcttataagcaacagaaacataaggttaaattgggaaatcaacagttttaccgnacgcgtggg

SEQ ID NO: 155764 - DNA, 1637 bp, Homo sapiens
  misc_feature (1)...(1637): n = a,t,c or g
cccacgcgtacgaatttaaccttaggtttctggtgcttataatcgattcatttgctacggctggaatatgggaaaattaatttgggcttagtggttacaaatatgtgtaagtggatgtatatgtacttaaactggctttgtatatatgtataaatgctggtggtggtgaaagtagtcttgttttatgaggatgtctgcattaaagcagtaaaataagctttccattttattcataatctaatgtgtgtgtatatatgtatgtgtgtatgtgtgtggaatatagaaggattatatatccccccccagagatatatacatatggctgtacttttgcatagatcaaacagccaaacacctggaagtattagatacaagtttaaaatatcttttataggttttatataaaaatgtctgagtatgattttgtgtgaaagttctgataccagttgtaatagagtcaaatttatgtgagcaataaagaagaaattggcagatattggaaaaatattttgtgaaaagctgtatttattataaatactaaggccatgacatagtaccattggggttaagtcattttcccaatcgtatttatagatttaaccnggatatgttaagtgcgnctctgttaatatgtcgaagttttaaaagccaggggcacaatntgtntggcagcacaaaattgtgtaattttggacaaaattaataacttgcaaattttggggtcaatgaaaagtttgcaaatatagtaaaatgcacgattgactgttgctttgtgcctcagtatttaatttgtttcagtaaacttactttattactgtttatgatttcagataaaaatagttgctgagtaaattttacttgtaatctacaattggctttttaaaaataacctgttgatatataattgtcagtccaaatgaatatgtgaaacagctggaattgtacaaattttggttgtatttaaaagctcagtttcctttttgttttattgtatgcgttgggtttgcagcatgaacttgcacagataatgcacgttttctggttaagtaaacatgatgcacactattctgtaacagaaagccctattgtgccttacctgtgtgcttttggtgggcaccttgtttatgaagaataaaaaatgatttgttatctgaagagaataaattttaaattctccagtttatgtctcagatgctaacgtgtggaaaatataaatatatataatatataaagtaaccagtcttcctgtattttatgtgccatccatagtgatttatctgagcttagttgaccccccatctttgtaaccctgttgcaaagagtgaatgtaaaaaatagttgtggcattttaaaaggtcgcctttgatgcagatgcatctttttcttgccttctaaaacatatttccatgtaaacattgtacattttattattgtaatatatactattatgcagcttattttacctgaaactgttaagccgaccaagatccctccttgcaagacagatgggaatgtgtataataactaggtatttgagaagttctgaagtttgatgtaatctgttacttgtcctgttaaaaaaaggaaaaaattctaattaaaaatttattagttttttaaaaaaaaaaaaaaaaaaa

SEQ ID NO: 155765 - DNA, 1653 bp, Homo sapiens
  misc_feature (1)...(1653): n = a,t,c or g
atttgccctcgccgcacggctgcaggaattcggcacgagaaaatactttactgagtcaggacttgtgggattactggaacaagcagctgcttccttctctatggctggcatgtatgaagcagttaatgaagtttacaaagtacttattcctattcatgaagctaatcgggatgcaaagaaactatccacaattcatggtaaacttcaagaagcattcagcaaaattgttcatcagagtactggctgggagcggatgtttggcacctattttcgtgttggtttttatggaaccaagttcggggatttggatgaacaagaatttgtttacaaggagcctgcaataaccaaacttgcagagatatctcacagattggagggattttacggagaaagatttggagaggatgtggttgaagtaatcaaagactctaatcctgtagacaagtgtaaattagatcctaacaaggcatatattcagattacctatgtggagccatactttgacacatatgagatgaaggacagaatcacctatttcagacaaaaattacaatcttccgtccgattcatgtactgtacaccctttactttagatggccgtgcccatgggggaacttccatggaacaattccaaaagggaagacccattcctngactacgtctcatgccttttcccttatattaaaaccaggggtcaatgtcactcataaagaagagatcatccttacacccatttgaggttggcaattgaggacatgcagaaaaagacacaggagttggcatttgcaacacatcaggatcccgcagaccccaaaatgcttcagatggtactccaggggatctgtagggcaccacagtgaatcaggggcctttgggaagttgcccagggtttttctgttctggaaatacctagtgacccaaagctctttcagacattcattaataaacttgcgactcttgcttttaaagattttactaaaaggtgtgaagatgccttaagaaaaaataagagcttaattgggccggatcaaaaggagtatcaaagggaactgggagagaaactatcatcggccttaaagagggccctaccagccacttgatccaacagaaagatccctcagtttttacaagggcagtattgcctgtcacctgcccacagagattccttcagtcggattgaggccttcggcaaaatggatctctaaactgaatgccacttgttttaattccatctgcaaaagagcccatgtattccaaccatccgagtgtggaaaaggatcctattggaaaaccaaccatgggaatgggaaattcctggaaattaattaattcattggaaggaattgcagtggcccaaggaaaatatcaaatgtaggattgttaacgccttgagaatccatggcctatggtttcctaatgttcctggtaacaagctgttatcttttaagacattttaaatgactcaaaggtacactatacatttaccattatttataccatagctaaggttaaaaatttattcactttaagttcgtattttttaatttatattaccatttatagattcattttggaaccattttaaatgtagtaatgcttattttaaaggtactattaaatatgtgaatgtttacactaaaaaaaaaaaaaaaa

SEQ ID NO: 155766 - DNA, 1360 bp, Homo sapiens
gaagacacatcggggaaagaacagtcttcattaagtgttcttaataaagatgctgggaaaactgcacttccacatgcaaaacaatgaaatcagacccttatcttagacctacacaacaatcaattcaaaatggataaaagacctaaatgtaagaccagaaactatagaagagaacataggagaaaagttcctggacactgacccttggcaatgattttttggatatcacaccaaaagctcagtcaacaaaaacaaaaacaaatgtgactacatcaaaccaaaaagcttctgacagtaaaagaaacagtcaacaaaatgaaacagtagcctacagattgagtaaaaaatatttgtaaggcatatatatggaaaagggttagtatccaaaatttataaagaattcatacaactcaatttttaaaaatgggcaaaagacctgaaaagacatttctccgaagacgacacacagatggccaacaggtatataaaagggtgctcaacataattaatcatcaaggaaatgcattttaaaaaccactcgaagtactacctctcaccagttaggctagctgttatcaaaaaaaacaaaagacaacaaatgttgtgatggtgtggaataaaaggaactctgtgcactgttggtgggaatgtagactggtacagccattatggaaaacagaatggaagtttctaaagaaaaataaaactaccatacgatccagcaatccctcttctgggcatatactcaaagtaaatgaaatcaccaccttgtaaatatatctgcagtccgtgttcattgcagcattattcatagtagccaacatggagacaactgaagtgtccgttgacagatgaataaggaaactgtgtatatatatgccctacacaccaatggaatattatccacccctaaaaacaaaaaaaaacccaacgatatcttgccatttgctaccaacatggatgggcctgaaggacactgtgctaaatgaaataagccagacagaaaaaaagatactgcataatttcacgatatatgtggaatctaaaaaaaaaatttaaatatataaagagcaaacctggttataggggggatagggagaaatggggaatgtaggtcaaaggattcaaggtagcagatatgtaggatgaataagtctagagatctattgtacaacatgaggattttaggtaacaaatttgtactgtatttgggattcatggtaaatgagtagatgtcagctgctgttgtcaaaaaacaaaaaatatgtgggtaactgagatgatggatatgttaatttgtttcacattgtataccttaaatgtatgcaataaaatttattttaaaaataaaaaaaaaaaa

SEQ ID NO: 155767 - DNA, 409 bp, Homo sapiens
gcccctggcgttggccttggcaatggcctatccctcctgccccggagatgcacatggcccgccgcggcccggtccactgtctcctccctcctagcctgcctctgtcccaattctcctctcaatcttctgcgtgattcctctgtcctcagtcatacccagttgaggggctcaccccacggattctacccgctggagggggccatgttccctgctcccgcccttcctcctcaccaggccttgcctcggtatcagcccccaggtggggagctctgctgctgcctggaccatgccctacttccctctcctcgggatgtaggaaagggagggccagccctagagctcacccaccccccacagcaagcctgtgtactgcgctctggccaccttgcttctcgcctccataacctac

SEQ ID NO: 155768 - DNA, 419 bp, Homo sapiens
  misc_feature (1)...(419): n = a,t,c or g
agaaaaaggtttcctttttaggtttttttaaaaattccacttgggtgggggcgggtggttccccccgttatttccgggccctgggggggccaggggtgtgggttcttaggtccggggttttaggcccccctgggcccccccattgaaccccccttttccctttaaaccccaaaattcccccggcctggttgtttttgccttccgttnnnnnnnnnnnggggggcggggccggggaattccccccaccccggaggccaaggtttcggttaacaaaaattccgcccctgcccttccgcctggggcacaaaaggaggcttcccccnnnnnnnnnnnnnnnnnccaacaacgacattatgagatttttctttttgcgatttctcttttctcttttctgagacagcctcgccattgttgcccag

SEQ ID NO: 155769 - DNA, 804 bp, Homo sapiens
cttgaaaatactttccaagatgaaaattcatcagggtgggtataattctgatgaaaacgcctgtgttcatcaacacagggtcagagcgctcaccgggtcgatgtgcaaatccaagccaggaagtcctgctccgggtggaaggtaaaaccttccctccagggaaccaggggctccggcgggcatcggaggcagcttcttggcctctgctgctgtgtcccccagtccgcccagcccgcattaatgtcctctggaataagagcctgtggctgaagcagagggccttctgggagagctctccaaggtctggaaggagggtcccccagaaagagctccggggtagccccactcgtggcccccctggactccaccagcttcatgcttctcagatgctatttattggccggcccggggagaccagggcagatttctcccgcaccaggctgtggaggtttggagggctgcctgagcagacactgtgccattgctggggctggggaaagaatatctgagacgacgtttgggagcaatgctctttaccaccgttcaccaaatcgtctggggcaggggttgtgagctgcagcagttgctggtgccttgtgggaaggtggggcagggaggaggctgcccgccacctctgcccccagtcacttcctgcttgacctgactcttcacatgtggatgcttaattcctgcccctctccccccagctgcttctcctttactaacacacctgctacattttacacatgtgttggtaagtgagaaacagaaacgaaaaataaattaaaatgcagaaatacaaaa

SEQ ID NO: 155770 - DNA, 399 bp, Homo sapiens
  misc_feature (1)...(399): n = a,t,c or g
tgaatcatagctcactgtaaactcaaacgccccagttcaaatgacccacctcagcctccaagtagctgggactgcaggcatgcgccaccacacccagctaattaattttttttttaagagatggggtcttgccatgttgcccaggcnggntctcaaacacctgccctcaatccctcaagatatcctcccacgtcagcatcccaaggtgctgagattacagtcatgagccactgtgcccagctatatccctgtttcttgaccaaggagaaattagccattcttgaatcaggaggacattgctatcagagacctcaaatggagaatactgaagaatcatccagaagcagaaaactgcaggaaggggacaacttccactgaagaccataggaacaagctaac

SEQ ID NO: 155771 - DNA, 507 bp, Homo sapiens
atttccagtcacagaacataaaacttaatctaatgggtgttttgttttgttttgagacagaggctcactctgtcacctaggctggactgcagtggctcgatctcagctcactgcagcctccacctcccggattcaagcaatttcctgcctcagcctcttgagtagctgggattacaggagccctccacgaggcccagttaatttttgtatctttagtggagacgaggtttccccctattggtcaggctggtctcaaacttctgacctcaagtgatccactcgcctcagcctctcaaaagtgctgggattacaggcatgaggcgccgcacttggcctagtgttttcttaactgtgaaattcccattcatttcttgaatgaggctacatcttatggacagagcaaagttattgtcctacagattcttaaaactataattatggctattgcatgaaatttaaatagattttattatgtctgcaaatctctgggcttttatttttctggaa

SEQ ID NO: 155772 - DNA, 2676 bp, Homo sapiens
  misc_feature (1)...(2676): n = a,t,c or g
atggtagatggaaccctccttttactcctctcggaggccctggcccttacccagacctgggcggtgctcccactccttgaagtatttccacacttccgtgtcccggcccggccgcggggagccccgtttcatctctgtgggctacgtggacgacacccagttcgtgcgcttcgacaacgacgccgcgagtccgaggatggtgccgcgggcgccgttggatggagcaggaggggtcagagtattgggaccgggagacacggagccgccagggacaccgcacagattttccgagtgaacctgcggacgcttgcgcggctaactaacaatcagagcgaaggccggggtctcacaccctggcagtggatgcatggcttgcgagctggggcccgacaagcgcttccttccgcgggtatgaacagttcgcctacgacggcaaggattatctcaccctgaatgaggacctgcgctcctggaccgcggtggacacggcggctcagatctccgagcaaaagtcaaatgatgcctctgaggcggaccaccaaagacccctacttgcaagccacattcgtggattcgttccccaaataactgtatgaggggaaggagacctttcttcacctggagcccccaaagacacacgtgcttcaccacccaatctcttgaccatgaggccaccctgaggtgctgggcccttggctttctaccctgcggagatcacactgacctggcagcaggatggggagggccatacccaggacacggagctcgtggagaccaggcctgcaggggatggaaccttccaagaagtgggcagctgtggtggtgccttctggagaggagcagagatacacgtgccatgtgcagcatgaggggctacccgagcccgtcacccctgagatgggaagcccgcttccccagcccacccatcccccatcgtgggcatcattgctgggcctggttctccttggatctgtggtttctgaagctgtgggttgctgctgtgatatggaggaagaagagctcaggacattttcttccaacaggtggaaaaggagggagctactttaaaggctgaatggagcgacattgcccaggggtctgagtctaacagccttgtaaagcctgagacagctgccttgtgtgcgaactgagatgcacagctgccttgtttggccacttgagattcagggatttccttaaggcctccccctatgtgtcctaggggaactctggcttctctttttgcaaagggccctctgaatctgtcggtgtccctggtaagcacaatgtgaagaaggtagagaaccaggtccacttctgtgtctaccatgacccccttcctcacacttgacctgtgttccttccctgttctctttttctattaaaaaataaagaacctggggcagagtgcggcagctcatgcctgtaatcccagcaacttaggggaggcccaggaaggccagatcacgaggttcaggagattgaaaccatcctgggctaaacacggtgaaaaccccgtctctactaaaaaatacaaaaaattagctgggcgcagaggcacgggcctgtagtcccagctactcaggaggcggaggcatggagaatggcgtcaacccgggaggcggaggttgcagtgagccaggattgtgcgactgcactccagcctgggtgacagggtgaaacgccatctcaaaaaataaaaattaaaaaataaaaaaagaacctggatctcaatttaatttttcatattcttgcaatgaaatggacttgaggaagctaagatcatagctagaaatacagataatttccacagcacatctctagcaaatttaagcctattcctattctctaggcctattccttaaccacctgtaattcttgaccatataccttggtagttgaatattgttttcatactgctgtgggtttgaatggttccctccaacactcatggttgagacttaatccctaatgtgggcaatacttgaaaggtggggcctttgagatgtgattggatcgtaagggctgtgctttcatttcatggggttaatgggttaatggggttatcacaggaatggggactggtggctttattaaggaggggaaaagagaacntgaggctagccatgccccagccccacaggggagcctcccactaggagtgatggctaaagtggaaaatgtgaaggtgcaagcttgccaacagaggggccccccacccaggggaaaatgttcttagtgtcttagttggatcccagggcccaccaggagaagagtgcctttgtggaagcgcttgggagcaaggaccttgaccacccacccaggacccccagaacttgtggagtccagtgggcagcatgcagcggcccccttggggaaagcttttagggcaccagccttgcaacccatttcgagcagccacgtaggctgcacccagcaaaagccacaggcacggggctacctgacgccttgggggcccaatccctgctccagtgtgtccgtgaggcagcacacgaagtcaaaaagagattattctcttcccacagataccttttctctcccatgaccctttaacagcatctgcttcattccccttcaccttcccaggcttgatctgaggtaaactttgaagtaaaataaaagctgtgtttgagcatcaaaaaaaaaaaaaaaaaa

SEQ ID NO: 155773 - DNA, 629 bp, Homo sapiens
caccttttcttcatcccctctgccctggagggtcagcagggcaagggacataagtaaaagctccagctgttgtagtttttcttttggttcttttgtttgtttatttacttattttttagagacagtggagtgcagtggtgcaatcatagctcactgcagcctcaaactcctgggctcaagccatcctcctgcctcagcctccttagtagctaagattacaggcgcatgccaccctgcatggctaatttaggtggttttaattgtgttatttaagaggaagtggcagagtcatttgaaattaatggttgagaagaggtttttaagtgaagggcagattttatctgtgtatcatttcagggtacctttattgcaaaatgacagaaacttagctcagatcatcttaggtagaaaaagagaaatgtattgacttagaatattccacaacctttggatggatggtggaaactggcctttgggacgtttgacctcttggatcgatgctgtgggcttttcccacgggtctgaacatgacctcaggcccctctgttcatgttcacagcccctgaccagggaagaaagggagctctatccaatcagcccaggcagacaaacctcatggtaggattctg

SEQ ID NO: 155774 - DNA, 427 bp, Homo sapiens
ctaaaaagatcttgagaaaaaagatcttgagaaaaagctcagtttagatataagattgatcaagtcagccagaaaatagtcccctaaaagcaatttctctctaaccacccaaagtgcacaattactctcagcatgagaaacatgagcattatgaagaaagggggcagaatttcagaagaattttataaagctttttttcccatctctgctgctctctcatctcctagtcattgaatgggggctctatattgaaatatatctgacacctcccaacaacactttttgaatgcagaaatagaaatctgacctgtgttccaccaattgtggagtataattagaccttccaacaatagttaactgaagagctattatggtttttgggtggccacatcacatgtctttatttgtcctgtaatagcagcatacc

SEQ ID NO: 155775 - DNA, 397 bp, Homo sapiens
  misc_feature (1)...(397): n = a,t,c or g
cacacttccgtgcacactctcaacttcgagtacgccgtggagcgcgtcctcgcaggaacgggagatgagttttggtgacgggtgaccggtgggctgaccgcctctgactgccgttccgtggctgctcagtgtggggtctgcgacgtctgtgaggagagaggaccaaactgggaatcggagctgctggaggtttccatagctatgatggcaacacccagacgtgatcagtcatctcatggaatggagttcagacccgcactgtcagtgtgagacaggttgaacgtttgaaaagggaagtggttcttgccccaggtgtttgaggagcacgagcctcctttgcgagctatccctgcgagaactgagttcctcaccctcaattcgagtgaattcctagcan

SEQ ID NO: 155776 - DNA, 545 bp, Homo sapiens
  misc_feature (1)...(545): n = a,t,c or g
cttggagtacagtggctcgttcataactcactgccacctcacgntccttttgcctcagccctccaagtagctgggactgcaggcgtgtaccaccatgcctggntagtttnattttnagtacatagccttgaacaactgagcttaagcgatcatcctccctcaaccttccaaggtgctaggactgtaggcatgagccactgcacctggcctaaaattacattgttacaggcacgtaagtaaacacttcctggatccaaaaatgtgtattctgcatttcaacaannnnnnnnnnnnnnnnnnnnnnnnnnnnnnnnnnnnnnnnnnnnnnnnnnnnnnnnnnnnnnnnnnnnnnnnnntaaaattacattgttacaggcacgtaagtaacacttcctggatccaaaaatgtgtattctgcatttcatattaaaaaaaacaagcaagtgcttgggttctgcctctggtcaaccccagtaatcatgttcctaaagtttggacccaaatatttcctcggggggcccgccttttatctccctatttcttcg

SEQ ID NO: 155777 - DNA, 898 bp, Homo sapiens
gacaggcaaaaatgagatttattgcatttgttttattgatctcgaatatcaatgaaaaatggggtgaatatcaatgaaaaattgggttactactacacattggggataaggaagagtattcctgaattcaggatatttcatagggtattgcttagaactcccatgtccagtcgttaaagtcagtggaaactagaatgactcaatagaggccgcagttctaatgactacaccttcaaaaataaagatttaggtcaccctacaaagcaaggaagcatcacccatcaaagtgcttacccaggttataggggatataaaaggtatattggaaaatggtcattataagtatcagctatgacaatttttcaagttgcagaaaggaaatgataatcattaatatttcttccttattttgatatgaatataaatacatacatgtgtgtatacacatatgtaactcattttctttctttcttatacatgtcattttttttcattctccctcccgtacctctaccatttaacatgttttcatagtagcaagcattatatctaagcatttgagaaagcatggttcagtaagaagaggaataaatatcagccaaaaaagactctgaatcctcttttgggaaaggggagtgagttttggttatacagagtatggttgaatcctattaggtagactcatgattttgccattgcatttatttgggagtttagtataattaaaagagggatatatattggacgatgacttcacaaaagatagactgtggtggctttgtaaactgtcaggttagttggatctaagtttctcagtattctcttccatgttcagttctaagttaagatttgccacaagtgaaatttgcatggaatttaaagtctaactggaatccag

SEQ ID NO: 155778 - DNA, 442 bp, Homo sapiens
agcggctgaagactgacactgcccgatcgcctcggaaacctacaagaccatcacagatgctttgggtaactctaccagtggagggtaagtccgtccccttcctaatcaatacagaggctacccactccacattaccttcttttcaagggtgtgtttcccttgcctccataactgttgtgggtattgacggccaggcttctaaacctcttaaaactccccagctctggtgccaacttggacaacattcttttatgcactcctttttagttatccgcaccttcccagctcccttattaggtcgagacattttaactaatttatctgcttccctgactattcctgggctagagccacacctcattgccgccttttgctccagttcaaagcctccttcacatcctcctcttgtatctctccaccttaaaccacaagtataggatgc

SEQ ID NO: 155779 - DNA, 727 bp, Homo sapiens
cgagacagagtcttgctctgtcgcccaggctggagtgcagtggcatgatctcagctcactgcaacctctgcctcccagatacaggcaattctcctgcctcagcctcctgagtagctgggattataggcgcctgtcaccatgcccagctaatttttgtatttttagtagagacagagtttcaccatgtgtttcaccatgttggccaggctagtctcgaattcctgacctcgtgatccccccacctcggcctcctaaagcgctgggattacaggggtgagccacggcgcctggcctaggacctttgttttttaagtctctgtttctcaatcctctatatgttgaaatgctaaagtacttagtgcctgttttctgctctgttttcctcattctgttcatttcctcctaagatgatttcattaagtttgaagactttcaatacccaatatatatgctgctaattcctaaatttataactctagccccaactatcctctgacaaccacacccttacatataactatctactgacatctatctccacttggatatgtctaatagacatcttccaaatggagtctatataagacagaattcctgatcctcttctccccaataatcctacttcttttccatccttccgcatctcagtcaatggctcaatatccattcaattgctccggaggcgtgggcgagggcggtcaacgggccggcgccagggtcaacttat

SEQ ID NO: 155780 - DNA, 1311 bp, Homo sapiens
  misc_feature (1)...(1311): n = a,t,c or g
tttcgtccgcgccggaggccgccaagaagccgacgccctgccaccggtgccgggggctggtggacaagtttaaccaggggatggtggacaccgcaaagaagaactttggcggcgggaacacggcttgggaggaaaagacgctgtccaagtacgagtccagcgagattcgcctgctggagatcctggaggggctgtgcgagagcagcgacttcgaatgcaaccagatgctagaggcgcaggaggagcacctggaggcctggtggctgcagctgaagagcgaatatcctgacttattcgagtggttttgtgtgaagacactgaaagtgtgctgcgtctccaggaaccgtacggtcccgactgtctcgcatgccagggcggatcccagaggcccgtgcagcgggaatggccactgcagccggagatgggagcagacagggcgacgggtcctgccggtgccacatggggtaccagggcccgctgtgcacttgactgcatggaccggctacttcagctccgctcccggaacgagacccacagcatcttgcacagccttgtgacgagtcctgcaaagacgtgcttcgggccttgaccaacagagactgcggcgaagttgtgaagtgggcttgggtgctggacgagggcgcctgtgtggatgtggaaaagtgtgcggcccaaaccgcctccctgcagcgctgcgcagttctgtaagaacgccaacggctcctacacgtgcgaaggagggtgactccagctgggtgggctgcccaggggaaaggcccaggaaactgtaaacagtgtatctctggctacgcgagggagcacggacaagtgtgcagatgtggaacgagtgcntcactagccagaaaaaaccctgtgtgaggaaaaaacgaaaacttgctacaatactcccggggagctacggtctgtgtgtgtcctgacggcttcgaagaaacggaagatgcctgtgtgccgccggcagaaggctgaagccacagaaaggagaaagcccgacacagctgcccctcccgtgaagacctgtaatgtgccggacttaaccctttaaattattcagaaggatgtcccgtggaaaatgtggccctgaggatgccgtctcctgcagtggacagcggcggggagagagctgccgctcctctaacggttgattcctcatttgtcccttaaacagctgcatttcttggttgttcttaaacagacttgtatattttgatacagttctttgacataacaattgaccattgtaggtaatcaggaggcaaaaaaaaaaaaaaaaaaaaaaagtcgtatcgatgt

SEQ ID NO: 155781 - DNA, 401 bp, Homo sapiens
gtttttatttttaaatgaagtttccatctgtacacgttaagaaaataaacaaaccaacaggaagccattctctgtgtatcctccttggaggcaggaaggatggatctgccgataggcacacaacagcacacagccagggctcatgggagtgagtgcccgtcacctcacgaaggtcatgggcctaaaacatacggaggctccatagaaaatgctccagctggctttgcagtcatgcataaaggtgaggacacttaattcaaggcatctgggggctggtgtcaccgcacatgaagagtagtgcccatgctgccacccgatgattaaacagtgaataaaatgtcatggctctttcctgcgacaattctatttgaggaaaagatttgtttttcccggacgcgtgg

SEQ ID NO: 155782 - DNA, 8274 bp, Homo sapiens
ggtgaatttggaagtgaaaagaaaactgctttgcatgaaaaagaggagacacttcggcttcagagtgcacaggcacagccttttcaccaagaggagaaagagtctttgtctctgcagcttcaaaagaagaatcaccaagtccagcagctgaaagaccaggttttatccttaagtcacgagatagaagagtgccgctccgagttggaggtgctgcagcagaggcgggagcgggagaaccgggaaggcgcaaacctcctctccatgctcaaggccgacgtcaacctgtcccacagcgaaagaggggccctccaggacgccctgcgcaggctgctgggtttgtttggagagacgctgagggcagccgtcaccctgaggagccggatcggggagcgcgtggggctctgcctggatgacgcgggcgcaggcctggccctgtcgacagctccggcgctggaggagacatggtctgatgtggccctcccggagttggacagaactttgtctgaatgtgcagagatgtcttccgtggctgaaattagcagccacatgcgtgaaagctttctcatgagcccagaaagtgtgcgggagtgtgagcagcccatccggagggtcttccagagcctcagcctggccgtggacggcctcatggagatggccctggactccagcaggcagctggaagaagcacgccaaattcattctcgttttgaaaaagaatttagttttaagaatgaggagacagcacaggttgtcaggaagcaccaggagctgctggagtgtttgaaggaggagagcgcagcaaaggcagagctggcgctggagctgcacaagactcagggtacccttgagggattcaaggtggagacagcagatctgaaggaggtgctggccgggaaggaggattccgagcaccgtctggtgctggagctggagagcctgagacggcagctgcagcaggcggcccaggagcaggcggcgctgagggaggagtgcacccgtctgtggagtcggggggaggccacagccacggacgccgaggccagagaagctggatttttcagggtgttttcaggaacgtctctgacgtcctgcatcgctctcagcatctttgccctggcggtgctgttgcatctgggcgtccgttgtcgctgtttctccgatgctttctctgcttgtcctctgctgtccgggggcagcctcatgtgtcttcgcgcccagccagccggcgctgggccacaccccgccgggggagaccacctggtgtttcatcacctcgagcccttggacttcagccagtcacttcgtttgtcaggcctccgggcagataaaggggtgtgtggcctgcattctgttgaacggcccgctctccggaaggaagtggaggatctgaccaaagaacagtcggagaccaggaagcaggctgagaaggaccgctcagccctgctctcccagatgaagattttggagtctgagttagaagaacagctgtctcagcatcgcgggtgtgccaagcaggcggaggccgtcactgccctggaacagcaggtggcatctctggacaagcatttgcgcaaccagcggcaattcatggatgtaagaattctgaataatacatttttttgcatcactaaaagttgccgttacagcatgaacttctttccagatcgttacgagcaggcagccgagcgggagcacgagcgcgaggagttccagcaggagattcagaggctggaggggcagctccgccaggcggccaagccgcagccctggggccctcgcgacagccaggttgagttgttacaacaaaagttgagagaaaagttggatgaatttaatgaattggctatacagaaagagtcggcagatagacaagtgttaatgcaggaagaagaaattaaacgtctggaggagatgaacatcaacatcaggaaaaaagtggcccagctccaggaagaagtggaaaaacagaaaaacatcgtgaaagggctggaacagggaggaccgctgagcatcacctgcacttggagcggagttgtccccctggccggccactgcacacatttcagtgacagctgctccagggcggcttcaccccttctgccttcactcagcgaacgtttactgagcttagtagatgccagggataaagaggtgttaaagaaacagcagatgagtagcttgcttctggcgtccacgttgcagtctacactagatgcaggcagatgtcccgagcctccttcgggcagccctcctgagggtccagaaatacagttagaggtgacacagagagcactcctgcggcgcgagagcgaggttttggacttaaaagaacagctagaaaagatgaaaggtgacttagaaagtaaaaatgaagaaatactacatctgaacttaaaattggacatgcagaacagccagactgctgtcagcctcagagaacttgaggaagagaacacgagcttgaaggtcatatataccagaagttctgagattgaagagctgaaagccactattgaaaatctgcaagagaatcagaaacgattacaaaaggagaaagcagaggaaattgaacaactccatgaagtcattgagaagctgcagcacgagctgtccctcatggggcctgtggtgcacgaagtcagcgacagtcaggctggcagtctgcagagcgagctgctctgctcccaggccgggggccctcgtgggcaggccctacagggcgagctcgaggctgcgctggaagccaaggaggccctgagccggctgctggctgaccaggagcgcaggcacagccaggccctggaggccctgcagcagcgcctccagggcgcagaggaggctgcggagctacagctggctgagctggagcgcaatgtagccctcagggaggctgaggtcgaagacatggcctcccggatccaggagttcgaagcggccctgaaagcaaaggaagcgacgattgccgagagaaatttagaaatcgacgctctgaaccagcggaaggcggcccactctgccgagctggaggccgtcctgttggccttggcccgcatccgccgcgccctggagcagcagcccctggcagccggggcggcgcctcccgagctgcagtggctccgagcgcagtgtgcccgcctcagccgccagctgcaggtgctgcaccagcggttcctgaggtgccaggtggagctggacaggcggcaggcccgcagagccacagctcacacacgggtgcccggggcccacccacagcctcgcatggatggtggcgccaaggcccaggtcaccggcgacgtggaggcctcccatgatgctgctttggagccggttgtccctgacccacagggtgatctgcagcctgtcctggtgacgttgaaggatgcacctctctgcaagcaagaaggcgtgatgtcagtgctcaccgtctgccagaggcagctgcagtcggagctgctcttggtgaaaaatgaaatgcgcctgagtctggaggacggcggcaagggtaaagaaaaagtactggaagattgtcagctgccgaaggtcgatctcgtagctcaggtgaaacagcttcaggaaaaactgaaccgtttgctgtattccatgaccttccagaatgtggatgctgccgacaccaaatctctgtggcccatggcctcagcacacctgttggagagcagctggagtgatgattcctgtgacggagaagagcctgacatatcaccccacatagacacatgtgatgccaatacagccacggggggtgtaactgatgttatcaaaaatcaggccatagacgcgtgtgatgccaatacaaccccagggggtgtaactgatgttatcaaaaattgggattccttgataccagatgaaatgccagattctcccattcaagaaaaatcagaatgtcaggacatgtctctttcttcaccgaccagcgtacttggtggctcccgccaccagagccacactgcagaggctgggccccggaagagcccggtcgggatgctggacctgtcttcctggagctcccctgaggtcctcaggaaggactggaccctggagccctggcccagcctccccgtgacaccccactcaggagccctgagcctgtgcagtgccgacacatccctgggggacagggcggacacctcgctgccacagacccaggggccggggctgctttgttccccaggcgtgtctgcagcagcgctggcactgcagtgggccgagtctccgccggctgacgaccaccatgtgcagaggacggctgtggagaaagatgtcgaagattttatcacaacatcctttgattctcaagaaacattaagttcacctcctcctggattagaaggaaaagctgatagaagtgagaaaagtgacggctcgggttttggagcaagactgagcccggggtcaggaggccctgaggctcaaactgctggtcctgtgacccctgcttccatctctggaaggtttcagccgctgccggaagccatgaaggagaaggaagtgcgtccgaagcacgtgaagtttagcagatcattttatggcaaaaccattgacaaaaacttggctaaacaagctttactgcagatggtgcgtgacgagagccaccagatcctggcgctgtcagaaggccttgcacccccaagcggcgagccacacccaccccggaaggaagacgagatacaggacatctcgctccatgggggaaagacgcagcaggccctggttgtgtgcgagcggcagcctggctggcattcaggaggctcattggtgctgcacgctgcccctggggaccagcgggaagtgcccaccgcgtgccccgattggagaggggaccttctgcaggttgtgcaagaggcctttgaaaaagagcaggagatgcagggggttgagctgcagccccgactcagtggctcagatctggggggtcacagctccctgctcgaaaggctggagaagatcatccgtgagcagggagacctgcaggaaaagtccctggagcatcttcgcttgccggaccggagcagcctgctgtccgagatccaggcgctgcgtgcccagctgcgcatgacgcacctgcagaaccaggagaagctgcagcacttgcgcacggcgctgacaagcgcagaggcgcgcgggagccagcaggagcaccagctgcgcaggcaggttttggattccgtcaaggggaacggccttgcagttcagcccacggcccttgtcccggcgcccatgccctttgtgctctctggggctgggggccggcgctgtgcacatgctcttgaactgctggcttataaagtagagcaggagaagtgcattgctggtgacttgcagaagacgctgagtgaagagcaagagaaggcaaacagcgtgcagaagctcctggcggcggagcagactgtagtgcgagatttgaagtccgacctctgtgagagcaggcagaagagcgaacagctgtcccggtccctctgcgaggtgcagcaggaggtcctccagctgagatccatgctgagcagtaaggagaacgagctgaaggccgcgcttcaggagctggagagtgagcaggggaaggggcgtgccctgcagagccagctggaggaggagcagctgcggcacctgcagagggagagccagagtgccaaggccctggaggagctgcgggcgtctttggagacacagcgtgctcagagcagtcgactctgcgtggcactgaaacacgagcagacggccaaggacaacctgcagaaggagctgcgtatcgagcactcacgctgcgaggccttgctggctcaggagcggagccagctctctgagctccagaaggaccttgcggctgagaagagccgcaccctggagctgtcagaggccttgcggcacgagcggctcctgaccgagcagctgagccagaggacacaggaggcttgcgtgcaccaggacacacaggcccatcacgctctgctgcagaagctgaaggaggagaagtcccgggtggtggacttgcaagcgatgcttgaaaaggtgcagcagcaagccctgcattctcagcagcagcttgaggctgaggctcagaagcactgtgaggcgctcaggagagagaaggaggtaagtgccacactgaagtcgacggtggaagccctgcacacccaaaaacgagagctgagatgctctctggagagagagagggagaaaccagcgtggttgcaggcagaattagagcagtcacacccacggttgaaagagcaagaaggacgcaaggctgcgaggaggagcgcggaggccaggcagagcccagcggctgcggagcagtggaggaagtggcagagagacaaggagaagctgcgagaattagaactgcagcgtcagcgtgacttgcataagatcaagcagcttcagcagacagtgagagacctggagtcgaaggacgaggtgcctggcagccgcctccacctaggttctgcccgcagggctgccggctcggatgcggaccacctccgggaacagcagcgagagctggaggcgatgaggcagcggctgctctctgccgcccggcttctcaccagcttcaccagccaggccgtggacaggacagttaatgattggacgtcatccaatgagaaagcagtgatgtctttactgcacacgttggaggagctgaagtctgacttgagcaggcccacctcctcccagaaaaaaatggcagcagagctgcagttccagtttgtggacgtcctgctgaaagacaatgtttccctcacaaaagcgctcagcacggtgacccaggagaagctggagctgagcagagccgtgtctaagcttgagaagttgctgaagcaccatctgcagaagggctgcagcccaagcaggtcggaaaggtctgcttggaagccagacgaaacggctccacagagttccctgaggcgcccagaccccggccggcttccaccagctgccagcgaggaagcacacaccagcaatgtcaagatggaaaaattgtacctgcattacttgagagcagagagctttagaaaagctctgatttatcaaaagaagtatcttttgctgttgattggtggattccaggattctgaacaagaaacactctccatgattgcccatttgggggtatttccttccaaagcagaacggaaaatcacatctcgtcctttcaccaggttccgcacggccgtcagggtggtcattgcaatattaagattacgttttttggttaagaaatggcaagaagtagatcggaaaggagctctggcacaaggcaaagcccctcgcccaggtgggactccagctgctgttgaccgctggactcacaaacctttctttctactcttgtttttcattcactttgggtcatttttcagtgttgatggggacgtaataaagcacgtctacatctgtggtttcacgggacgctccctaggaccagttgacagaagacgaaaaaatacaggtttgttctaccaacggatccatacggcccttaaccagttacccaggccctctagcattgcccatggctccatgtatattctcaccttgggctacttcttccacaaaaaagtggacgaccaggagctctgcctgaaattctgcctattgagaggatatgcccttatcaccatttttcaagaatggtttctccagaagcagacgctgcgactgagtttggggtacgaggatgttgacatggtatcaacacccgtgaaaggaaggggaaggaagcaggactgggcggaggaagaagggtatgcgcctcgggccgcaactaagcagcctgcccgcctcaagcccgccaccctcaagcaggcccagcgcagagcctgtcgggagcggcgctctcccgcctctcccaatgggagcccggagcggcatcgacgcgtcttcggggccaatggaagcgaggctctggtgttgctgggcggggccgggagggctgcgcgggcccgagacccactgcgcacgcgcgctcgctacccgcccttcccgccgcgcacgcgctcccgtggccggccgggcgctcaggagcgcgcggggcagcggcggcgcggcggagccatccgcgctcgtgcccgcgcggcctctgcccggacgctagccggcctggccatggctgaccgcgggtgcccgctggaggcggcgccgctgcctgccgaggtgcgggagagcctggctgagctggagctggagctgtcggaaggttggaagaagaagcttaacagtgacaaagatgctgtcttcaacagaaactggtaa

SEQ ID NO: 155783 - DNA, 10447 bp, Homo sapiens
gctctgtgtcagccccgtcaccgccgggcggcccgcgcggagtctgagggagatggaagttgagcaagagcagcggcgcagaaaggtggaggccgggaggacgaagcttgctcacttccgacagagaaaaacaaaaggtgacagttcgcattcggagaaaaagacggcgaagaggaagggctcggctgtcgatgcgtctgtccaggaggagagtccggtaaccaaggaggacagcgcactctgtggaggaggggacatttgcaaaagcacatcatgtgacgacacccctgatggggcaggaggggcctttgcagctcagccggaggactgtgatggagagaagagagaggacttggaacagctgcagcagaagcaagtcaatgaccatcctccagagcagtgtgggatgttcacagtcagtgaccacccaccagaacagcatgggatgttcacagtcggtgaccacccaccagaacagcgtgggatgttcacagtcagtgaccacccaccagaacagcatgggatgttcacagtcagtgaccacccaccagaacagcgtgggatgttcacaatcagtgaccaccaaccggaacagcgtgggatgttcacagtcagtgaccacacaccagaacagcgtgggatcttcacaatcagtgaccacccagcagaacagcgtgggatgttcacaaaggagtgtgaacaagaatgtgaacttgccattactgacctggagagcggccgtgaagatgaggctggcctgcatcagagtcaggccgtgcatggccttgagctggaggcgctgcgcctgagtctgagcaacatgcacacggcgcagctggagctgacacaggccaacctccagaaggagaaggagacggcattgacggagctgcgggagatgctcaacagccggcgtgcccaggagctggccctgctacagagcaggcagcagcacgagctggagctcctcagggagcagcacgcacgggagaaggaggaggtggtgctcaggtgtggacaggaagcagctgagctgaaggagaagttacaatcagaaatggagaaaaacgcccagatagtaaagaccctgaaggaagattgggaatctgaaaaagatttatgtttagaaaatctacgcaaagaactgtctgcaaagcatcaatcagaaatggaggatttacaaaaccagtttcagaaagaattggcagaacagagagctgagttggagaagatttttcaagacaaaaaccaggctgaacgggcccttaggaacctggagagtcatcatcaagcagccattgagaagttacgtgaagacctgcagtccgagcacggccggtgtttagaagacttggagttcaagttcaaagagagcgagaaagaaaaacagctggagttagagaatcttcaagcatcatatgaagacctgaaggcacaatcacaagaagagatcaggcgcttgtggtcccagcttgattctgccaggaccagtagacaggaattgagtgagctacatgagcaactcctggcgcgcacctctcgtgtggaagatttagaacagctgaagcagcgagaaaaaacccagcatgagtccgaactggagcaactgaggatttattttgaaaagaagttaagggatgctgagaaaacttaccaagaagacctaaccctgttacagcagaggctgcagggggcgagggaagatgctcttctggactctgtggaagttgggttgtcctgtgtgggtttagaagagaaacctgagaaaggaagaaaagatcacgttgatgaactcgagcctgagcgacataaggagagcctgccacgcttccaggcggagttagaagaaagccacaggcaccagctggaagcgctggagtctcccctctgcatccagcacgaggggcatgtctcagacagatgctgcgtagagacttcagcattgggacacgagtggcgtctggaaccctctgaagggcacagccaagagcttccctgggtgcatctccagggtgtgcaggacggggacttggaggccgacacagagcgggcagccagagtcttgggtctggaaactgagcacaaggtgcaactttcgcttcttcagactgagctcaaagaagaaattgaactcctaaaaatagaaaatagaaatttgtttgagaagttgcagcatgaaactcgtctgaaggacgatttggagaaggtaaaacacaatctaattgaagaccaccagaaggaactaaataatgctaagcaaaagactgagctgatgaaacaggaattccaaagaaaagaaacggactggaaagttatgaaggaggagctacagcgggaagctgaggagaagttaacattgatgctacttgaactgagagaaaaggctgaatccgagaaacagaccatcataaacaagttggagcttcgagaagctgaaatgaggcagcttcaggaccaacaggcagcgcagatcctggatctggagaggtccttgacggagcagcaggcccgcctgcagcagctggaacaggacctcacttcagacgacgccctgcattgcagccagtgtgggcgggagccgcccacagcccaggacggggagcttgccgcgctccacgtgaaggaagactgcgccctgcagctgatgctggcccggagcaggtttttagaggaacgtaaagagatcgccgagaaattcagtgcggaacaagatgccttcctgcagctcctccaggagagacaccagcagcagctcctgtcagtgacggcggagctcgaggccagacaccaggccgcgttgggcgagctgacagcctccttagagagcaagcagggggctctgctggctgcacgtgtggccgaactgcagaccaaacacgctgccgacctcggcgctctggagaccagacatctgtccacccttgattctttggaatcctgttacctgtctgaatttcagaccatccgtgaggagcacaggcaggccctagagctcttacgagcagactttgaggaacaactgtggaaaaaggactctcttcaccaaacgattttgactcaagagttggagaaactgaagcggaaacacaaaggggagctacagtctgtgcgggaccacctgcgaaccgaagcgagcacagagctcgccggaaccgtggctcacgagctgcagggagtgcaccagggtgaatttggaagtgaaaagaaaactgctttgcatgaaaaagaggagacacttcggcttcagagtgcacaggcacagccttttcaccaagaggagaaagagtctttgtctctgcagcttcaaaagaagaatcaccaagtccagcagctgaaagaccaggttttatccttaagtcacgagatagaagagtgccgctccgagttggaggtgctgcagcagaggcgggagcgggagaaccgggaaggcgcaaacctcctctccatgctcaaggccgacgtcaacctgtcccacagcgaaagaggggccctccaggacgccctgcgcaggctgctgggtttgtttggagagacgctgagggcagccgtcaccctgaggagccggatcggggagcgcgtggggctctgcctggatgacgcgggcgcaggcctggccctgtcgacagctccggcgctggaggagacatggtctgatgtggccctcccggagttggacagaactttgtctgaatgtgcagagatgtcttccgtggctgaaattagcagccacatgcgtgaaagctttctcatgagcccagaaagtgtgcgggagtgtgagcagcccatccggagggtcttccagagcctcagcctggccgtggacggcctcatggagatggccctggactccagcaggcagctggaagaagcacgccaacttcattctcgttttgaaaaagaatttagttttaagaatgaggagacagcacaggttgtcaggaagcaccaggagctgctggagtgtttgacggaggagagcgcagcaaaggcagagctggcgctggagctgcacaagactcagggtacccttgagggattcaaggtggagacagcagatctgaaggaggtgctggccgggaaggaggattccgagcaccgtctggtgctggagctggagagcctgagacggcagctgcagcaggcggcccaggagcaggcggcgctgagggaggagtgcacccgtctgtggagtcggggggaggccacagccacggacgccgaggccagagaagctgctctccggaaggaagtggaggatctgaccaaagaacagtcggagaccaggaagcaggctgagaaggaccgctcagccctgctctcccagatgaagattttggagtctgagttagaagaacagctgtctcagcatcgcgggtgtgccaagcaggcggaggccgtcactgccctggaacagcaggtggcatctctggacaagcatttgcgcaaccagcggcaattcatggatgagcaggcagccgagcgggagcacgagcgcgaggagttccagcaggagattcagaggctggaggggcagctccgccaggcggccaagccgcagccctggggccctcgcgacagccagcaggcgccgctggatggagaggttgagttgttacaacacaagttgagagaaaagttggatgaatttaatgaattggctatacagaaagagtcggcagatagacaagtgttaatgcaggaagaagaaattaaacgtctggaggagatgaacatcaacatcaggaaaaaagtggcccagctccaggaagaagtggaaaaacagaaaaacatcgtgaaagggctggaacaggataaagaggtgttaaagaaacagcagatgagtagcttgcttctggcgtccacgttgcagtctacactagatgcaggcagatgtcccgagcctccttcgggcagccctcctgagggtccagaaatacagttagaggtgacacagagagcactcctgcggcgcgagagcgaggttttggacttaaaagaacagctagaaaagatgaaaggtgacttagaaagtaaaaatgaagaaatactacatctgaacttaaaattggacatgcagaacagccagactgctgtcagcctcagagaacttgaggaagagaacacgagcttgaaggtcatatataccagaagttctgagattgaagagctgaaagccactattgaaaatctgcaagagaatcagaaacgattacaaaaggagaaagcagaggaaattgaacaactccatgaagtcattgagaagctgcagcacgagctgtccctcatggggcctgtggtgcacgaagtcagcgacagtcaggctggcagtctgcagagcgagctgctctgctcccaggccgggggccctcgtgggcaggccctacagggcgagctcgaggctgcgctggaagccaaggaggccctgagccggctgctggctgaccaggagcgcaggcacagccaggccctggaggccctgcagcagcgcctccagggcgcagaggaggctgcggagctacagctggctgagctggagcgcaatgtagccctcagggaggctgaggtcgaagacatggcctcccggatccaggagttcgaagcggccctgaaagcaaaggaagcgacgattgccgagagaaatttagaaatcgacgctctgaaccagcggaaggcggcccactctgccgagctggaggccgtcctgttggccttggcccgcatccgccgcgccctggagcagcagcccctggcagccggggcggcgcctcccgagctgcagtggctccgagcgcagtgtgcccgcctcagccgccagctgcaggtgctgcaccagcggttcctgaggtgccaggtggagctggacaggcggcaggcccgcagagccacagctcacacacgggtgcccggggcccacccacagcctcgcatggatggtggcgccaaggcccaggtcaccggcgacgtggaggcctcccatgatgctgctttggagccggttgtccctgacccacagggtgatctgcagcctgtcctggtgacgttgaaggatgcacctctctgcaagcaagaaggcgtgatgtcagtgctcaccgtctgccagaggcagctgcagtcggagctgctcttggtgaaaaatgaaatgcgcctgagtctggaggacggcggcaagggtaaagaaaaagtactggaagattgtcagctgccgaaggtcgatctcgtagctcaggtgaaacagcttcaggaaaaactgaaccgtttgctgtattccatgaccttccagaatgtggatgctgccgacaccaaatctctgtggcccatggcctcagcacacctgttggagagcagctggagtgatgattcctgtgacggagaagagcctgacatatcaccccacatagacacatgtgatgccaatacagccacggggggtgtaactgatgttatcaaaaatcaggccatagacgcgtgtgatgccaatacaaccccagggggtgtaactgatgttatcaaaaattgggattccttgataccagatgaaatgccagattctcccattcaagaaaaatcagaatgtcaggacaggtctctttcttcaccgaccagcgtacttggtggctcccgccaccagagccacactgcagaggctgggccccggaagagcccggtcgggatgctggacctgtcttcctggagctcccctgaggtcctcaggaaggactggaccctggagccctggcccagcctccccgtgacaccccactcaggagccctgagcctgtgcagtgccgacacatccctgggggacagggcggacacctcgctgccacagacccaggggccggggctgctttgttccccaggcgtgtctgcagcagcgctggcactgcagtgggccgagtctccgccggctgacgaccaccatgtgcagaggacggctgtggagaaagatgtcgaagattttatcacaacatcctttgattctcaagaaacattaagttcacctcctcctggattagaaggaaaagctgatagaagtgagaaaagtgacggctcgggttttggagcaagactgagcccggggtcaggaggccctgaggctcaaactgctggtcctgtgacccctgcttccatctctggaaggtttcagccgctgccggaagccatgaaggagaaggaagtgcgtccgaagcacgtgaaggctttactgcagatggtgcgtgacgagagccaccagatcctggcgctgtcagaaggccttgcacccccaagcggcgagccacacccaccccggaaggaagacgagatacaggacatctcgctccatgggggaaagacgcaggaagtgcccaccgcgtgccccgattggagaggggaccttctgcaggttgtgcaagaggcctttgaaaaagagcaggagatgcagggggttgagctgcagccccgactcagtggctcagatctggggggtcacagctccctgctcgaaaggctggagaagatcatccgtgagcagggagacctgcaggaaaagtccctggagcatcttcgcttgccggaccggagcagcctgctgtccgagatccaggcgctgcgtgcccagctgcgcatgacgcacctgcagaaccaggagaagctgcagcacttgcgcacggcgctgacaagcacagaggcgcgcgggagccagcaggagcaccagctgcgcaggcaggttgaactgctggcttataaagtagagcaggagaagtgcattgctggtgacttgcagaagacgctgagtgaagagcaagagaaggcaaacagcgtgcagaagctcctggcggcggagcagactgtagtgcgagatttgaagtccgacctctgtgagagcaggcagaagagcgaacagctgtcccggtccctctgcgaggtgcagcaggaggtcctccagctgagatccatgctgagcagtaaggagaacgagctgaaggccgcgcttcaggagctggagagtgagcaggggaaggggcgtgccctgcagagccagctggaggaggagcagctgcggcacctgcagagggagagccagagtgccaaggccctggaggagctgcgggcgtctttggagacacagcgtgctcagagcagtcgactctgcgtggcactgaaacacgagcagacggccaaggacaacctgcagaaggagctgcgtatcgagcactcacgctgcgaggccttgctggctcaggagcggagccagctctctgagctccagaaggaccttgcggctgagaagagccgcaccctggagctgtcagaggccttgcggcacgagcggctcctgaccgagcagctgagccagaggacacaggaggcttgcgtgcaccaggacacacaggcccatcacgctctgctgcagaagctgaaggaggagaagtcccgggtggtggacttgcaagcgatgcttgaaaaggtgcagcagcaagccctgcattctcagcagcagcttgaggctgaggctcagaagcactgtgaggcgctcaggagagagaaggaggtaagtgccacactgaagtcgacggtggaagccctgcacacccaaaaacgagagctgagatgctctctggagagagagagggagaaaccagcgtggttgcaggcagaattagagcagtcacacccacggttgaaagagcaagaaggacgcaaggctgcgaggaggagcgcggaggccaggcagagcccagcggctgcggagcagtggaggaagtggcagagagacaaggagaagctgcgagaattagaactgcagcgtcagcgtgacttgcataagatcaagcagcttcagcagacagtgagagacctggagtcgaaggacgaggtgcctggcagccgcctccacctaggttctgcccgcagggctgccggctcggatgcggaccacctccgggaacagcagcgagagctggaggcgatgaggcagcggctgctctctgccgcccggcttctcaccagcttcaccagccaggccgtggacaggacagttaatgattggacgtcatccaatgagaaagcagtgatgtctttactgcacacgttggaggagctgaagtctgacttgagcaggcccacctcctcccagaaaaaaatggcagcagagctgcagttccagtttgtggacgtcctgctgaaagacaatgtttccctcacaaaagcgctcagcacggtgacccaggagaagctggagctgagcagagccgtgtctaagcttgagaagttgctgaagcaccatctgcagaagggctgcagcccaagcaggtcggaaaggtctgcttggaagccagacgaaacggctccacagagttccctgaggcgcccagaccccggccggcttccaccagctgccagcgaggaagcacacaccagcaatgtcaagatggaaaaattgtccctgcattacttgagagcagagagctttagaaaagctctgatttatcaaaagaagtatcttttgctgttgattggtggattccaggattctgaacaagaaacactctccatgattgcccatttgggggtatttccttccaaagcagaacggaaaatcacatctcgtcctttcaccaggttccgcacggccgtcagggtggtcattgcaatattaagattacgttttttggttaagaaatggcaagaagtagatcggaaaggagctctggcacaaggaaaagcccctcgcccagggccccgagcacgacagccgcagtctccacccagaaccagagagtcccccccaacccgggatgtaccctctggccacaccagggaccctgccagaggccgcagactggcagcagcagcctccccacacagtgggggaagagccactccatccccaaattcaagattagaaagatccctgactgcttctcaagatccaggacattccttgacagagtatattcaccatttagaagtgatccagcaaagattgggaggggtactaccagattctacttcaaagaaatcctgccgcccgatgattaaacagtgaataaaatgccgtggctctttcctgcgacaattctatttgaggaaaagatttgtttttcccttttcccaaggaagctcgtgggacagcatgggcactactcttcatgtgcggggacaccagcccccagatgccttgaattaagtgtcctcacctttatgcatgactgcaaagccagctggagcattttctatggagcctccgtaggttttaggcccatgaccttcgggaggggaggggcactcactcccatgagccctggctgtgtgctgttgtgtgcctataggcagatccatccttcctgcctccaaggaggatactcagagaattgctttcctgttgttttgtttattttcttaacgtgtacagatggaaacttcatttaaaaataaaacccaaacaactcaaaaaagaaaaaaa

SEQ ID NO: 155784 - DNA, 5675 bp, Homo sapiens
ggcgccgctggatggagaggttgagttgttacaacaaaagttgagagaaaagttggatgaatttaatgaattggctatacagaaagagtcggcagatagacaagtgttaatgcaggaagaagaaattaaacgtctggaggagatgaacatcaacatcaggaaaaaagtggcccagctccaggaagaagtggaaaaacagaaaaacatcgtgaaagggctggaacaggataaagaggtgttaaagaaacagcagatgagtagcttgcttctggcgtccacgttgcagtctacactagatgcaggcagatgtcccgagcctccttcgggcagccctcctgagggtccagaaatacagttagaggtgacacagagagcactcctgcggcgcgagagcgaggttttggacttaaaagaacagctagaaaagatgaaaggtgacttagaaagtaaaaatgaagaaatactacatctgaacttaaaattggacatgcagaacagccagactgctgtcagcctcagagaacttgaggaagagaacacgagcttgaaggtcatatataccagaagttctgagattgaagagctgaaagccactattgaaaatctgcaagagaatcagaaacgattacaaaaggagaaagcagaggaaattgaacaactccatgaagtcattgagaagctgcagcacgagctgtccctcatggggcctgtggtgcacgaagtcagcgacagtcaggctggcagtctgcagagcgagctgctctgctcccaggccgggggccctcgtgggcaggccctacagggcgagctcgaggctgcgctggaagccaaggaggccctgagccggctgctggctgaccaggagcgcaggcacagccaggccctggaggccctgcagcagcgcctccagggcgcagaggaggctgcggagctacagctggctgagctggagcgcaatgtagccctcagggaggctgaggtcgaagacatggcctcccggatccaggagttcgaagcggccctgaaagcaaaggaagcgacgattgccgagagaaatttagaaatcgacgctctgaaccagcggaaggcggcccactctgccgagctggaggccgtcctgttggccttggcccgcatccgccgcgccctggagcagcagcccctggcagccggggcggcgcctcccgagctgcagtggctccgagcgcagtgtgcccgcctcagccgccagctgcaggtgctgcaccagcggttcctgaggtgccaggtggagctggacaggcggcaggcccgcagagccacagctcacacacgggtgcccggggcccacccacagcctcgcatggatggtggcgccaaggcccaggtcaccggcgacgtggaggcctcccatgatgctgctttggagccggttgtccctgacccacagggtgatctgcagcctgtcctggtgacgttgaaggatgcacctctctgcaagcaagaaggcgtgatgtcagtgctcaccgtctgccagaggcagctgcagtcggagctgctcttggtgaaaaatgaaatgcgcctgagtctggaggacggcggcaagggtaaagaaaaagtactggaagattgtcagctgccgaaggtcgatctcgtagctcaggtgaaacagcttcaggaaaaactgaaccgtttgctgtattccatgaccttccagaatgtggatgctgccgacaccaaatctctgtggcccatggcctcagcacacctgttggagagcagctggagtgatgattcctgtgacggagaagagcctgacatatcaccccacatagacacatgtgatgccaatacagccacggggggtgtaactgatgttatcaaaaatcaggccatagacgcgtgtgatgccaatacaaccccagggggtgtaactgatgttatcaaaaattgggattccttgataccagatgaaatgccagattctcccattcaagaaaaatcagaatgtcaggacatgtctctttcttcaccgaccagcgtacttggtggctcccgccaccagagccacactgcagaggctgggccccggaagagcccggtcgggatgctggacctgtcttcctggagctcccctgaggtcctcaggaaggactggaccctggagccctggcccagcctccccgtgacaccccactcaggagccctgagcctgtgcagtgccgacacatccctgggggacagggcggacacctcgctgccacagacccaggggccggggctgctttgttccccaggcgtgtctgcagcagcgctggcactgcagtgggccgagtctccgccggctgacgaccaccatgtgcagaggacggctgtggagaaagatgtcgaagattttatcacaacatcctttgattctcaagaaacattaagttcacctcctcctggattagaaggaaaagctgatagaagtgagaaaagtgacggctcgggttttggagcaagactgagcccggggtcaggaggccctgaggctcaaactgctggtcctgtgacccctgcttccatctctggaaggtttcagccgctgccggaagccatgaaggagaaggaagtgcgtccgaagcacgtgaaggctttactgcagatggtgcgtgacgagagccaccagatcctggcgctgtcagaaggccttgcacccccaagcggcgagccacacccaccccggaaggaagacgagatacaggacatctcgctccatgggggaaagacgcaggaagtgcccaccgcgtgccccgattggagaggggaccttctgcaggttgtgcaagaggcctttgaaaaagagcaggagatgcagggggttgagctgcagccccgactcagtggctcagatctggggggtcacagctccctgctcgaaaggctggagaagatcatccgtgagcagggagacctgcaggaaaagtccctggagcatcttcgcttgccggaccggagcagcctgctgtccgagatccaggcgctgcgtgcccagcatgcgcatgacgcacctgttgaattaggagaagctgcagcacttgcgcacggggctgagaagcgcagaggcgcgcgggagccatcatgagcaccagctgcgcaggcaggttgaactggtggcttataaagtagagcaggagaagtgcattgctggggacttgcagaagacgctgagtgaagagcaagagaaggcaaacagcgtgcagaagctcctggcggcggagcagactgtagtgcgagatttgaagtccgacctctgtgagagcaggcagaagagcgaacagctgtcccggtccctctgcgaggtgcagcaggaggtcctccagctgagatccatgctgagcagtaaggagaacgagctgaaggccgcgcttcaggagctggagagtgagcaggggaaggggcgtgccctgcagagccagctggaggaggagcagctgcggcacctgcagagggagagccagagtgccaaggccctggaggagctgcgggcgtctttggagacacagcgtgctcagagcagtcgactctgcgtggcactgaaacacgagcagacggccaaggacaacctgcagaaggagctgcgtatcgagcactcacgctgcgaggccttgctggctcaggagcggagccagctctctgagctccagaaggaccttgcggctgagaagagccgcaccctggagctgtcagaggccttgcggcacgagcggctcctgaccgagcagctgagccagaggacacaggaggcttgcgtgcaccaggacacacaggcccatcacgctctgctgcagaagctgaaggaggagaagtcccgggtggtggacttgcaagcgatgcttgaaaaggtgcagcagcaagccctgcattctcagcagcagcttgaggctgaggctcagaagcactgtgaggcgctcaggagagagaaggagcgagaattagaactgcagcgtcagcgtgacttgcataagatcaagcagcttcagcagacagtgagagacctggagtcgaaggacgaggtgcctggcagccgcctccacctaggttctgcccgcagggctgccggctcggatgcggaccacctccgggaacagcagcgagagctggaggcgatgaggcagcggctgctctctgccgcccggcttctcaccagcttcaccagccaggccgtggacaggacagttaatgattggacgtcatccaatgagaaagcagtgatgtctttactgcacacgttggaggagctggagtctgacttgagcaggcccacctcctcccagaaaaaaatggcagcagagctgcagttccagtttgtggacgtcctgctgaaagacaatgtttccctcacaaaagcgctcagcacggtgacccaggagaagctggagctgagcagagccgtgtctaagcttgagaagttgctgaagcaccatctgcagaagggctgcagcccaagcaggtcggaaaggtctgcttggaagccagacgaaacggctccacagagttccctgaggcgcccagaccccggccggcttccaccagctgccagcgaggaagcacacaccagcaatgtcaagatggaaaaattgtacctgcattacttgagagcagagagctttagaaaagctctgatttatcaaaagaagtatcttttgctgttgattggtggattccaggattctgaacaagaaacactctccatgattgcccatttgggggtatttccttccaaagcagaacggaaaatcacatctcgtcctttcaccaggttccgcacggccgtcagggtggtcattgcaatattaagattacgttttttggttaagaaatggcaagaagtagatcggaaaggagctctggcacaaggcaaagcccctcgcccagggccccgagcacgacagccgcagtctccacccagaaccagagagtccccccccaacccgggatgtaccctctggccacaccagggaccctgccagaagactgcagactggcaggcagcagcctccccacaacagtgggggaagagccactccatccccaaattcaagattagaaagatccctgactgctttctcaagatccagaacattccttgacagagtatattcaccatttagaaagggtcccacccaagaattgcgagggggcctacccccattctacttcaaagaaatcctgccacccgatgattaaacagtgaataaaatgtcatggctctttccctggcgacaattctatttgagggaaaagatttgtttttcccttttcccaaggaaagctcgtggggacagcatggggcactacctcttcattgtgcgggtggacacccagcccccagatgccttgaattaagtgtcctcacctttatgcatgacctgcaaagcccagctggagcattttcttatggagcctccgtatgttttaggccccatgaccttcgtgaggtgacgggcactcactcccatgagccctggctgtgtgctgttgtgtgcctatcggcagatccatccttccgtgcctccaaggaggatacacagagaatggcttcctgttgttttgtttattttcttaacgtgtacagatggaaacttcatttaaaaataaaaacaaaacaactcaaaaaggaataaaatttaatcactgttttgtttgtgaat

SEQ ID NO: 155785 - DNA, 766 bp, Homo sapiens
  misc_feature (1)...(766): n = a,t,c or g
gaattcggcacgagccacccccaacctcaagttgccgccggaagagcgcgagaagccccttcctcggcgctgccaacccgccacccagcccatgggaaccccgggctggggctgcttctggcgctgggcctgccgttcctgctggcccgctggggcgagcctgggggcaaatacagaccacttctgcaaatgagaatagcactgttttgccttcatccaccagctccagctccgatggcaacctgcgtccggaagccatcactgctatcatcgtggtcttctccctcttggctgccttgctcctggctgtggggctggcactgttggtgcggaacttcgggagaagcgncagacggagggcacctaccggcccagtagcgaggagcaggtgggtgcccgcgtgccaccaacactgcccaggactgcgggttgctggcttgtacaccgcagctgccaccgagacaccagcctctgatggctcaggaggacttgtggggagaggctgggggcaccatgtggtgggctctgtgcanatgttgcctctgcttggtgtgctgcagctcagggtgtggggccgggacccaccccctcctttctttaagtnctcccatgaagccgaggccgggccctcaggactcaaggaaacggtgagggtgctgcaataaggnccctccctgattgttcttattgtgtgtacttggnaaggagtgcttctggagtantaccagtgtaangaggnanagnctaancttgcctnggaaaannt

SEQ ID NO: 155786 - DNA, 577 bp, Homo sapiens
ttttttacatctcactactaattttatataaatatataaaagtgaatagccccatcctctcttgacctcaggggcagagtctttgaagtaccttcttccctgctattaagcactgggtggatctgactgcccagagagggcactgcctttccccaaggtcacacagcaatgaagggagacagatgcaggagaggggacctagatgggcaggcagccctgcaccgtctccttggagtcctgaggggcccgggcctcggctgcatgggagaactgaaagaaaggagagggggttgtggggcctgctggacacacagagaaaagttggttccgcaagcaggggggtgggtcccgagccccagcacacatgagctgcaggcacagccaagcagaggcaacatgctgcacagagcccaccacatgggtgcccccagcctctccccacaagtcctcctgagccatcagaggctggtgtctcggtggcagctgcggtgtacaagccagcaacccgcagtcctgggcagtgttggtggctgcagcaggccccagcgttcagatgagccgctcttccggcggccgc

SEQ ID NO: 155787 - DNA, 747 bp, Homo sapiens
cgacggaccgagggtgtcgagggagggacactttccatgaacctgagctaggtcaaagacgcccgggccaggtgccccgttgcaagtgcccctggccggagatgcggtaggaggggcgagcgcgagaagccccttcctcggcgctggcaacccgccacccatcccatggcgaaccccgggctggggctgcttctggcgctgggcctgccgctcctgctggcccgctggggccgagcctgggggcaaatacagaccacttctgcgaatgagaatagcactgttttgtcttcatccaccagctccagctccgatggcgacctgcgtgcacaagccatcactgctatcatcgaggtcttctacctcttggctgccttgctcctggctgtgggggctggcactgttggtgcggaagcttcgggagaagcggcagacggagggcacctaccggcccagtagcgaggagcagttctcccatgcagccgaggcccgggcccctcaggactccaaggagacggtgcagggctgcctgcccatctaggtcccctctcctgcatctgtctcccttcattgctgtgtgaccttggggaaaggcagtgccctctttgggcagtcagatccacccagtgcttaatagcagggaagaaggtacttcaaagactctgcccctgaggtcaagagaggatggggctattcacttttatatatttatataaaattagtagtgagatgtaacaaaaaaaaaaaaaa

SEQ ID NO: 155788 - DNA, 1046 bp, Homo sapiens
gcgaccgcagggcttccccgcctggcgcctgccctccaggcgtggggctacgcctgggcggttaccccgcagctagccccggccccatccccgcccagagccgggcgttcgtgtgggtccgtgggtgataattgagagcgtcagacccaggactgttcagggaggagccccggtcagactcccacgtgtgaagaccgggccccaagtggcaagggctcggccttggggcggggcagcttgggtccttggacgttgataggaagcggaagggggaatcgccgggaaagctgggcccaagtccaggtcccgcaaaggctttctgaagaagaaggaagggcgagtaaggttgcacctggaccgcttgatggttggccaaggattgctcaagcttgggccaggaagggcaagcaccttgcttgggggaccggtggctcctggcccccctctcatgccccaggacaccagcttgggttccagcttaagcagccacttgggaatcagagggaatgggggcagaacttgggcattcaggacctttgaggacaagttgaccccaacccgcccaccgccactatcaggccccggggaccggcacttgacagggaaaccttccggtcgtgagggagcactttcccaggggccgcagggacgacactctccagggaggccccagcaacaagcatcatcttcttgctgtgagaggtctcaccccgggctacctcctgtcactactcactgccctggggtccagtgggcaagttgcccagggtgggggtgcctagccaggtgcagtccccgccccgcctagtcctcgggcgtcgacgcaatgctcacctcgcctcttccccactaacatcccagactttaaaattcagtaaatcagatgcacgccgagaatacacttaattatttaaatgaacaatgggggggccctttaaaaaaaacccttgggggggccaaattttacgggggcaggaaaagtaaagttttttcctttttggggggtgaatataaaaacaacttgggaattttgggaaagaaccttt

SEQ ID NO: 155789 - DNA, 773 bp, Homo sapiens
ttttttttttttttgagatggagtctcactctgttgccaggctggagtgcaatggtgggatctcagcttactgcaacctctgcttcctgggttcaagcaattctcctgcctcagcctcctgagtagctgggattacgggtgcccaccacgcccggctaattttttgcatttttaatagagacagggtttcactatgttgtttaggctggtctcgaactcctgacctcatgattcacccatctcggcctcccaaagtgctggggattataggcgtgagtcaccgcgcccggccctcttgtcttctcttagcctacttctcagagtttgtttctaagtggaagcagtcctccaccaaagcactaccatgtggttttagaatgctctgccctgttttaacacctgttgagaaataaaatgtttggacttatgaagtaagccccaccaagacaaaatattgggatgtcaataataacctttttaaaaatggctggttcttcagacagagaaaataaaaatcaccatacatttctaccccagattaacttccaaaaaaacaaataactagctagacctgttcaggagtatggtagcccacatgtgtgtggggtcccctagttttcctcatttttgtctctgtcctgaccaagtaacacatggtgccttgacccagccagctgatgttttcctctgcaggtctgaaccccagcctgggccttgaacattcctaggcactgataacggtgcttaggttgttgctggaaacactgaaagat

SEQ ID NO: 155790 - DNA, 884 bp, Homo sapiens
cctacctgtccatacatcaggtctatggcaaagaggcttgtattccatgcgggcctgggagtaaaaacaatcaggaccattcggtttgctatagtgactgctttttctaccatgaaaaagaaaatcagagtttgcactatgactttagcaacctcagcagtgtgggctcattaatgaatggccccagcttcacctccaaaggaacaaaatacttccatttcttcaatatcagtttatgtgggcatgaggggaagaagatggctctctgtaccaacaatataacagactttacacgtaaaagaaatagtggcagggtcagatgattacacaaatttggtaggggcatttgtatgccagtcaacaattattccttctgaaagtaaggggtttccgagcagccttatcatcacaatcccatcattctggcagatacattcataggagtcacagttgaaaccacattgaaaaatattaatataaaagaagatatgttcccagttccaacaagccaaataccagatgtgcatttcttttataagtcttctacagcaacaacatcttgtattaatggccgatcaactgctgtgaaaatgaggtgtaatcctactaaatctggagcaggagtgatttcagtccccatcaagtgcccagcaggtacctgtgatgggtgtacgttctatttcctgtgggagagtgctgaagcttgccctctgtgtacggagcatgacttccatgagattgagggagcctgcaagagaggatttcaggaaaccttgtatgtgtggaatgaacctaaatggtgcattaaaggaatttctttgcctgagaaaaagttggcaacctgtgaaacggttgacttttggctgaaggtgggagccggtgtg

SEQ ID NO: 155791 - DNA, 2700 bp, Homo sapiens
gctgttcggtcaaggagtgcctgcaggccagtgccaagctgccttcagcccctgcttcagtctctctcctgtgcttgttggtggccaaagtctggaggaggctgaggtggcaggaagctgctttctcctgtgcttctggagagtatctagaaatgaagaaccaggtatgcagtaagtgtggtgaaggcacctattccttgggcagtggcatcaaatttgatgaatgggatgaattgccggcaggattttctaacatcgcaacattcatggacactgtggtgggcccttctgacagcaggccagacggctgtaacaactcttcttggatccctcgtggaaactacatagaatctaatcgtgatgactgcacggtgtctttgatctatgctgtgcaccttaagaagtcaggctatgtcttctttgagtaccagtatgtcgacaacaacatcttctttgagttctttattcaaaatgatcagtgccaggagatggacaccaccactgacaagtgggtaaaacttacagacaatggagaatggggctctcattctgtaatgctgaaatcaggcacaaacatactctactggagaactacaggcatccttatgggttctaaggcggtcaagcctgtgctggtaaaaaatatcacaattgaaggggtggcgtacacatcagaatgttttccttgcaagccaggcacattcagcaacaaaccaggttcattcaactgccagagttgcaaaataattgacccatttctgaaacgctttttttatgttgcagaggaaggatccagtgagtgtacagagcgccctccctgtaccacaaaagactatttccagatccatactccatgtgatgaagaaggaaagacacagataatgtacaagtggatagagcccaaaatctgccgggaggatctcacagatgctattagattgcccccttctggagagaagaaggattgtccgccttgcaaccctggattttataacaatggatcatcttcttgccatccctgtcctcctggaacattttcagatggaaccaaagaatgtagaccatgtccagcaggaacggagcctgcacttggctttgaatataaatggtggaatgtccttcctggcaacatgaaaacttcctgcttcaatgttgggaattcaaagtgcgatggaatgaatggttgggaggtggctggagatcatatccagagtggggctggaggttctgacaatgattacctgatcttaaacttgcatatcccaggatttaaaccaccaacatctatgactggagccacgggttctgaactaggaagaataacatttgtctttgagaccctctgttcagctgactgtgttttgtacttcatggtggatattaatagaaaaagtacaaatgtggtagaatcgtggggtggaaccaaagaaaaacaagcttacacccatatcatcttcaagaatgcaacttttacatttacatggggcattcccagagaactaattcagggtccaagataatagacggttcatcaatgacatggtgaagatttattctatcacagccactaatgcagttgatggggtggcgtcctcatgccgtgcctgtgccctcggttctgaacagtcgggttcatcgtgtgtcccctgccctccaggccactacattgagaaagaaaccaaccagtgcaaggaatgtccacctgacacctacctgtccatacatcaggtctatggcaaagaggcttgtattccatgcgggcctgggagtaaaaacaatcaggggaagaagatggctctctgtaccaacaatataacagactttacagtaaaagaaatagtggcagggtcagatgattacacaaatttggtaggggcatttgtatgccagtcaacaattattccttctgaaagtaagggtttccgagcagccttatcatcacaatccatcattctggcagatacattcataggagtcacagttgaaaccacattgaaaaatattaatataaaagaagatatgttcccagttccaacaagccaaataccagatgtgcatttcttttataaaacaatttatagacagataatagatatcaagtgcccagcaggtacctgtgatgggtgtacgttctatttcctgtgggagagtgctgaagcttgccctctgtgtacggagcatgacttccatgagattgagggagcctgcaagagaggatttcaggaaaccttgtatgtgtggaatgaacctaaatggtgcattaaaggaatttctttgcctgagaaaaagttggcaacctgtgaaacggttgacttttggctgaaggtgggagccggtgtgggagcttttactgccgttttgctggtggctctgacctgctacttctggaaaaagaatcaaaaactggaatacaaatattccaagttagtaatgacgactaactcaaaagagtgtgaactcccggctgcagacagttgtgctatcatggaaggagaagataatgaagaggaagttgtatattccaataaacagtcactactaggaaaactcaaatctttggcaaccaagactgctatcggtgtttttggtggcccctggagcttaggatatgtcatatcctgtcagtactctgagacaagatcaagttgtattatttctgtgcatgctaaaaatgaaattttagcgattgaagaggaataa

SEQ ID NO: 155792 - DNA, 1872 bp, Homo sapiens
aattttgactccaagagacgaattactgtccggaatctcaggattcgagaagatattgcaaaatatttgaggaatttagatccaaattctgcccactatgatccaaaaactagagcaatgagagagaatccttatgccaatgcaggaaagaatccagatgaagtgagttatgctggagataactttgttaggtacacaggagataccatttcaatggctcagacacagtgtaagtgtttcctctatgtcaagccattttatatcagctcataagacgtttgggattgtttaaagcttgttttcaagaagcatacagtaatgcagctgccaactcactaagatgtttcgaattactctagtgtttgcatgggaagcctaatgacaagggatctgaaagtgcatctaccaggcagatccttacaaagctagagctgttgtataagtcccttcaaagtcaaaaaaagaagatttcaaagaacagcagaaagaaagcatcctggaaaagtatggtggccaagaacatttggatgcccctccagctgaattgcttttagccccagactgaagactatgtggagtactcaagacatgggacagtcatcaaaggacaggagcgggctgttgcctgctctaagtatgaggaggatgtgaagatccacaatcacacacatatctggggatcgtactggaaagaaggccgcagggggaaccaaatgctgtcactcttttttcaagtattcctattgtactggagaagctgggaaggagattgttaactctgaggagtgtattataaatgagataactggggaagaatctgtgaaaaaacctcaaaccctcatggagctgcatcaagaaaaactgaaagaggaaaagaagaagaagaaaaagaaaaagaagaagcatcgaaagagcagttcagatagtgatgatgaaaaaatggggcatgttaaatcgaataaggcactgaacgcataggaggccacgccttcttcatgtcaaggagaccattgcagatttgatgagaggaagcggcctttacaatagcatgtattaaacttcaagaccttattgaagaggaaatggaggcatatagaatgaaaccgtcagaggccagatgaccccatggcctctttccttggacagtagcaactagtcagaagaccatccaagatagatgcagctgatacattcttttcagcttcttattgatgattgtagataggaaaaatccttgtttattcttcttgctgcctggctttaataaatattttcagatgcctcacagttaagttcactcctttccatactgaggaaacaagaaaagaagaagaggcacatgaagtgtgcttttgggaatagaatttaaaattggattaagattttatttccagttttttttatttatttatttttttttttgagacggaatctcactttgtcgcccaggctgaagtgcggtggcgcgatctcggctcactgcaagctccacctcccaggttcacgccattctcctgcctcagcctccctagtagttggggactacagggcgcccgccaccatgctcagctaattttttgtatttttagtagagacgcggtttcatcgtgttagccagggatggtctcgatcttcctgaccacaagcaatccgcccacctcggcctctcaaaatgctgggattacaggcgtgacacccgcggcctgggcctgtcacaggtttgttttttttttttctgttttttgagatggagtcttgaaaaaaaataaataaataaaaaaaactggaaataaaatcttaatccaattttaaattctattcccaaagcacacttcatgtgcctcttcttctttttcttgtttctcagtatgg

SEQ ID NO: 155793 - DNA, 2312 bp, Homo sapiens
  misc_feature (1)...(2312): n = a,t,c or g
gcgcaccagcccttaaggtcatcctgcggtacacctagaccgacgcccccgccatctggtggctggacccagagctgacctatggctgcgccaagcccttcgtcttcacccagggccactccgtgtgcaaccgctccttcttcccgtgctttgacacacctgccgcgaagtgcacctactctgccgtcgtcaaggcgccatcgggggtgcaggagctgatgagtgccacccggagcgcatacatggaggaagaaggcgtcttccactttcacatggagcaccccgtgcccgcctacctcgtggccctggtggccggagacctcaagccgggagacatcgggcccacgagccgcgtgtgggccgagccatgcctcctgcccacggccaccagcaagctgtcgggcgcagtggagcagtggctgagtgcagctgagcggctgtatgggccctacatgtggggcaggtacgacattgtcttcctgccaccctccttccccatcgtggccatggagaacccctgcctcaccttcatcatctcctccatcctggagagcgatgagttcctggtcatcgatgtcatccacgaggtggcccacagttggttcggcaacgctgtcaccaacgccacgtgggaagagatgtggctgagcgagggcctggccacctatgcccagcgccgtatcaccaccgagacctacggtgctgccttcacctgcctggagactgccttccgcctggacgccctgcaccggcagatgaagcttctgggagaggacagcccggtcagcaaactgcaggtcaagctggagccaggagtgaatcccagccacctgaggaacctgttcacctacgagaagggctactgcttcgtgtactacctgtcccagctctgcggagacccacagcgctttgatgactttctccgagcctatgtgggagaagtacaagttcaccagcgtggtggcccaggacctgctggactccttcctgagcttcttcccggagctgaaggagcagagcgtggactgccgggcagggctggaattcgagcgctggctcaatgccacaggcccgccgctggctgagccggacctgtctcagggatccagcctgacccggcccgtggagggccttttccagctgtggaccgcagaacctctggaccaggcagctgcctcggccagcgccattgacatctccaagtggaggaccttccagacagcactcttcctgggaccggctcctggatgggtccccgctgccgcaggaggtggtgatgagcctgtccaagtgctactcctccctgctggactcgatgaacgctgagatccgcatccgctggctgcagattgtggtccgcaacgactactattccttgacctccacagggtgcggcgttttcctgggagagccagatgtcacgcatgttacaccatcccgctgtacgaggacctctgcaccggtgccctcaagtccttcgcgctggaggtcttctaccagacgcagggccggctgcaccccaacctgcgcagagccatccagcagatcctgtcccagggcctggggttccagcacagagcccggccttaggagcccagcacgggagctgggcaaggctgaagcagacacagactcggacgcacaggccctgctgcttggggacgaggcccccagcagtgccatctctctcagggacgtcaatgtgtctgcctagccctgttggcgggctgaccctcgacctcccagacaccacaattgtgccttctgtgggccaggcctgccatgactgcgtctcggctctggccatgagctctgcccaggcccacaagcccctcccctgggctctcccaggcagggagaatggggagagggacctccttgtgtctggcagagacctgtggacctggcctccccactcccagctctcttgcactgcaggccctggggccagcccgcacacaccatgcctcctgtctcaacactgacagctgtgcctagccccggatgccagcacctgccaggtgccgccccggggcaagggccccagcagccctatggtgaccgccacactgtgccttaatgtctgccgggggcccaggctgtgctgtccctgcagcacgcctccttggnagggatctgagccaccctccccgcacagccctgcaccccgcccctaagggttggcagcctcagttggcccctggcagaggaacaaggacacagacattccctcagtgtggggggcaggggacacagggagaggatggttgtccctggggagggccctctggccccaggcaaccttagcccct

SEQ ID NO: 155794 - DNA, 851 bp, Homo sapiens
ttcatgggaggcgtaaacagagctgatgaaaacattgataagtatcgggcatcaatccgtggaaagaaatggtattcaagccctcttttgttctgtttcgaattggtcttacaaaatgcttggcaattgcataaaacatatgatgagaaaccagtggattttctggagtttcgtcgacgtgtggtatgccattatctggagacccatggtcatcctccagaacctggccaaaaaggaagacctcagaagcgtaacattgactcacgttatgaagggccataaatccaggtggatagtccaaaccagggaaaagcaaacccgatgccgctgaatgtcataagaacacaacttttccgatgtgaaaaatgtgatgttgcccttacatgtgaagtgttcccgttgaatatcacactgaatagcaggtgtcaccacctcctgagataagaaacatagttttatacattatgtacagtgtagcagtggttttgcctagtgttccaattttggattttcttttaacaatggaacataataaatttttttttctcttcaaatttttggtgcttgaatttttctagggaacatatatgaatttcatgcaaaaattcaaaaaattgtaacctcagacataaatgggttaaagatgttttcttagagagcacattgccttcttttaaataacaaagctgagacacaaatgaagactaattctgcttcctgctctgcacacacctttcattcttggctctgggcataattgtctatatcagtcttaatttactccatgagatctgcactcctaactgagggtatttcatctgctcagatgtgccaattaagtttacccagat

SEQ ID NO: 155795 - DNA, 1673 bp, Homo sapiens
aaaaagttttcctgtggtttaaaaaaaatctttcatgaaaagaattgtcaatcaacgtgacaaatttcattattgtcttattttaagaaactgcaacagccaccccaactttcaagcaccaccttgatcaacagccatcaacattgaggcaaaaccctccaccagcaaaaagattatgactcattgaaggctcagctgatggttagcagtaaaaaatattaactttaatcatctcgaccattcagtactcatctaatattctctataacaaaatgggaaatgcacataaagcacttctgctacatgctgaattatgattgttgtctccaggaaaagaacttgtgggaacgtttgagttgtaagctgaactaactagctgcttttttcatgaaataccgcttttactggaaagaactgacagataaactgaggtattcaaacctagatatttggcagacattttcgtgaaaataaatatgttcgtgccacttcaaggaacataattctcagtacttgttgccaataatgttggaattttcatgcaaaaattcaaataaaaaacaaacttaaaaccatcaagaacttggtgactttatgtggaagccagtgctacaatactttagcttcccaatacttaaaaacttttctgatgagattactagtgatattaacaatgtgattgatattgaataatgaaatgttttagcatttggaagatctgtttaattcagtaaatcagtattttccaaatgaccaatgcatgacatttcaacatcacgcacaggaaaataggcattcgaggtacagtcaaaaataatgagttttaatgtaacaagtacaaaatgtccattgaagtggtttcaaattccaaatagtaattggaaaatccaccactcgtgttttggggtagtagtatcgaaaaagaataaccaagataatttgaaaaggctattaaaaaatacttctcaattttaaaactgcatacagcaggtgctcattcatttctttgtaacattgatgagaaaaagactcccagccaggggcactgtctttgtggtgtttacgtgttctcgccacacctgcataggttttctctgggtgctgcagttcttgccacatcccagaggtgtgcacgtgaggtgaactgggggtgtcttccactgtccccagtctgagtgtgggtgtgtgagtggccctgtgatggaatggcgtcctgtccagggctggttccctctttgtgccctgagctactgaaaccaggcttcagctacacatgacccagaactggaataattaagtaataattatctttttattcatctttcttaaatgtatgtatagctcacatttatttcaatgtttaatattagaatacttttggcctttagaagcttagtgatttttttttttccttggccagaagtatgctttaggaacttaatccttattttttagcctctggtaaaattggttttgctatacgttgtttcacttaaaagtcctgattcccaagaacgcactgacagcagtgaggacttgctgcgcatgcgggaggccagattttcttatctgtgtgaagccagacatgaaagagatctgtcaacacataaaacaaaatcaaagtctgttttttgtctggaaaagatttttaataaaaatataacttatgttaa

SEQ ID NO: 155796 - DNA, 391 bp, Homo sapiens
  misc_feature (1)...(391): n = a,t,c or g
tgtagattcaatgcaatttcaagcaaaattacagcagactttacggtttttggtggttttttgctagaagttcacaaagtgattctaaaatgtaagtggaaatattacataatctagaatagtcaaaacaggttttaaaaagacacaattaagtgacttatactacataataacaagacttaatatacaagcataataatcaagacagagttgacaaaatatcgacataagaatggagaatccagaaatagacctgcatagatttgatcaaatgattttcgatgaaggcatcaaagtaattcaataaggaaaggaaagacttttcaaccaatggtgctggagcagattacgttgtatatgtttgaagttttctataacaaatggtcaaaan

SEQ ID NO: 155797 - DNA, 387 bp, Homo sapiens
caccttcccaaatttgatgacaaacatgaatctacaaatccaagaagctcaatgaattccaagttggaaaaactcagagcatcacagtaagacacctcataatcaaactgttgaaaatcaaaggtaaagaaagaatcttgaaagtagcaaaagctcatcacgtacaagggatgctcaataagattaagaggtgatttttcaccagaaaccactgaagctagaaaatagtgggatgacatattcaaagtgctgaaagaacaagtatcaaccaagaatttgatattcagcaaaactgttctttagacatgaagtttcattctcaaataaacaaaaatggaaagaatttgtcacaagcagacctcttctacaagacatattaaatactga

SEQ ID NO: 155798 - DNA, 494 bp, Homo sapiens
attagtccagtctggtggaattcctcatttaaaactcataaccagccggtgaggtcggtacttcgctcctcctcattctgcggaggggaaagcagcacggaaatgccctgtgactggcagcggaaaaggcgaccaccgcttgtgtatcttcagtttagatcttggaggcatatcaactgtggttctaaatggctatgatgtagtaaaggaatgccttgttcatcaaagcgaaatttttgcagacagaccatgccttcctttattcatgaagatgacaaaaatgggagactcattgaaaaagcttcagtcaacagaaagcctcagctacctcagcattttgttgatgcttatttagatgagatggatcaaggtaaaaatgacccatcatctactttctccaaagaaaacctaattttctcagtgggtgaactcatcattgctggaactgaaactacaaccaatgtgctacggtgggcgattcttttcatggccct

SEQ ID NO: 155799 - DNA, 514 bp, Homo sapiens
acacgatatatagcctatatttccatagaacgcccggaggataaaaaatctgaatctggatgcatctatatcctattggcttgttataggttatcagagcactggctactgttagtacaagatatatagcgtatatttcaatagaacgcccacataataaaaaatctgaatctggatgtatctatatcctattggctggttataggttatcctttattttattccagagggaaataactttaggtataattctaagaactgcataataacttgaatactttttctctgacaggacaagttcagaaagagattgatttacttatgggccctaatgggaagccttcttgggacgacaaatgcaaaatgccttatactgaggcagttttgcatgaagttttaagattctgtaatatagttccattagggattttccatgcaacctctgaagatgcagttgtacgtggttattccattcctaaaggcacaacagtaattacaaatctttattctgtac

SEQ ID NO: 155800 - DNA, 1474 bp, Homo sapiens
  misc_feature (1)...(1474): n = a,t,c or g
cagtctagatcttggaggcatatcaactgtggttgtaaatggctatgatgtagtaaaggaatgccttgttcatcaaagcgaaatttttgcagacagaccatgccttcctttattcatgaagatgacaaaaatgggaggcttactcaaattcaagatatggccgaggatgggttgatcacagacgattagctgtaaacagttttcgatattttggatatggccaaaagtcttttgaatctaaaatcttgggaaggaaaccaaatttttcaatggatgctattggaaacatacaaaggtaggaccttttgacttttaaacagtttaataacggatgctgttttcaaacataaccaatctgattcatttttgggaggaacgatttcactttatgnaaggacaccgatttttcaggcacatggattggagttattttaggtggaaaatgtggaactaagctgccagtgcctcagtcttcttgtataatgcctttccatggantgggcatcctgccttttggaaaacatcaacagctgtttaggaaatgacagctgtagtctatgattttctctccagactcattgaaaaagcttcagtcaacagaaagcctcagctacctcagcattttgttgatgcttatttagatgagatggatcaaggtaaaaatgacccatcatctactttctccaaagaaaacctaattttctcagtgggtgaactcatcattgctggaactgaaactacaaccaatgtgctacggtgggcgattcttttcatgggccctttatcctaatattcaaggacaagttcagaaagagattgatttaattatgggccctaatgggaagccttcattgggacgacaaatgcaaaatgcccttatactgaggcagttttgcatgaagttttaagattccggtaatatagttccattagggattttccatgcaacctctgaagatgccagttgtacgtggttattccattcctaaaggcacaacaagtaattaccaaaccttaattcctgtaccaccttggatggaaaaaagtaccgggagaagacccccagaaagtgttccccatccctgagcgatttcctgggaccagcagtgggatattttggccccaagaagggaagctttgggttccctttttccccctaggaagaagacattgtccttgggagaacactttggctcggatggaaatggtcttgtttttttccagcattgcttcagaggtttcatttgcattttcccacatgaactagttccagatctgaagccccaggttaggcatgacattgcagccccaaccctacctcatctgtgctgaaagacgctgaaactgcctgggatgttttcgggaacaagaatgtatatttgccttatccctgaacttggtttaatcaaatcaatgtgtgtattagaataaaagtcacagcatcaaaaagccaaatgaaaaaaaaaaaaaaaaa

SEQ ID NO: 155801 - DNA, 286 bp, Homo sapiens
  misc_feature (1)...(286): n = a,t,c or g
ctaagaatcccanggtctttgggagcgtccagcatgttaattagcgtatcattacatactgctatccctttccatttctttttgttccatcactcttctctcaacctgtgtttctttttttactgaggagttagtccccattagttcttgtatcacattttcatttgcacgacattactcgcaggtggtggggagcctggttcccagcattgcctcctcctagcccctctagtccagtttgcctcccttaccctcattttccaaacctctanggncanatagancc

SEQ ID NO: 155802 - DNA, 1569 bp, Homo sapiens
cttaacacccttcctgaggttcccttcacccctctctcttgccttccttccctttccctttcttcctgactagccccaagtcccttcatttgcatctgctatgcaatagtccctctcctttccttcttcttccctcagatttagctgatccttcctcccaccctggccttcctttcctctttcctcctcactctccccgtcatgctccctctgccccgccctcaaaaaaaaaaaaaaaaaaaaaaaaaaaaaaaaaaaaaacaacagcacctgtccaggcttccttaggtacatcttctttgtatccattgggaggctctgagactggccccacttggtcctaagaatcccaaggtctttgggagcgtccagcatgttaattagcgtatcattacatactgctatccctttccatttctttttgttccatcactcttctctcaacctgtgtttctttttttactgaggagttagtccccattagttcttgtatcacattttcatttgcacgacattactcgcaggtggtggggagcctggggcttttcggggaaccagggcttcctctggtccccagcattgcctccttcctagcccctctgagtccagttttgcctcccttaacctcatttttccaaacctcttgtaccctcctctccctcccccaggtgggtatgtaagtgtcttgaaagttcagtatgttatgatgggaccaataaattctgccacttcgggtttctccctaacatttcctggctccccagtttttcatgtgggggtaattcaactgaacatttcccatgggggtttcccctcccatctgcctgatccacctccatcctcccaccagggagagttggggggttgggccacaattgatcctcttgtgagaggggtgggctaccagtgtgtgtgtgggggtcatcactgccttggggaaggaagtggggcagggcagagaatccccccaatttcctggcctggaaatctctgggccttcacccctgctgggggtttgggattgaaaacccttcctccccaatttggggggggtgtttgccccattcaattgcccagctcctctggactggccccccctgaaatttagggtggggggtactaagtcaactgccaatgtgtgtaatgggactttgctgggaaaacgggggatgcttgccccttttccaggactatttgagcccagaagagagctgtcctctcatttgggtgaactgattgaggaagggtctattgtctttttaaatggcaccaatttttaaggggttttgagggtacagtccctttaacctggccacggggaggggggcccccaaactttcttccccccacacttctggttttctgtgtggagggggagcagggatatctaagctgtggtgtgaaagggtaggagagatgctggaggtgggggtgctgtgttctagaccccccatattatcccagtgtcccctgcccccctcttcccccaccccatgcccccaattctgtggcgcatccagattgtgaaaatgtacaataaatgtgtaatgagtaaccaaaaaaaaaaaa

SEQ ID NO: 155803 - DNA, 1042 bp, Homo sapiens
gggcgccggggccgcggccgggccggctccagggccggccgccgcggtggggcgcaggccgccgcgcttagtgaatcgaggcggcgggcccatccggaactatttcggacgttgccggcggcgccgccggcggcaggcggcaggataccgaccggcgccctacagcaggccaaaacaacttcccgacaagtggcagcacgatcttttcgacagtggcttcggcggtggtgggccggcgtggagacaggtgggaaactgctgggtgtccaatctggattttgggagtctcagaacgccgatattcaggaacctctttgctgaatttggggaacgctgaagaagggcggctgtgcactatgatcgctctggtcgcagcttaggaacagcagacgtgcactttgagcggaaggcagatgccctgaaggccatggaagcagtacaacggcgtgccctctggatgggccgccccatgaacattcagcttgtcacgtcacagattgacgcacagcggaggcctgcacagatgcgtaaacatgaggtggcatgactagaaaccgtggcgctggagggttttggtgggtgggtggatggcacccggaaaggcaccccgtggaggcgccccgtggaagaggcagaggtgccggcaggaattcaaagcagcagctttcggcagaggagctggatgcccagctggacgcctataatgcgagaatggacaccagttaaacagaccagcaaatccgcgtgcggaacaggacccaggcgtctccgtcttgctccctggttggggggcggtggctggggctgtgcggccaatgatggatttgtttcttttatgttttaaaataggatttaaaaactcatgtaaaggtttttttttttttccttttttttttttttaattctgaaacagacctgttttgtaccgagttatttttgggataaattttactggttgctgttgtggagaaggtggcgtttcccccttttccataataaaatagaaatgtgtgtaaaaaaaaaaaaaaaaaaaaaaaaaggg

SEQ ID NO: 155804 - DNA, 370 bp, Homo sapiens
  misc_feature (1)...(370): n = a,t,c or g
acctgcttcctctgcatccggggctggacctactgagggcttctgtgccaggcatcaggcccacaggctcctgggtggcctgcagggttaggtaggagaggtcagggcagtcccaacctcccagtgcctcccaggccagtccctgcctaggacctggccacacctgccatgcccttggaagattcctctntaagttccactcccactccagtgagggccacctgagacccacctgcgagagcctcccccagggccctgtcccccatctctgtgccttctccctaccaagggttcctccagccaggaggaagagctgggggcgacagggattgatgtctaggactcggcactggggctgacttcctgcctg

SEQ ID NO: 155805 - DNA, 669 bp, Homo sapiens
ttttttttttttttttttttttttgagacagagacttgctctgttgcctaggctggagtacagtggcgcgatcttgactgattgcagcctccgcctcccgggttcaagcgattcttgtgcctcagccgccccagtagctgggattacaggtgcacatcaccatacctggctcatttttggatttttagtagagacggggtttcatcatgttggccaggctggtctggaactcctgacctcaagtgatccgcccatctcggcctcccaaagtgctgggattacaggcgtgagccactgcacctggcccaaattaactacttctactttgatgaatgtcttcccactaaatatcattttattatacctagtaatattagccaaataacagtgtttaatacaactaatttatcagaacaaattacaactattcataataaacactacatataaaaatgatttttaaaagtctcagtattaacacaaatagaagaaacctaagagctgtcagatttctgcccactctttccattttccctctcctggtttggtttaaggaccccagatttattctggaaaatgcaacaagatgttgggtgaaaaatattaaaactaaatattaaacctaatacctgtaacttacatccaccttgatatgctgcttaattttgt

SEQ ID NO: 155806 - DNA, 1714 bp, Homo sapiens
aagctcctgacctcaagtgacctacccacccttggcctcccacagtgctggaagccactgcacctggctcagaatacttttttttttgagatgcagtcttgctctcatcacgcaggctggagtgcagtggcgtatctcggctcactgcgacctccacctcccgagttcaagcgattctccttcctcagtcccccaagtagcttggattataggtgtgcgccaccacgtacagctaatttttgtatttttagtagagatggggtttcgccatgttgaccaggctggtctcaaaacgcctgacctcaggtgatccacccacctcggccccacaaagtgctaggattacaggtgtgagccaccatgcccggcccagaatactttttaaaagaagagcaggttagaggaaagaaaaaaattgatgctgaatgtggtgatgaaagcatgtttctaaaatgggaagcagatgcttaaagaggaaagactaatctgggattttgccccatttctctggtttttcactcctatatttaattctcacaatcgtgtcgtcacatagtgcaaaaaacaaaattcttgtaaagtccccagggagttttatggcttggggtgaaagttttagcctgagtattttcttcctcttaaaaaaggtggggaaatgaggacattgagggaattaacatataaatgtctgctatggggtttaaggaggaactgggcgtatttggaatgcttcttacactaacactgtctcattgtaaaatataaaaccccttactctaactacatttttattcctcctggtagtgtggtatccagggcaacatatcacttctgctatgtaattctaaggaattctcatttctaggagtacctgaggccaaacaaatacacaacgggaaggctggcagctgttatcatcactaggcaattttgctccatccattatttactacccttggaacccagggttttcccgcccatgcttttggaaggcaaaaatcagtctcctttgcatgaaaaagagccttagatttttaaacatgttagttaccagaatgctaaaatacccagttggattacccaaaattattttggaaatcctatcccataaatggaagtcctacaacaaacaccataaaacagattacacctaagagctgagaaattcaaaggaactgaagattctgagagataaactgttcaagtcttagcaatgatactgcacttctctttgacaggttctgggcttaagttagaggccctactggttccaaaccatattcccgctgactttgcaagtaaaataaatttgattctgaaataggaaacaaaaaaaggagaaataaccgaatagtagaagaaaaactgtttgtaggaagacgattccagatggaatgatgtggacattgagttacccatgtcaataaaatactataaaccaaacttaaaatttgtgaaaataaggaagttggtaccttttgttgttacagtgtataaaaacaatttcggaactgctgttgcaaaaagacatatatagttttgcttccttctggtgttaagctgtttatatttcagtttcagttttaacttctaagttgccttgtaattgggactgtgtttcagcatcacaaaaaccaaatatttattaatggatgcatctgtatcagcaattaaaaaataaacaagtaaaagtgaaaaaaaaaaaaaaaaaatt

SEQ ID NO: 155807 - DNA, 645 bp, Homo sapiens
aacctgtttaggattcttccaaatgttcttcctggggtctttgatatttgtttgttacatcctgctgaagttcgactgtgtttttattttttcatccaacctggggtctttgatatttgtttgttacatcctgctgaagttcgactgtgtttttattttttcatcccaacttccatttttcactttttacatggattactcaaatcccttggggctgtccatgtcatctcttaggatttcttaaaagacattttaaatgtatggttaggttttatatttttattttttaaaaaagaaatagtcagtgttttcctcctttcaaccgagactatttctggattgtgtgctcctcgtcagttgacttgttttgcacacttttctttacttcatgtccccatcaacaaccgtcctgctccccacctcccccaggaaataaggggcctgctcctctccctactgtgaccctggaggctcttaagatgatgatggttttttttattgggctgagttcacgaattaggggcaggagctggaagtcgccctaggaacaccagatttcctggttctgttcaagaagagcattccctgttcggaataaactatttcttggacataccttctcaaaaaaaaaaaaaaaaaaaagtt

SEQ ID NO: 155808 - DNA, 1882 bp, Homo sapiens
  misc_feature (1)...(1882): n = a,t,c or g
ttaagagacagtgtctcgctctgtcatcacctacgctgtcacgtgcagcctcaaactcctggacttgtgatctcccgcctcagcttacctagtagctgggaccacgaatgtccacagatgcactccacctacccggctaattattttttgtataattagctcggggtctttaccatcatgcccagggctggtctctaactcctgggaaacattcttattgcaaaggtagattctgctgtcatggttctgttatgaaatttaggccaggcgcagtggctcacgcccggctaaagggaatttttgtagtggtccccagtacagggccagcatttcctatttctgtaacatacagccctataatctttgcaaagctgaagtacacttgaaataggcaaacagaagacaccttttaaacaaataagacccccccaaaacccttcaaatatggtatatgtacacaaaatattcaaataattaaaaattcacaacccctatggaatgctaactagtagccacaggaaaaataaagcatggaaaatatcctcatatatccagtacctcttctatctcaagcatgtccagacaaaaattaaattacacactaagccataaaaattttaaaggcaaaaccatcccacccaaaaaaaaggaaaagtgcttattaatggccattcaagcagtgggggtgaagcgggctgacacaatgcacagtatgggaaataagtaaccttggctacagtttccaaggacacggggctcctggctgacaagaagagctgaggtgaagctgaatgcagcgttgagccattttaataaaccgtttataaagaaaagcagcgcaaccgtgtcccacactccttggatccctattggtggcatctaattaaacatttcaagtattcaagagatatgaaaggtagtgaatacttttcatagcaaaggctttttttctgttgacatctgctgaattttcctgtggcacctcccaaggagtgactaagcctaccatccttggtaaggaaaatggggattatactacaggaattttatctgaggcattctggaatttctcaggaatagaaaccagcccagctaccaagtgagctttttaaaatgttgatactgggccactgtgacatgacaggcatctatatagcatttcaaaaaaatgcttcagcaatacaaattcaaactgggaaactttttttttttttttttttaagagacagtgtctcgnctctgtcatcacctacgctgtcacgtgcagcctcaaactcctggtacttgtgatctcccgcctcagcttacctagtagctgggaccacgaatgtccacagatgcactccacctacccggctaattattttttgtataattagctggggtctttaccatcatgcccagggctggttctctaactcctgggaaacattcttattggcaaaggtagattctgctgtcatggttctgttatgaaatttaaggcacaggcgcagtggctcacgcctgtaatcccggtactttgggaggccgaggcggggcggatcgcatgaggtccggagttcaagcctgggccaacatgggagaaaccctgccttttaccaaaaattacaaaattagctggggcttgggttggtgcaagcttgttaattcccagttattcacgagggttgagggagggagantcgttttgaacccgggaggttctataatctttgcaaagctgaagtacacttgaaataggcaaacagaagacacctttaaacaaataagacccccccaaaacccttcaaatatgtatatgtacacaaaatattcaaataattaaaaattcacaacccctatggattgctaactagtagccacaggaaaaataaagcat

SEQ ID NO: 155809 - DNA, 523 bp, Homo sapiens
tgggttcaagcaattctcctgcctcagccaccccagtagctgggattacagatgtgcgccaccacacccaactaatttttgtatttttagtagagccagggtttcaccatgttggccaggctggtctggaactcccgacctcaggtgatctgcccgccctggcctcccaaagtgctgggataacaggtgtgagccaccacccctggcctatgagtgctttaaatagcaaaaatgtgagatgaaaaatggtagttctatcactgccaacagttaaaagataatgaaaccttacattaattcatattagggtaagtaccaagtttgcctctattatgtgtgcccaagtaagcagctctctgaaaaattatttaacaaatgtgctaagttaaaaacattctacttagcagattgagataacaaagtatttcctttagacttttctctcttagtgtgaagcatgatgatttagggtggggaatcgtaatgaggcataaatcctatgcagtttgtaaacaggactatg

SEQ ID NO: 155810 - DNA, 851 bp, Homo sapiens
tctcccgagacagggtcttgctctggcgcccaggctggagtacagtggcatgatcttggctcacttcagccttgacttgggctcaagtgatcctcctacctgagccttctgagtaactgggactacaggtgtgcactcctcgcctggctaattttttattttttgtacaggcaggatcttgccaccttgcccaggctggtcttgaactcctgagctcatgccatctgcctgccttagtctcccaaaatgctgggattacaggagtgagccaccatgcccgggctggcagttgcatggaagagaacacctctttatggcttaccctctagaatttctaatttatgtgttctgttgaaatttttgttttttttacctttattgaaacaacaaaaagtcagtattgaaacatatcttcctgttttctgttgtcaaatggatggataatgtgccatgatgttttatatatatcattcagaaaaaggtttatttttttaataacattctattaacattattttgcttgccgctggcatgcctggaggaatgtatttggctttggattacacaataagttttttgtaataaatttgacctcattaaaaacctttttttttttaaaaaaaaaaaaaaaagaaaatctcattagtgaacttatcttggcagctgagtacttaaattctttttaaaaagataccctttggattgatcacattgtttgacccagtatgtcttgtagacacgttagttataatcaccttgtatctctaaatatggtgtgatatgaaccagtccattcacattggaaaaactgatggttttaaataaactaattcactaatattaaaaaaaaa

SEQ ID NO: 155811 - DNA, 8862 bp, Homo sapiens
aaagtgtatgttctggtatttttaattttcttactgggtccattttacttaaaaaaaaatataaaacatttttaatgtatcttagaaaaattagcaaaaaattgagaaagttgagcatattacattgtacaatgttttcatacgaatgttttaaaatcataaatatttggtttcccctcaacatagcacatcacaaaaatacatttcaaaaacttttttcatatataattcctgtaaatgatcatatccctacttattaaggaaaacacctgatgacaagcactcaaacactcttgaaattttctgtacagtaattacaaaagtaaaaccaagagttctgttggccctttaacaggtgaaaccattttaaatagtatcaaaatataattccaaatgggatatacttagttcatttctgtgctatctttgattcacaagtatctatcttagccaaagcactgtttaaaaggatattgcctcctagacatagtgccactgaaaaccaagatgtaaatcggtaacactatgcattaaacagaaagcttttgcacaaccacatatgtaaccgcttagtcgtatcaaggtccacatgtgaccagaaagcaggcagtccttaggtggatggccaggggccaggcagtgtgaggtctccaagaacccagggctagagcagctaagccccaggtcatgttatcagctacagctgtggaataagccaggtttaaagaaggacattctgcaaaagtgcaggacctatttcacaacttctagaagtagaaattcacatattccatcatgatcctccccaccatgcagagactatttgactcctaaggccacactgtttccatcccatagatttcacagaggtgattaggttctttgtagaatactttttcctcattctggaatgagggatactggagtcttctggtgtgatgtgcagtcaaaccacaggaaaggttccattccttacctaagtctcgtttgtctaatacacctgccagctactgaataaaatgataatactgataaatggctgggcagaaatccaacacccaaatcagctgtcaaatttcaaaggcacatgatacaaaaatattttagacaatacactttataaaggcaactataagaaaccgttaaagttacatttttattaaacagccaaaaatcttaagacaaatacctacagaccatttcttcattggcaaatattttccagtcataaaaggtgataatttatgggattatattccaataatttatgggattatattccagtttcctctcatgtaaataaatacatacactgaatctctaataccactctctctagatgtatacatctatttggaattgctttcttagtatgcactcagcaagcactagcataagaacacctgaggttctctgtcctcatttaatacctgtaagagaaaaggactttattctactgaattctgccctttttttgcaacaactgaattatccccatatttatttacaattttaagcttgattgctgtccacggagttactgttgcttctcaattataactagtgttagaaggcttgatttcataaatgttctttttaatccaaagatagatcatatatgaaaaccttcctcaatactcctttcaaatcagatgcatataaactatgatcccaatttccctgttagacgtatttctgttggatatttcctccgttgtcaccacagaggaagggaaaaagcagaaaagctgcccacctaacaaaggctaacataatggctaggctaatatattgacatgctatcatctttatgatgttttgaatctaactagcagacatacagtcaacttcctgttgaccatgtgcatctaatctgctttcttaattatacaaataatttttatttcaaattagcttctttctactactcagtataatcctctcacagcctggcatatacttggtagcacatcattcactagagagagtacgagagaaaattaggttgacaatatggggcaaaggggtagtctcctttaaggtgaggggaaaggagatgggaatgaaacatgccaagtgtatgatggttagggaaagaaatatcttagtagaagctagaaaacctctactaacaggatcacattccaaaagggcaaccaggaaatggcaatgactccatgacttctctgtcagagcaccaatggtcaaaggcattccatgtcaagtgtcaggaaatggaaagcgaaccggccaatctagtttaacagcacatactcggaaaaggaaacacgctgccaaaggaaagagctgacatccagtccacagaggttctgagtacccagtggcagtgagcccctccaaactctgcagagctgactgtgctgtctgcaccctgcctcatttggggaagaatctgagagagctaaaagacaaatttcagaaggtgatgttttcaaagaaagagtaaacaaacagcttgacaatgttgactttttttttcttttcaggtaacccttgtttgcaggaagataaataagaaggcttccttaggatactgacccacttagagaggcacagaaggaagaagagttaaaagcagcaaagccgggtttttttgttttgttttgttttgttttgttttgagatggagtctcactctgttggcccaagctggagtacaacggcatgatctcagctcgctgcaacctccgcctcccacgttcaagtgattctcctgcctcagcctcccaagtagctgggattacaggcgcccgccaccacgctcaggctaattttttttgtatttttagtagagacagggtttcaccaggttggccaggctggtcttgaactcctgacctcaggtgatccacccgcctcggcctcccaaagtgctgggattacaggcgtgagccaccatgcccagccccagcttgatcttgaacctcctgtgtgtgggcagagagacatggccctgctactgcttgaacggcttccggagacagtgacttgtttcctttttccctctgaactatgccgtagggccaggtgagctgctgtgaaggactcattcttggtagccggcagttactggcaacttgtgagcttggtgggctcctactaacgcacctgggacaccaggctgctgggctcccctctaggcagcctcccctccaggcagcctcaccagcagctcccctgagccatggagaccccagaggtccccgtgggctcgctaatcgactttgggcctgaggcacccacctcttctcccctggaggcaccaccccctgtgctgcaggacggcgatggctccctgggggacggtgcatcagagagtgagaccactgagtctgcggacagtgagaatgacatgggcgagtcgccctcgcacccgtcctgggaccaagaccgccgttcctcctccaacgagtccttctcctccaaccagagcaccgagtctacccaggatgaagagaccctggcactcagggacttcatgcgtggctacgtggagaagatcttctctggaggggaggacttggatcaggaggagaaagccaagtttggagagtactgcagcagtgaaaatggaaaaggccgggagtggtttgctcgatacgtgagtgcccagcgctgcaactccaagtgtgtctcagaggcaaccttctaccgcctggtgcagtcttttgcagtggtgctgttcgagtgtcatcagatggatgactttgggcctgccaagaacctcatgaccatgtgcttcacctactaccacatcggaaaaccacagctgctgcccccggagtcccgggagaagcccgcgggcagcatcgactcctacctgaaatccgcaaacagctggctggccgaaaagaaggacatcgccgagcggctgctgaagaacacctcggccaggactgagaatgtcaagggcttcttcggggggctggagaccaagctgaaggggcccctggccaggaggaacgaggaagacgagaacaaaccccaggagaagcggcccagggctgtgaccgcgtacagccccgaggacgaaaagaagggggagaagatctacctgtacacgcacctgaagcaacagcccatctggcacactctgaggttctggaatgcagccttttttgacgctgtccattgtgagaggacaaagcgatctcccactaccagaggggatgctggagaggaggaggagaagagggagaagtggtgccacatgacccaggaggagcgcgacgacagcctccggttcaacgagaacatcaccttcgggcagctgggcacattcacgcacaacatgctggcctttggactgaacaagaagctgtgcaatgacttcctgaagaagcaggctgtgattggcaacctggatgaagagcaatacaagctgcttagtgaccacattgagcaaatggccactgagtaggccccagaggtcgcactccgcaggaggactgaggccatgtgccattctcccgggcccagcgcccggccgtcaccccacccgatgacctgcatgaagccagcagcacccagagccactcctgctgccctagaactagcggttagaagaatccgctgttcctccctcatctcctctgcctgtgtctgcgacccccatccatgtgccaaagtgtcccttgggtcacacagctaaagccgaggtgaccagttgtaccccgagtgccaggcttgtgagatgagaccaagagggaggaggggaaggactccatgggccatcgtgggccaagggctggcgagggtgggggtgggcaagggatgcaggcaggacagccatgaggtggggctgcagccggcacacccagtggtggagggccggcgctgccactcacggtgggtggccgtgggccaccttccctgcaatgggtgcacacgcggctcccatccagccctctcagcgtggggctgtggctggtcctcactattccccagtctcccgctgtggggcaggaacaggaagtgacgggaaccttgaggaggaaacgcctgtgttagggagagagtgggtgcggtgtagaggatgctcttggccggctggagcaagacctggctcccaccagagggacgtgtgtgtgcctgcagacggcccgggagctgtgtgtctccgccagagtcacagcagtgccgaggtgtccgcggcagaccacacagaccgtctgaaatgcgcccgcctggcggacagctcccttctgaagcagagaagcctccatggtcacgaagcagcgttgtgctgtgtgtccctcgcaagaagcacaggaaagagaagtttctttagtagccactagacaaccaccctttctgaaagcaaacagtgctgctctttattccagacaaggcaggaaagtctgagttgggagtgacagtggctggagagaagcagatctgtgcaacgtgcagggcaagccagtggcgtggcctctgcctctaagcgctgagcattgggccccttccccaccagacctttgtagctcctccagcctctgcagagactcccttcacctcgcacttactgcctgggaaccacggcccttctcttctgtgggtctgcaccaggtactccaggccagcccatgggcccggggcctgaccccaacacctgcatgctgggtccagagccttctgtttcaccgtgcgtggacactgctaggccgcctggggtcccctgcctcctgcctgtcgctgccgtggtccctgactgcgaaataggcccgcggggctctccctcctcctgccatcctcccctcccgcccttcctggctacctcctctgacatgcggtcagataagtcccgtcttgtttgtgagtaccacagaaacgcctgagagtcacttacccggccactgcttggaaggtttccctccggggaatgcctccctggaatgttccagagacggaacattctctagagacaacagtctgtgctgcagattggttggatcacagaatgtgtgtctggggcattatctgaaacgtggtgtcatctgatgcatttggaccatatgctgccagactgcagaacgggggagccggggctcagggcccctgactgcatggtgcatgagtgatctcagcctagcgatgccgctggccagaccgtgaccatgctgccagtgtgctcgccatgagctgggtcagggctggggagttgtgcaggctggggtgacccttcccccatcattgggccccaacgggcatgtctccaccgaatccatttagagaaatgtcagagcgaggggtgtgtggacacccctcgctctgatgccaactgcagataatacacacctcctgcagcgtccagccacggctccagggcactgctctcctccttgcaccggtgaaactcaggccacactcaagggctgactgtccaggcgctcccttcagccgcctcgtcgtcagcgttcttagtcatgcattattcgtgttagctgaaatgcattcagactttgttctgcggtgcccacaggacttacccctgtatgtacaggatttttgtatgaaagttttgtttgattctgagactctcttgggaacgctggagagcttgtgcacagcctctggaaggaaaggcagcgctgacttcgttgggcttttttccaagcactttaacttcagaaatggtcttgacacttttttctccacatagactcttgaaatagccatttcaggggaggaaagggttggggttttctttgtttgtttgtttgtttccccctttactacctgttcttgtagatctagctcctcagagttggaggaaggctgacagagaaggtctcctctgtgctccatccacacaggatgccggagagacagccccttgtgctgtgagcagagcaggcagtggctctggaggctgcctgtggtctccttccagctgtggctgacagtggctctggccagggttgcttggagaaggctcagtgtgcctgggacagggcttaccacctgccaccaaggtttcctctcttcccccaggacctgggcagagcaggcatgagctgggctgtggtgcagagcaagcagacccagccacactgctcaaaggtccctgcgtggggaggtgtcacaccaggggcacacccagggccacctgggtgtaggagagctctggtggcccctccgtaaactcaggaagtgtcaggtgatttcctagggagaggttcccagtcccagcaggcagaatgcccaaaaccaggagcacgaaggcctgtcatccatggggccattgcaggcaccctgccgcccgaccttgagggctgtgccaatcctagtgaaccaaaatgcaaacaactcacacaagtgaaaagctccctgctttgaaaacaggacatgttgacaggcagcatggtatgtttttagcctttgttacagttttagcaacattgatgtctaagaggggccgtggtaatagattgcatctgccctgtgcatgcgcatgtttaaccacaggccagagaactcaattctgatgtcgtaagttctctgtaagtgaaatggggtagactgtatgattttcctattgccaaaagaaagaaagggggccaaacagctctgaaatttccaaaaaatggctagagggagagtccagtttctgagctctgtacccaaattaaaatcctgatgttcaggttaatccaagcaacacgcattgggtttaaaaccagcaccgaggcccagtgggggaatcacagacatcaccaagtctcgtcttctttccttcctgtgagttgaaaccaaacaggcctctcgctcactcctcccagcccagtaatgctgaggagttcagttgtgaggaaagaaggctggagctgtgagattcgcttttccctaggctgttccgcgtgggttaccttatcaccctggagcacttggtattccagacccctgacatgaggaatgcaggttcacactgtaaagagtttgtgaaaggtttcagtctaactggggttccttagctggaagccagggctggaagctacaggcctgaccttcctgggtcccactatctgttggcattttttttttttttttttagacggagttttgctcttgttgcccaggctggagtgcagtgacacaatctctactcactgcaacctccacctcccgggttcaagcaattctcctgccgcagcctacctaattagctgggattacaagcacatgccactgcacttggctaattttttgtatttttagtagagacagggtttcaccatgttggccaggctggtctcgaactcctgacctcaggtgatcccccccacctcagcctcccaattacaggcgtgagccacggcccggccagaaacatgtattttagtatagtcaattctataatagtgaaaaggaataaatagtatcattaaaaaatcaaataactaattggaaaattgtctgagaatcgttgctgtgaaaccacttcgatctttgctttagagactcccgctgtcaccatggcactgaacggacagttctgtaagctccattgtaatttaaggcattagaattctcatttcagaactgaatacaggatctggcataataatgcttcagaatgttcatttatttccaaggatttaaaaaattttccataatatgagattctgtataaaagtgtgctgggtgatatggagcgtagtacaatggaaaaaactataggctttgaaatggagggatctggatcgaaatcttgattatggatcctctggcaagtgatttcctttccggtcattagttccccaatcagtaaaacaccttacacaggttgtgtccacaaaggaaagaattttatttattttattcatatatgtatacacccac

SEQ ID NO: 155812 - DNA, 436 bp, Homo sapiens
tttttttgagatggaatcttgctctgctgcccaggctggagtgcagtggcacaatcccagctcactgcaacctccgcttcctgggttcaagcaattctcctgcctcagtctcccgagtagctgggattacaggcgcgcgccaccacacccggctaatttttgaatttttagtagatgcacggttttaccacgttggccaggctggcctcgaactcctgacctcaagtgatctgcttgcctcagcctcttaaagtgctgggattacaggcatgagccaccacggctggccctaggcaacattctaaccaccctgcaaggatgttatctttcccctcccaaattcccatgccttttgcattttgctgatagctactatgttctctttgacatatatttattggcatacctggtttacatactcctttctgacagaaat

SEQ ID NO: 155813 - DNA, 414 bp, Homo sapiens
  misc_feature (1)...(414): n = a,t,c or g
ntcataactaccaccaagtcctgtttattataccccggaaatatccctgtgctctctgttctatatctccctctgcttttagagcagtgttttcaaatttggctgcatattcttatgtccacgttgcacccaacaattaaatcagaatcactgagggtggtgctcaggcatcagtagtttttaaaactccccaagtgtgctgggcacggtggcacacacctgtagtcctagcactttgagaagcagaggtggttggatcacttgagtccaggagttcaagaccagccagagtaacagaaaccaaagaggctgtaacttagtttggtctctcaaactaacgtcaattcttctgacatttgagctggattctataagacaagaagaaggcaaactagttaggaggtggggaagacg

SEQ ID NO: 155814 - DNA, 416 bp, Homo sapiens
cggacgcgtgggcaacaacaaaaaatttggaggcaggatctcgctctgtcgccaggctggagtgcagtgacacaattacagctcattgtaaccttgaactcctgggctgaacgattttctcagctcgacctcccaagtagctaggactacagatgcacatgcctggccaattttttaactttttgtaaagacgagtgtcttgcaatgttgcttcggctggtcttgaactcctggcctcaggggatacccctgcctcagcttctcaaagtattggaattacaggtgtgagccattgagcccagccagaatttgcttctttagagtcctgccttcagctctctacttagaaatatttgtctttgccatctctgtatatctgaaatcctaatgagtaaatgtgattccctccataaagc

SEQ ID NO: 155815 - DNA, 1064 bp, Homo sapiens
gaacatgtaaaaagggaaaataatcaatggtagctttttaataggaacaagagactgactttaccttatatatgactgcaatacagcaaggagttctgcaacaggaaattccagaactatgtcacacatgctaagcaaatgaataaattatattaagtaactaatcaggccaggcaagtaatgtccaaagaatgtcacagctataaatgagagaataatgagcagaatataagaatatagggtgaatgaatgaattacaaaaaccagctgttattttaaaatagtctaatgtgtatatacaacaaatagaatatatatgaaaattaaaaaaacaaggcaagaagttttttttaaaattttggtccatctagtcttacattgtaagaatgtagtaccttgtgaaaaataacgatccatcagtaaaaatttaaaaaacgattcactgtgaactagagatttagaattcaaactgtccaagatgaaaatgtcatctcaagatccacttatgagtaattgttaaagtttttggaattttcatgctaggaggtgaaatctgttgcaaagctgaatttataaggttaggggggactgtccattaagaatacttcttctttacacagagactaatggcttctttgatggtccaaagcataggcacctgaattctgaaacattatccatcacaaatctccagcattcttcagaggaaacacacaaggcaactttcagcttctttgattacaaatgccaaagttttttttcaggctagtagatttaatgtttcatcccacattttagccctgctacaagaaaatatcttttatttcaatacaaaaccagtgatttgcaagcctggctggtaatcagaatcaccttttaaaaattataaattgccagccaggtgcggtggctcacgcctgtaatcccagcactttgggaggctgaggcaggcagatcacgaggtcaggggatcaagaccatcctggctaacacggttaaaccccgtctctactaagacatacaaaaaaattagctgggcgtggtggcaggaacctggtagtccc

SEQ ID NO: 155816 - DNA, 388 bp, Homo sapiens
  misc_feature (1)...(388): n = a,t,c or g
aagaagatgtgaatagatggagagacataccaagtccatggattggaagagtaagaatagtaagaatgtcagttctttcccaacccaattaataatacatatattaatacagaattcctcatattgatatagtattaatacaggaatactagtattcctatcaaaatttcaggaaggttttttgtactattaagggaaaatgaaaattgaagctgaggtttggatatacccctaggccaactgcctgtagccatgtaactgaaacttaagctttcctccctcagtgtgatagctttacaaagaaagcttatgcagctccacatgcacagtagggaacaatattcttcctcattcatgctttataaactgtgttgtaactgctgtgaan

SEQ ID NO: 155817 - DNA, 449 bp, Homo sapiens
gcatatgacgaaacaactggacaactatggcctgaaagttattggggattccttggtcagaggatggggtttaaggaatatggaagatatccctgggtccttctgagaattctccttggaagccaaaatggggggttaatgggggtttagggcagtttaaggaacaattggatagcctgggctctttaaataagtatttttcgagcaaccttaatgaatggagtggtaggtagaatagaaagctatggcgaaatcccatctctactaaaaatacaaaaattaggtgtggtggcgcacacctgtaatcccagttactcaggaggctgaggcatgagaatcacttgaacccgggaggtagaggttgcaggttgcaggttgcagtgagccaagatttcatcactgcactccagcctgggcaacacaggaagaatctgtcttaaaaaaaaaaa

SEQ ID NO: 155818 - DNA, 1945 bp, Homo sapiens
tttcgtgtagcctcagaaagtgcatggtaaagggaaaccagatcatgctgggcacactaccatgcagaatcctcaaaacaccagaaagctaagttgaaagacagtcgaaaagccagaaggagtatcgagctcatcgggcctgggagcagtcagaaggggggggacatttgttctctcatccacttgagcagcaaactgggcatattgtgctactcaaaaacagggaacatgggaggttgggagggagggatgcagctgagagttagctctgaaaactccatgggcaagtccagcagggagagggctgctgctgaccttccccagggtagctgctggcatgagcttccaggaaggctcataaacacaaggatctcgctcaagccccggcacgtctggaatctcagctcggtgctttgccaggtggtgaagaaggtgaagtccatgcagatgttccacatgcccatcacttcagccatgcaaggagaccggctgggcatctgcgtcacccagtttgaccctaagctgctggagcgcgggttggtgtgtgcccccgagtccctgcacactgtccatgcggccctcatctctgtggaaaagataccgtatttccgggggcccctgcaaaccaaggccaagttccacattacagtgggccatgaaacagtcatgggccggttgatgttcttcagtcctgctccagataactttgaccaggagcctatactggactctttcaacttctctcaagaataccttttccaggagcagtacctgtccaaggatttgacaccagcagtgacagacaatgatgaggccgacaagaaggccggccaggccacagagggccattgtcctcggcagcagtgggccctggtggagtttgagaagcccgtcacctgccctcggctgtgcctggtgattggctccaggctagatgcggacattcacaccaacacgtgccggctagcctttcatgggcaatcctgctccacgggctagaggacaggaactacgccgacagcttcctgcccaggctgaaggtgtacaagctgaagcacaagcatggccttgtggagcgggcgatggatgactacagtgtgatcggccgctccctgttcaaaaaggaaaccaacatccagctcttcgtggggctcaaggtgcacttgtccactggggaactgggcatcatcgacagtgccttcggccagagcggcaagttcaagatccacatcccaggtggcctcagccccgagtccaaaaaagatcctgacaccccgccctcaaaaacgggcccgggctggccggtgggaggccaaccaggcaggaggagatccccgagcggagcgaacccccacaagatggggtggctaacccgacctttcaagcgttatgtcttcgacacccacaagcgcatggttcagtctccctgagtgtccggtgacctcccccagggcctccttgcccagcccagtccaggctgcttgtgccaaatcccaaacagccacgcctcaagctttcccagtctcttcctgcagtcctggagcagcaacccccacccccaagttgggtgctgaatcccttgggaggaactgaagggggatgggttgctggggccaggagggtctctcctccagcccctgcacactcccacccaggacagcccccagcccaactaggaaagggccatgggcagagggctggtagccagtatcttccactgccccatctgttggccacctgcaggccagtctcaacccttcccccaggtgggcaggcacttgatggctacaaataaatgtccccgtggccccagcccactctactggtgtctctctctctgtgacttcactaggtccgccgccctccccagctgtgttccaaggggaatctcagaaatcccaagagttccttgccaggtcgggggcccgggaagggacccacactc

SEQ ID NO: 155819 - DNA, 1021 bp, Homo sapiens
ttttttttttggtaggggacagagtctcaactattaccccagtgcagtggtgcaatcacagctcactgtagcctctaactcccaggctcaagtgaacctcccacttcagcttcctgagttcctgagaccataggcacataccccatgcctggctattttttttttttaatttattttttgtagagacagggtcccactatgttgctcaggctggttttgaacccctgggttcaaatgatcctcctgcctcagcctcccaaattactggggattacaggcatgaggcatcacagccggccagagctgctgcctttgacagtccctatgagctgggaaagtcaggatggggagacagaagacttctgtgctatggagacttggaaagtgaacataacatgtttggctcagactccccgcctataaaatggaactaaaacactcttgttttaggttaagaaactagaacagatctttgacatctctaatgagccctagattattcctggtgtcagggagattaggaaacaccttcatataccgtactctattcttgccaaaaacctcaatgaatgcttaaagtaagatctattcatgaaactgacttcacattacttcctaaataaaagaaggctattcccacattgcccccagcacttgtgtttgaacaccctggtgacttaggaacacagccttacctaaagcagcgtccttagcagtgcaggtctaataaggtggaactgaaatctgactttgacctatgagtctcagacatctttaaacatctttaaacattaactaagggcttactcttctgagtgcccatctgaaggtacctgaacgtgtcgggtttcccactagaccatgatctccttggaagcagggacagtaacttccccctcttagcatttgcagagcctagcacagcattaggcctggagtgagagtttcctaaacacttgtctgacaaagaaattaataaaacactctaacattccctgtgatacttcgcctgtgccgaaat

SEQ ID NO: 155820 - DNA, 1880 bp, Homo sapiens
  misc_feature (1)...(1880): n = a,t,c or g
ctagkgagagttgarggatgcagtagatwcatgcataaaatttgtaagggtttataatattattcccaaatacactttatcttgaagcaaggcacattacaatttggacattattggaggagaactagttttttttttttttttttttttttttttttttgagtgtcactgatgctttatttacgatgcgtcaccatctcttttacaaactagattacggttttaagtggaatacacaaggcaatatctacaaacacccaaggaaagttaaagtactgccatctgctatttcatttggaaaggggaagattccccaaatcaaactggttttgatcccttaagaaaggctggcagagttaattcatgggcaacatatgggttaggacaaaatcctcagtaaggaatgcccatatgataggtgttcgcatttgaaaggaaggatggagggtgcttcaaaatcaaaagtctcaactgcttgactctcagggtgtttaaatatgggccacacacccatatttagttcctagattaatatgggattatgagccaagggaattgaaacagataacgatagtttttacagatactgtatacagatttttttttcccattcatgcaaactttttttcttaaaaaaagttaaacatgtggaagcccaaaatgcacaatacatttttttaaatatttaactaatttttctggtcctccttcacatttgtttacatttcccatgtacataatgtgcctgggacaagtatacaagagaagactggattgccaggcaatgagataattttagagaaataagtgacccagacacatagttccttaaaagcagccgcacacgtatttctggagtgtggcaaagaggcctcatgacccaatcattcatcaaagagraaatacaaacagatacaaactaaacaagaggaaaatattccattcatttaaactgcataaaatgttacccacttaagatttagataaaatatactcttttatttgggcatccggcttcaagacctcatttgacaggcatgattccatcagaacttcacttcctctagtagtactctgcctccccaggtctctgagagaggctagctttttcgtacctctttactggtgattgcatttctaccaaaaaaaaatttttttttttaacattatgcctaatcatacaatgttcacccaaatacagcaagaaaaataaaaccagagttcagagctgttagggtttcctttttgctttcagagaggatgagtaacatttttttttttttttttgacacggagtttcactcttgttacccaggctggagtgcactggccatgatcatcgactcactgcgatcctcgccttcctgggttcgaacagattctccctgcctcagcctcccagagtagctgggattcaccagcatgcgccacccatgccaggctaatttttgtatttttagtagagacggggtttctccatgttggtcaggctggataacatttttatttcccctcgcaagtccttggcaccaacatggaggacttctttttgactggcttaattcttcatggccttttccaagaagattcaaatgctccttattctttaaagtggggttcactaaggtagagggcaaagtctgttccccaccatctttaaaactgcgtaacaagtttgggaagccaccctgaaaatcacaccctgaggcggggcaatactttgtcctngaagtagtaagccatggtgatcctctcctcagggtggggaagcaacacacacaatgctaaaaattaacaccaaaaacaaacacaaagtccgccttgtactacacatgtgtgactgatcctcccattaacaggagtgacaagcttctgaattt

SEQ ID NO: 155821 - DNA, 1186 bp, Homo sapiens
  misc_feature (1)...(1186): n = a,t,c or g
cggacagtgaccaatcaggaggaagccgcctacatccaagagatcaccacggcagatggccagaccgtacagcacctggtgacctccgacaaccaggtgagctactagctactgttaatcccctcagctgtgacctcctaccctcccaaagacctaccttggggaggaatgatactttccaaaccacccctcctggggtccatgcttgccaacaactgcattgttgctggtggctgttcctagtcttccactctgccttcttagctaagctcctggcgagtggggcctcagcacctgcctcgccatgcccgccccccccaccaacaggtgcagtatatcatctcccaggatggtgtccagcacctgctcccccaggaatatgttgtgggtccctgaaggccatcacatccagggacagaagggcagaatcacacacatccagtatgaacagggagccccgttccttcaggagtcccagatccagtatgtgcctgtgtccccaggccagcagcttgtcacacaggctcaacttgaggctgcagcacactcagctgtcacagcagtggctgatgctgccatggcccaagccccagggcctgtttggttacaagacgaagacaagtgcccgaaacacaattcaaacaagctgcagcaccccagggcatcgaagtacgacgtcatcacccctggccgatgacttgaaccccgagggcccaacacaagatcatggatttgcgggccagctctccctgggggtagggggccacccaggactcacctccctcttcatttaggatctcccagatactggatagccagcatcctctcattcccagggagccagacctgtgctgttggggttaggggtcagccatgggccccagccaggacatgctgggtgccccagcctgcaggcaggctttgggagagaaatttatttttgtttgggtggacccactggccttgccagtctcaataaaggggaccggagtccagtcaaaataaaaaaaatnnnnnnnnnnngggggggggcccttttaaaaaaaccaattttaataaaccgggcttggaaaggaaaaatttttttaaaggggccccaaaaataaaatcaagggccggggttttaaaaacggcggaaagggaaaaaaaccctggggttaccaaaaaaaaatcgcctttggaaaaa

SEQ ID NO: 155822 - DNA, 405 bp, Homo sapiens
tacgcccccagtgacttgccggtcaaagcagagcgcagcacctacaactacagcctccccatcaccgtcaagaagacatccagccagcttgtcaccatgcatgacctgaagcagggcctgggcccgtcggggacgagtggtgctcggaaaccagcttccagcaagtacaagctcaaggtcagccttcagacactgagggtgagaactcgggtgcaaagccccagggctgtgtgtgttggggacatctggcgaagaggtggtgacaagtctcagggaagtctggcaccagcagctgcatgtggttgtccttctcgagccctttgggagcctgggcccccactgagccacgtgaccactccgggaatgatcggaattgggcacacacaggaggacagagccagagca

SEQ ID NO: 155823 - DNA, 458 bp, Homo sapiens
tttcgtgtttgtgtcttattatcctccgggtccctcgctgtttagtaggagagactggtgcttgccccgcccggtggactaactcgcttaattttaaataaaaagtcgaggacacggcggtcgttttcccgaagacatgggccctcccatgggccatttgctccctggaggccctcgcgtcttgctgagcccggggagttaggatgacgcgagcggtgagggagcccggaacgattccttcgcggaacgattgaggcgaggcctttgggagtactttgtgggacggaccctggcgggccctgccagacgcacagggatggcggcggaggcggccgatttggggctgggggccgccgtccccgtggagctgaggcgggagcgacgcatggtgtgcgtggagtacccgggagtggtgcgtgatgtggctaaaatgctgccgactctgggcggcgaggaag

SEQ ID NO: 155824 - DNA, 1725 bp, Homo sapiens
cttaattttaaataaaaagtcgaggacacggcgttcgtttttccgaagacatgggccctcccatgggccatttgctccctggaggccctcgcgtcttgctgagcccggggagttaggatgacgcgagcgggaaggctacaacaatccccccatctcaggtgagaatctgattggcctgagcagagcccggcgcccccacaatgccatctttgtcaactttgaggatgaggaggtgcccaagcagccactggaggctgcagcccaagacgtggaggagagtctgcacctaacccccgtggaccggaaggtggaggaggagctgaggaaggcaagtcctgcgctgcgcctggccccgctgtttgacatccgtcccatctggtcccgaaatgctgtcaagggccaacataacggtccaccccaacaggttcaaggcctggcttcctttcatagcctattacatgattaacaggcccctggcgcagcctatggattcgatttgggtatgaccccccgaaaaaacccagatgccaaagatttattcaagtcctcgatttcccgaatccgttgtggaatgaaacaaggttacggccccaagtgacttgccggtcaaagcaaagcgcagcacctacaacttacagcctccccatcacggtcaagaaaacatcacagccagcttgtcaccatgcatgaccttgaagcatggccttggccccgtcggggacggagtggtgctcggaaaccagcttccagcaagtacaagctcaaggtcagccttcagacactgagggactctgtctacaatcttccgggaaggggccttgccaccctattcggcagatgttctaccagttatgcgacttgaatgtgggaagagttgcagaagatcatttcaccgcaatgacgggggcagaggatttccttgcacaggaacggggatggggtgggtgccttccccaaggaccaggcgacgagtttcaggggacaccatgtcccccatgattcgggaagacaatcggctccaagaggcctgctctcttttccagctcagccaaggctgatggcggaaaagagcagctgacgtacgagtctggggaagacgaggaggatgaggtggaggaggaagaggaggaggaggacttcaagccatccgacggcagtgaaaacgaaatggggaaccaaaatttctgacttacgtgtgacggggcccaaggctgggcctccctgacccggccagactggtgtctggcctaatgagggagccggggctccccattgccacccacagtgcccggaatggcccctaggaggccctctgaggagagctagagtcccagcaaagggtgcagctgaccctagcactggctgtgacatgctgcttggtgctgcctctggtcctgaggggttagggacatcccataagggtataccctggctctgccacccatgaaccagcccagcatccagccagtgagtgggcacccaatgcctctcaggatgagaccagtaaatgccggaggtggagctgggcagctgtggagccccaggccacaggccagtctcgcttggctctcatgactgtggtggtggagatagtgtggggagcctcgcccatggtctcacgtggcaagaagtgccttttagctctggatcccaaccgtttggcacagctttggccacagccaggcccctctggaattgtccttattaaaccagtttcccgagaaa

SEQ ID NO: 155825 - DNA, 425 bp, Homo sapiens
  misc_feature (1)...(425): n = a,t,c or g
ggaagggctccatgcgcagctgctccactgcccgaaggtagaagatcaggtcagtaattcaagttctgggaaccaacgataaagacagaggaatatgagcacaatcaaagcaccgcannnnnnnnnnnnnnnnnnnnnnnnnnnnnnnnnnnnnnnnnnnnnnnnnnnnnnnnnnnnnnnnnnnnnnnnnnnnnnnnttttaagcagtttaagaattattctttttcagaatatctacctctactgggataagatcacgtttctttactgtgagcacacagtaggtgctcaataaatgcttgttgcaagaatgaatgannnnnnnnnnnnnnnnnnnnnnnnnnnnnnnnnnnnnnnnnnnnnnnnnnnnnnnnnnnnnnnnnnnnnnnnnnnnnnnnnnnnnnnnnnnnnnnnnnnnnnnnnnn

SEQ ID NO: 155826 - DNA, 391 bp, Homo sapiens
  misc_feature (1)...(391): n = a,t,c or g
ncgnnnnnnnnnnnnnnnnnnnnnnnnnnnnnnnnnnnnnnnnnnnnnnnnnnnnnnnnnnnnnnnnnnnnnnnnnnnnnnnnnnnnnnnnnnnnnnnnnnnnnnnnnnnnnnnnnnnnnnnnnnnnnnnnnnnnnnnnnnnnnnnnnnnnnnnnnnnnnnnnttttaagcagtttaagaattattctttttcagaatatctacctctactgggataagatcacgtttctttactgtgagcacacagtaggtgctcaataaatgcttgttgcaagaatgaatgannnnnnnnnnnnnnnnnnnnnnnnnnnnnnnnnnnnnnnnnnnnnnnnnnnnnnnnnnnnnnnnnnnnnnnnnnnnnnnnnnnnnnnnnnnnnnnnnnnnnnnnnnn

SEQ ID NO: 155827 - DNA, 133 bp, Homo sapiens
  misc_feature (1)...(133): n = a,t,c or g
ttcaaagtttttaaggttcanaaatttattggtattttaagccagtggtccncaacctttctggtaccagggaccggttncacggaagacaatttttcacggactcgnggtagcgggatgggggtgggggatg

SEQ ID NO: 155828 - DNA, 1438 bp, Homo sapiens; identical to SEQ ID NO: 148099

SEQ ID NO: 155829 - DNA, 1627 bp, Homo sapiens
tttttttttttttttttgagacggagtctctttctgtcccccaggctggagtgcagtagcacgatctcagctcactgcaacctccgctcccgggttcacaccattctcctgcctcagcctcccaagtagctgggactacaggtgcccgccaccgcgcccggctaaattttttttgtatttttagtagagacggggtttcaccatgttagccaggatggtctcgatctcctgacctcgtgatccacccgcctcggcctcccaaagtgctgggattacaggcgtgagccaccgcgcccggccccctcctccccaatttttcatacagttgcccctatacaatatacacacccttgagggcaggtagaagttccagccaacctgcggccagggacgctgtggggagcatttttctctgagttgctaagagaaccctgatgggcggtgagcagaggaaccacagaacagccagggctcaaggctggcagcggataggccaggagagatcgctaggccccagaaagccccctactttcagtcagggtgggcaagagggtcttcgcagtgaagtgggaggcaggccctggaggagggagccagggagacccctgggagccctgaggttgggggccaggcagggagatggggatagcagctgcctcagtacttggggaccttgctgtagtcttcggaatgcacgtgccggcacaagcagatggacaggaccatccccaggagctcgaccatggccacacccacgcccacgccgaggatgatgcccaggttctcctgcagccacgcctgcaccttctccatgcagccctcctggtacacaggccagtcctcagggtggttgccactctgggtcctgttgccgggggcctcgcagaagcccttcctcacagaaaggctgttgtcctcttcccccttgacttcgcaggaacaggggtaggtgacctcagggcgattcatgagctcagcgttgtctgtccagttgtagaagctgacccagccgcagcacttcacctgagcctgcacgtagtcccaggcatcctgcaggctgtcctcgcgactgctgttgtagtctcgaatgagctcagtcacgatgccacccatctcctgcttcagcttgcccatgttgaagtagaagagggccccggccgtcacctgggcaatgaggatcaggagcaggaaagcaaagtacagccccagcaggcagcggacctcgttgacggcgccgatgcagcccaggaagcccatgagcatagtgactgcccccacgccgatgaagacataggcccccatcctaagcgagctggaggaggtttgcaggacagagatgaaactgctcttgtcggccaggatccacaccccgaagcccaggatcactgcgcccaggataaagaagatcaagttgaagaggaagagaaagtatttggtgactttgatacaggctgagcccatcccgccagtcctggagcttccttccacgaaaccagtgcagctggtcacagggcccacttctgcctgtgcccacgtgtcgtccacacagcagcagggaggactctgcgggttctgctttctgctccgcgctgcaggcccagcgtcacccgctcgtgcctcagtcggc

SEQ ID NO: 155830 - DNA, 1864 bp, Homo sapiens
  misc_feature (1)...(1864): n = a,t,c or g
caatcctcccacctcagcctcctgagtggctgggactacaggcgcctgctaccatacccggctaatacttgtttgtagagacagggtttcgccatgttgcccaggctagtctttttcttttttttttgagacagagttgcccaagctggagtgcaatggcatggtctcggctccacctgccaaccctcctgccctcctgggttcaagcgattcctcctgccctcagattctcctgccctcagtcccccaagtagctgggaatacaggcacccaccaccacgccccagccaattttttttgtatttttatagtagagacggggtttcaccgtgttagccaggatggtctcgatctcctgacctcgtcatctgcccgccttggcctcccaaagtgctgggattacaggcttgagccactgcgcccggccggtcgattcattccttgcaacaagcatttactgaggcacctactgtgtgctcacaggtaaagaaacatgatcttattcccagtagaggtagatattctgaaaaagaataattcttaaaactgcttaaaacaggggtccccacccccaggggcacaggaccagtaccagtccatgggcactggttaggaaccaggccacacagccagggggtgaagcggtgggtgaagtgagcacagcttcatctgtatttaccagctgctccccagagctttgcattactgcctgagctctacctcccggtcaggtcagcagcagcattagaggtctcatgggagtgcgaaccctgttgtgaactggcacatgcngagggatctaggttgtgcactccttatgagaatctaatgcctgatgaatctaatgcctcatgatctgaggttgaatagcttcgtggccgaaaccatcccccacccccatcccggtaccccggagtccggtgaaaaaattgtcttccattgaagccggtccctggtaccagaaaggttggggaccactggcttaaaataccaataaatttttgaaccttaaaaactttgaagaacaaggtaaattggtgttttatttaatgtcctaccctttaatttgttgcattttcctatactctttacactattttatcccaaactatgtatatgaggtgaaaatatatatggaaaaggggatactggaaggaatatttagtttaaaattaattttctttacgatcacgaggcacatgggtgggcataattacaaaggcttgggaagtattcaaataggaaaatcaaaggtgtttcaatacagtagaatcccaggactggcattttaaaatcgcctcacagatcacactcggctggtggcaaatatcattcatcgttgctaagggaccagaaaatactggatgggtgttttaactaactgggtatattgatccatgggaggctgcaacagaaagaaccctgcggcccaggagggggcattgtcaagtggctgcttctccctgagctcccacgcccttcattgcagctgccatgttcggatacaatacaccctgcttcacagccccatgggacatccccctacagggtacctgtcatgtgaagccttgccctagtagttctctcccagggcaaatgaagctcaacatgtttttgcaaggtggaaacctcttattcacatttgctttgaattccccgatggagtagactgcctttgttccatacaggcaaagtaaggatattttaatatcatcctacttcttattagcatttcatttgtctatgtactgtatttcatttgtaatgtctcctgaaacatccaaatagagaacataagaacactttatgtacaatctggaaaaaaattacctggagaaatcaattaaagatttattacccttta

SEQ ID NO: 155831 - DNA, 413 bp, Homo sapiens; identical to SEQ ID NO: 112892
  misc_feature (1)...(413): n = a,t,c or g

SEQ ID NO: 155832 - DNA, 790 bp, Homo sapiens
gctctgtcgcccaggttggaatgcatgggcacagtctcggctcactgcagcctctaccacctggactcaagtgatcctcccacctcaacctcccaagtagctgggactataggcacgcaccaccacacctggctaatttttgtattttttttgtagagacagggtttcgccatgcgtgcccaggctggtctcaaatccctgagctcaagcaactggcccaccttggcttcccaaagtgttgtgattacaggcgtgagccaccgcgcccagccttgttaaactttttaggttacagaaactgatggctccaaagttcttctgttacgtgataaaattcgacttcttcttgccctcatttagtccagagaggactggtggggtgtgggggtggggtcaccgagctcagagcatcaagaggccaacctcttcttcctcattctctgactgcccgaacttcagccggagactctcttcaaactcctgatctgtccagtagaagaggaccctctgcgccctcagtggcccacccaagacgcacttcatccttggcaagcacagtggagcatccagacggccagaggttcagaaagggctgcagcagcccgactcggtgactggctcatgggagagcagcacagcatccctggtcctgcaaatgctcacttccgggagggttgaaggggggctccggagggaggatcgccgcccccagaggggacagcccggaggcccacgtaccggatcgcggcgcgcacagcgccccgcctgcaggagcccgggcgcgcttccg

SEQ ID NO: 155833 - DNA, 932 bp, Homo sapiens
cggacgcgtgggaaacaagatttacagtctttaatacaatcttaattttggaattcatgaaggaatgactaagttctaatttttttttttttttttttgaaactgagtctcgctctgtcgcctaggctggagtgcagtggtgcaatctcagctcactgcaacctccgtctcccgggttcaagtgattctcctgcctcagcctgttgagtagctgggactacaggtgcgtaccaccaagcccagctaatttttttatatttttagtagagacggggtttcactgtgttagccaggatggtctcaatctcctgacctcatgatccgcccaccttggcctcccaaagtgttgggattacaggcatgagccactgcccctggacagatctaattttttaatagtgtaagagagatacactgtgcattccatctatgtccctgagttagtaattcaaggtcccaaaaggtaatttaatatggaaactccttggaaaattcgggggcttaccacttggaattcaaaatgcctatttttggattgtttaaaagttacttaaaccctgagctttaggacctttaaaaatctccagcatgccttttaagctagtacttttcctgttttgagctctagcaaaccttcagcaagccaaggtggtagccctttttcaacacaatcaaaatagagaggtcaccagttgtttacataccttatggtaaaatgcccggatcaagatccatgtatcccccccatattgtgatgatgcaatcaaagcatagtttttttctactttctgaaatattactgatgaaatcactttacatttaagaggagaaaacagactgccttggattttttttttgtcttgagagaaaaaacaaaatatttagtattgcaagcataaacatttggactcaataaatgacaaattatgaaa

SEQ ID NO: 155834 - DNA, 608 bp, Homo sapiens
gagatggaatctagctctgtcacccaggcttaagtgcagtggcatgatcttgccttactgcaacctccgcctcccaggttcaatcgattttcctgcctcagcctcctgagtagctgggattacaggtgcccgccactaagcccagctaatttttgtatttttagtagagacagggtttcattgtgttggccagactggtcttgaactcctgacctaatgatctgcccgcctcggcctcccaaagtgctgggattacaagcgtgacgcaccgcatctggtcaaaaatattctttagagtagacaatgatcattactacatcttgttttcttcaatggaacttaacgttccaactattgttctatgttatcatccacagtcaagcaacatgtattcctaagcacagtactatactgagatcaactgacaaaacacctcaaaaaatgacaacttttccaaatatatcagaacttatatttctagatgaattgtatactttgcttttgaattatgtatataaagtgtattcataaatattgacaatttgtcaattatgaggatccctttgaaattgtctcgaaagtctacttacacgtcttttaaaagaatg

SEQ ID NO: 155835 - DNA, 244 bp, Homo sapiens
tgagtacgttcaaagtgatgtaggaaaggcttgtggaccagtaactgtcaatggctaaaaccaccgaataggagccaatgactccacaagtcagtatgttcagtattcttaggcagcccatgaaaactactggaatgaggatagctatgcaagagaaagtgacccagaatacaccatcatcatgaaaaatctttaggtttccatcatacttgataggtgtcagtcttgtaatcagtatataaaa

SEQ ID NO: 155836 - DNA, 661 bp, Homo sapiens
tagtagatttttatcttcatcttaaaattttaaatgctttactcccatgatcctgagttatcataacagagggttctcacagcattgtatgctgtgttccctccttttgtcccagttgactttctttaaatttagtttccaagtgctctggttagcataggtgggtcaagactcctactgtgctgtcacactggtttttggatttaagagtcttaccattagtttgaaaaggcacatttgtgaaagctctgtggaaatccttgttgagcgctctcttgagtacgttcaaagtgatgtaggaaaggcttgtggaccagtaactgtcaatggctaaaaccaccgaataggagccaatgactccacaagtcagtatgttcagctgtggaagagtggaagagtttaggcatcatccatgttagaacaaaaatagtttataactctccactggcttcaatcacaggcaatcacatctgctccctcaggcatgaaaaaggaccagacccactcagagctgaacagaagttccctggaaagataaactgaaaacaaccttcaacatccatatgagttcttaaaacacagttcagcttatccaaatactatggaaaatatcttccatatgaaggaacttcaacaataaaatctaattagaggaagaatc

SEQ ID NO: 155837 - DNA, 2120 bp, Homo sapiens
tttttttttttaatttctcgagacagggtctctgtcacccaagctggagtgcagtgacacaatcaaggctcactgtagcctcaatcttcagggctccagggatcctcccatctcagtctccttgggagctgggagctaggcatgttccaccatgcctggctaattttttaatttttttgtagagatggggtcttgtcatgttgcccatgtcggtctcaaactcctgggctcaagcgatactcccaccttggcttcccagtattgggattacaggtgtgagccaccatgtctggcttgcttctctttttgtattctaaaattcaaaggcctaagtatcaaatccctaaatctccaaatactgtcacagataaagactcaataataaactccctccgaaagtttagacaggctcaggtgagagacttgtttcaaggggttataaaaagaaacaccagtgctctgcagaagaatcagtttttaatttttttaaatgtatctatttaatggaataagttgatcataacatctgcaaaccaaaaggctatttctcaagtatttgggaaataagaaaaagcctccctaccaccaaccgttttggtcatcgtttctcattctcttacaatcatcctaatcccctagtacacccttaccatatatcaataagggcacccataattattatgcaaaggaccggatatatatgcctaatctcttattagacttgcacccagagaactgttgaaccactccaggggcatggaactcccaaagctgagggcacaactgacccaaaccccctggggattctacaggaaggcaaagggcgtttctctctccagctgggctgcttcccttctgggaaggaggcccttttaatctggggtttaatcgggccataagaggcctctctctcaatgggaggggatgtgggtaggctaggggtccagaatgtttgtcaactcggcgctctctctcttgccttcccataacttgttatgggtgggggaagggaagaacggtcgtcctctctctcttcgaatctggtacgtaattccacttacagccagcatgcccccatactgcccaggataatgaagtcattagtttgaaaaggcacatttgtgaaagctctgtggaaatccttgttgagcgctctcttgagtacgttcaaagtgatgtaggaaaggcttgtggaccagtaactgtcaatggctaaaaccaccgaataggagccaatgactccacaagtcagtatgttcaggtattcttaggcagcccatgaaaactactggaatgaggatagctatgcaagagaaagtgacccagaatacaccatcatcatgaaaaatctttaggtttcccagtggagtaaagaaagtcactgacgagatgaggaaccccagcactagtccaacacagagcatgcagatcgagaggattccaaatcgccaccacacatgctaccaagaacattccaccgacgcttccagtgacagctgtcagaatcagatctcacatcatacttgataggtgtcagtcttgtaatcagtatataaaagaagaatcccatgatgataaagcctatgaagaataattctgttttccagaatctgtgtccaaagaaacaaatgaagaaaccaagcagggcaaaaagagtgaagaacactttggaagacactccttccctagggaagcacaactaccctctcccctgccctcaaaagctgcaaaccgtaatgtgtgaaaccaggaatgtaggcagcagatgtatttagaaacgggtccccaaacaatgaacattgtataatgacaccttgtcccgggagggaggagaaggaaacacttgtccttatcaattaagctgttagggtaaccaccttgagagcactggccttcacctggggcacactgaccatcctctgcagatgcttcagcaacatctcctcagtgaggtcattctcaggcagaaaatactgatagacatcatactgcaacctccacctggagtcctggtctgtcccagcgtcacatggtgggggatctacgcctctcgcatagcctagggtttgctggggcaaacttgatagtcgtttcaaagaaattatactccaagtaaatgt

SEQ ID NO: 155838 - DNA, 1320 bp, Homo sapiens
tttttttttttttttttcaggtcaatttcactgtcttttatttgacagctagcgcagtctttggggaaatttgtgggtgatttgagtagtaacagcaaggacatcactgtaattatgatagtgccttatatttttctagcacctctcccaaggacttatgaagacttttagattcttcatcccttcacacaacattgcttcaaggtagggccaaggcagaaattatcatcactgttttacaaggaaagacactcctgtgcggtctcaaagcaaatgcttttaagagctaaaaattcatttcctagttctgttcaccaaatgatgccttctttaaacataaatacaaattgtaatgttaggcagggtgctatttacagagagaaacaaagagaattttacaatagtcgccaacactgcagctgccaaaaaatccctagctcagaaatttaaagcagcaatcccattttccctacagaaatgaaaacatattgaactttcttttgtatttagcagtaatccagcaaaatataagctttaatatagcgactgaggagtggtagtttgagccatgaggtacgggggagccagaatccacttagtgaggacagtgatgaccagcaggtggcagaagtaaattccaagcagccaaaaaaccaaaaacattcggagaatttttccccccgttcctgagggacaggatggagttttggacaggaagaactgtaagaagccaagatctgcgacagtcccaacaaatacagtctggtcacatggatacaggaaggacgatctggggaggcataccaacaagaaacgaagccagggacctgaatgcaaaactagcctcaggtgacatgttctcctggcacttagaaggcactgggcaaaaccatggcccacatagaggggggcagacacatgtctggggtttcaagtttctgcagaccttcatcatttgttttcctttttgttttgctctgttgcccaggctggagtgcaatggcgcaatctcggctcactgcaacctccgcctcctgggttcaagctattctcctgcctcagcctcctgagtagctgggattacagacatgcaccaccacacctggctaattttttgtatttttagtagagacagggtttacaccgtgttggtcaggctggtctctaactcctgacctcaggtgatccgcctgccttcagcctcccaaactgctggggattatagggcatgagccacctcgccagccctatttatctggattattttaagtaaaactttaataaaccatgacctacatttctatggcatttttaaggtat

SEQ ID NO: 155839 - DNA, 504 bp, Homo sapiens
ttttttaaggcacaatctcgctgtcacccagcctggagcgcaatggcgcctcctcagctcactgcaacctctgcctcctgagctcaagccatcctcccacttcagccttccgagtagctgggagtacaggtgtgagccaccacacccagctaatttctgtatttttagtagagacagggtttcaccatgttgcccaggctggtcttgaattcctggcctcaagtgatcctcccacctcagccttcctaaatgctggggttacaggtgtgaaccacagtgcctggctgtgtttctcatatttgctgtgaaccccacctcccctcacttacccaacaatggtcttcctgcccaccccagagccggcactgtcaactatgatctccaagactgctgcacagcactcaccttccaaacctcacctcctacttagcttcactgctgctctgagccacagggcactgacggttaggtgagtggataactggggtccataacaattatatg

SEQ ID NO: 155840 - DNA, 712 bp, Homo sapiens
atcaccgaggcgaaagtgtttggaacatctgcaggtggggaacattgcgatgaggaaagattgggaaaatgacaagagcccattgtctggaattcataggtgcattgattgtcttcagtatcaccagcccagccccatttgaagcagagccaaagtggaaaaatgatttggactaaacgttaactcatggcagaccagtttctgtggttctgttggccaagaaatgtgaccatgggaggatgaatgcagaaacagcagcctcaagatgggccagatctacatggaacatagttttgtaggataaattgaaacatcagcaaaagaaaatgtgaactttgatgaagcctccaggtgcctggatgccaaatagacaaatacagaatataagaaaacacaataagagtcattggccccgtgcctatttggcatcattgcaagaaacctggggtagtaatagtggacgtatttagagagtgaggcataagctcacctaaacagcctagaaaatgtttactatgagagtaagaaggaagaacacaagtggatatacgaggagtccttgcaatctggcccatcacgcaccctttgcatatctctacctacttgtgcataattcagcatccagcagaggaagacaaaatgttgcggacagttcctctaccagcagcatgcctcccccaggacaagcgcaaagtgaagactggtcgtcgct

SEQ ID NO: 155841 - DNA, 501 bp, Homo sapiens
ttttttttgatttcattcattcatttattcaattttttttaaaaaagctattacgttaaactcttaggatgaggacaagccttacaatggtgtgtgagtgtgagtatgtgttcatgcatacactcacatccctgtgtctgagtgttgtgggtgtgtgtgatgtctgtgcatttctatgtggtatgtattcatatgcatgtgtattggggtacactaaatttggggtttgcacagaaaagaataaacagaattgtactgggaataggtctacccaggggcttcctctaaggaacaggcacacaggctcattcaggttttggctggattttcatcctctggcatcccccaaaggcacactgaggtctctcctatcaccttgacaatggggatttgacccccaaccatctccaccgcagttggactgacaaggcagcaggtggtgctcatcaaagacagctctgaggaggctttcgggcgacacccaggtggtcgacgcggccg

SEQ ID NO: 155842 - DNA, 400 bp, Homo sapiens
aactcagagggggctgcctggatccagcccccagcaggagaaccgacctggggacaaagcggaggcacccaaagggcaggagcaatgccgcctggagactattcgtgatcccaaggacacccctttctccacctgctcctcctcctctgactcggaacctgaaggatttttcttaggcgagcgccttccccagtcctggaagacccccggaagcctccaagcagaggacagcaacgcctctaagacgcactgcaccatgtgctagtggcgcagctcagagaggggatgctgggacagccccgtccccaccatcctcctcccaagccaattaaatgatcacagcacgcgtgacagttaccggctggagagccggaggtgggaccgggagcaggggaccgta

SEQ ID NO: 155843 - DNA, 991 bp, Homo sapiens
cttcgtcgcgcacggcccaggggctgggcggggcgggaggctgggcctcacccccactagctgcggtgtaggtccagctccgcggctctgagaccagcgtttccgacccggcccggaacaggggagactggactcgaccgaactgaaggaagggaccaaacctcggtgaactctgcaaccctctcccgaacactccttctcgctgctgccggcggttccagcctgcaaactcagagggggctgcctggatccagtccccagcaggagaaccgacctggggacaaagcggaggcacccaaagggcaggagcaatgccgcctggagactatttcgtgatcccaaggacacccctttctccacctgctcctcctcctctgactcggaacctgaaggatttttcttaggcgagcgccttccccagtcctggaaagacccccggaagcctccaagcagaggacagcaacgcctctaagacgcactgcaccatgtgctagtggcgcagctcaaagaggggatgtgagtgggaggaaaggggtctgtaaagcgggagaacaaggctagcctccccctaacaatcctagactgagacgcagtcaggcgcacgcccgcaagaggcggcgaggtgacaagtttggagtgcgcccccttcagtactgcgcgttctaagacttttggcggagactttcttggcaaaacccattccccaaagctacgcttcccctgctgagatagcccctacccccacctctacaggctgggacagccccgtccccaccatcctcctcccaagccaattaaatgatcacagcacgcgtgacagttaccggctggagagccggaagtgggaccgggagcaagggaccgtaggaaccgggccgcgcttccttcccctcctaggagtttcgtgggagggcgcagcagaggggccgttccctctttccggatgttcggattaagcgaacagcgctccccattgccggccggtagcagc

SEQ ID NO: 155844 - DNA, 880 bp, Homo sapiens
ctaaatgaagtccacatgaccgactgaccgacctggggaacatagcaagaccccatctctacaaaaatgtaaaaaataaaaattagccgggtgtagtggtacatgcctgtaatcctagatactcgggaggctaaggcagaaggatcacttgagcccaggagttcgaggctacaatgagctgtgatcgtgccactgcactccatcctgggtggcagagtgaggccctgtctcaaaataaataatccagtcccccccaagaaaggaatgaagttctataatgagaaaaatcctagtaactaacatatagtagacagtggagagtggttctctttcgttttcttaggggcagacagatggggtgctggagtcctctatcaaagagtcagagctctatcccagatgtgtaatgaacgtggtcacaaacatatttgtcccattaccatttaccttccctataaaccactgtgcctcccagccttgtagaatagacacataggagcgcaggaatacgtctaaaaataggagtgagagagggcagggcatgcccgttcttgtggtagaagaaaagaatgtcaaagaaagcagctgggactaatgaactttacattagccatattccattatttcagcttaagtccaatgtcaggtcctcatgaggcaactggctttgacaggagctacgctaattaccacttaccaaccctttaatttctgggtaaaagcaaaagagaaaaactaatggatttttcattttccagagagacaagaataaaataatagtagtctgtagaaaaaagaaaacctgcatcaattacaagaattattaatgtatctttaataaataaccacattatttagctgtttaatttcctaaaaaaaa

SEQ ID NO: 155845 - DNA, 2536 bp, Homo sapiens
atttcgtggagccgagagacccgagtgcacgtgtggagtatcttttgcacaagcgcggcggcgggagacactcccgcccccatcagactcaagccctcactcgactctcgcggccttcgttgctcgcacagctccctgcccaggctaggaggccggcttgcggggttgagtggcccgagctaagggtgcggagacccaagggcggcgactacgacggcgttgatatcggtggtaacgacggcctcagcaggcggggaagatgaaaggtagccggatcgagctgggagatgtgacaccacacaatcttttcaactgtttaatattgtgtggtgtcacatctcccaatattaaacagttggaaaagattgaatcaggtcatctttccagtcagctacaatgacaagttctacaaggatgtgctggaggttggggagctaacaaaaacttgcctatttcaatgatattgctgtaggtgcagtatgctgtagggtggatcattcacagaatcagaagagactttacatcatggacactagggatgtctgggcaccttaccgaagcttagggattagggaactaaaatgttaaatcatgtgtttaaaacatctgttgaaaaagatggtactttttgacaacatttttctgcatgtccagatcagcaatgagtcggcaattgacttctacaggaagtttggctttgagattattgcgccaaagaagaactactataagaggatagagcccgcagatgctcatgtgctgcagaaaaacctcaaagttccttctggtcagaatgcagatgtgcaaaagacagacaactgaacaaattacaaatgaactttcttgcacttgcttgtcgccaaataaaagagaggcccattgattcctccccccaccccaacactttttttttaaagcttttctccctccttgttcttgtttttctttcttcctttccttttctctgagagttttaatactttcaaggactttaaaaaaataatcatgtttgaattgttttctcttatttttgtgaggtggtttgaaggaaggacaaggtagatctgtttagttttgcagttgaagttagatggtcctaaacatttaattgtcaaataatttcaaatttaatgtcctgctttcacattgaagggcagagcctacaaaacattgtatatttcaaaagacaaaaagaagcagcagcagtatcttgttctctaattcatagacaagttgagtgtgtttgtggtactttgggtttttaaacactttgggatactaatccctagacattgccttcactccacctttagtcccttctgagcactctctcgggagttggaacattgttatcccttgtaagaaatactaagcttatgttgatttttaagtaattatatcttctcttcttgctggtgggtggggcagtttggtttagtgttatactttggtctaagtatttgagttaaactgcttttttgctaatgaagtgggctggttgttagcaggtttgtttttcctgcctgttgattggtactagtggcattaacttttagaatttgggctggtgagattaattttttttaatatcccagctagagatatggcctttaactgacctaaagaggtgtgttgtgatttaattttttcccgttcctttttcttcagtaaacccaacaatagtctaaccttaaaaattgagttgatgtccttataggtcactacccctaaataaacctgaagcaggtgtttttctcttggacatactaacaaatacctaaaaggaagcttagatgggctgtgacacaaaaaattcaattactgtcatctaatgccagctgttaaaagtgtggccactgagcatttgattttataggaaaaaaatagtatttttgagaataacatagctgtgctaattgcacatctggttggaaggacatcccagattttgccttatactccagtggcctgtgatattgagtttaaggatttgaggcaggggtaattatttaaacatattgcttctattcttgggaaaaatagaagtgtaaaatgttaataataccaaatgtcactggtgacctcctccactggagaggactgggtttatgccagatcattttccggcacacacggaggggctttgacagattgataactttgtaagatgggagacatctgaaatattcatgttttccttttgtagtcccatctccactatttaggaaatgttctcagactttaaaaataatgccacagggcttgagctttctgtgcatttgactttaaaaggaagtttcattcatatttatcctcttatgtaaaattggcgggtataaaagtctccatttcccaaatatgttaaatgacaaaattattttataaaatggtttatgccacactttataaccttaagtttttaatttgagaatgtgaaagtacaaagtgccagtaggacttcaacaatcttgagtgcccaaggaataatacagaaaaagaagacagttgatgaatgagtttatagggttctaatctt

SEQ ID NO: 155846 - DNA, 376 bp, Homo sapiens
  misc_feature (1)...(376): n = a,t,c or g
gaagacttttataaaaggcctcaagaaaaatgcaaattgaaactacactgagatactatctctcacctatgagactggcaaaaatgcaaatgcttatcaacacatcctgttggcaaagtcacaggaaacgagaacactcatatgttagtggtaggaaggcaaaatggtgcaacccctcagcaaaggaatttggccatatctaatacaagcnnnnnnnnnnnnnnnnnnnnnnnnnnnnnnnnnnnnnnnnnnnnnnnnnnnnnnnnnnnnnnnnnnnnnnnnnnnnnnnnnnnnnnnnnnnnnnnnnnnnnnnnnnnnnnnnnnnnnnnnnnnnnnnnnnnnnnnnnnnnnnnnnnnnnnnnnnnnnnnnnnnncc

SEQ ID NO: 155847 - DNA, 498 bp, Homo sapiens
gtccagcggactaggcaattggtaacttcaccgagtccaatgagttcttctgacggcaaagttcttcccctcaatgtacagtcccatcaaaactgctggtggacccgcttcaacatgagttctctaaatgtggtgaaaatgacaacaatatccctcacacccagcaacagtaacacccctcttaaacattctgcctcattcatcagtgctacaggaacaacagaagaatcaaggagtgttccacagatcaagaatggttctgtcgtgtcgcttcagtctcctgggtccaggagcagcagtgcggggggaacatctgctgtggaagtcaaagtggaacccgaaacatcatcagatgagcatcctgtacagtgccaagagaactctgatgaggctaaagctccccagacacctagtgcccttttggggcagaaaagtaatacagacggagcactgcagaaaccttcaaatgaaggtgtcattgaaataaaagcaactaag

SEQ ID NO: 155848 - DNA, 589 bp, Homo sapiens
cctctaattatacagcccggatgaatctcactcagattttgaaccttccactgtttttcctagtgccaacccacaaaatatgatcgattccagcacttctgtttatgagttccaaacaccatcttacctcaccaaaagtaatagcaccggtcagatcaatttttctcctggagataatcaagcacaatcagaaattggagagcaacaattagatttcaatagcactgttaaagacctgttgagtggagacagcttgcaaaccaaccagcagctgaaataccctgatgtattaggagaatgaagatttaaaaacaaaattttgttttccacacagcttttcaagcatatttcatacagtgttcttgtccttcctctctgctggctggaatgcaaatgtgatggctagaactcaagcagccctcctggacttcatgttaaagacacatgctgaggatgattgagcaacaagatacaaggtgcccagggcatgatgactttggaagggaagatgcccaactagtcctgactgcttacctctggatgtgttttacatgagagaaataaatgtctttctggtttaactcacaaa

SEQ ID NO: 155849 - DNA, 3902 bp, Homo sapiens
atgatgaggttggaaggagctgaaccttctgggcagcttcaaaatattgatgaagaagttatctcttctgcttgccgtcttgtgtgtgagtgggcccagaaagtgttaagccaaccatttgacaccgtcttggaattagcccgcttccttgtaaaaagtcactatataggcaccaagtcaatggcagctctaactgtaatggcagcagcaccagcaggaatgaaaggaattacccagccttctgcttttatacctacagctgaaagtaattcctttcagcctcaggtgaagactttgccatctccaattgatgctaaacagcagttgcaacggaaaatccagaagaagcagcaagaacagaaactacaatcccctttgccaggagaatctgcagcaaaaaagtcagaaagtgctacaagcaatggagtgactaatcttcctaatggaaatccttcaatcctttctcctcaacctattggtatcgttgtggcagctgtccctagtcccattccggtccagcggactaggcaattggtaacttcaccgagtccaatgagttcttctgacggcaaagttcttcccctcaatgtacaggtggtcactcagcacatgcagtctgtgaaacaggcaccaaagactccccagaacgttccagccagtcctggtggggatcgttctgcccggcaccgttaccctcagatcttacccaaaccagcgaacaccagtgcactcaccattcgctctccaactactgtcctctttactagtagtcccatcaaaactgctgttgtacccgcttcacacatgagttctctaaatgtggtgaaaatgacaacaatatccctcacacccagcaacagtaacacccctcttaaacattctgcctcagtcagcagtgctacaggaacaacagaagaatcaaggagtgttccacagatcaagaatggttctgtcgtgtcgcttcagtctcctgggtccaggagcagcagtgcggggggaacatctgctgtggaagtcaaagtggaacccgaaacatcatcagatgagcatcctgtacagtgccaagagaactctgatgaggctaaagctccccagacacctagtgcccttttggggcagaaaagtaatacagacggagcactgcagaaaccttcaaatgaaggtgtcattgaaataaaagcaactaaggtctgtgaccagaggaccaaatgtaaaagtcgctgtaatgaaatgctgccaggcacgtcaacaggcaataatcaaagcactatcactctatcagttgcttctcagaacttaactttcaccagcagcagctcaccacctaatggtgactcaatcaataaagaccctaaattatgcactaaaagcccaagaaaacgactgtcttctacattgcaggagacccaggtgcctcctgtaaagaaaccaattgtggaacagctttcagcagctaccatagaagggcagaaacaaggcagtgttaagaaggaccaaaaggttccacattcagggaaaacagaaggttcaacagcaggtgctcagattcctagcaaggtatcagtaaatgtcagttcacacataggagcaaatcaacccttgaattcctctgcccttgttatcagtgattcagctttggaacagcaaacaaccccatcatcatctccagatataaaagtaaaacttgaaggaagtgtctttctcttggacagtgattcaaagtcagttggcagctttaatccaaatggatggcaacaaatcactaaagattctgagtttatatctgccagttgtgaacaacagcaagatatcagtgttatgacaattcctgagcactctgatatcaatgacttagagaaatctgtttgggaattagaaggaatgccacaggacacatatagccagcagctacatagccagatacaggaatcttctttaaatcaaatacaagcacattcttcagatcagttacctctgcaatctgaactgaaggagtttgagccttctgtttcccagacaaatgaaagctactttccttttgatgatgaacttacacaagatagtattgtggaagagctggtgcttatggagcagcaaatgtcaatgaacaattctcattcttacggcaactgtttgggaatgacccttcagagtcagtcagtaactccaggagctccaatgtcatctcacacttccagcacccacttctatcatccaatccacagcaatggcactccaatccacacacccacacccacacccacacccactcctactccaaccccaaccccaaccccgacatctgaaatgattgctggatctcagagtctgtcacgggagagcccttgctccaggctagcccagactacacctgtggatagtgctttaggaagtagccgacatacacccattggtactccacattctaactgcagcagtagtgtcccccccagccctgttgaatgcaggaatccgtttgcattcactccaataagctccagtatggcatatcatgacgccagcattgtctcaagtagtcctgtgaaaccgatgcaaagacccatggccacacaccctgacaaaaccaagcttgaatggatgaataatgggtatagtggggttggtaattcatcagtttctggccatggtattctcccaagctatcaggaactagtggaagaccgtttcaggaaacctcatgcttttgctgtgcctggacagtcttatcagtctcaatccagacatcatgacactaattttggtcgtttgactcctgtctctcctgtgcagcatcaaggtgccactgtaaataacaccaacaaacaggagggttttgcagtccctgcccctcttgataataaaggaactaattcatctgccagcagcaacttcagatgccggagtgtgagccctgctgttcatcgccaacgtaatcttagtggaagcaccctctatccagtatctaatatcccacgatctaatgtgaccccctttggaagtccagttaccccagaagttcatgttttcacaaatgttcacacagacgcatgtgccaacaacatagctcaaagaagccaatcagttccattgacagtcatgatgcagacagccttcccaaacgctcttcagaagcaagcaaacagtaaaaaaataaccaatgttttgttgagtaaacttgattccgacaatgatgatgcagtgagaggtttgggaatgaacaacctgccctctaattatacagcccggatgaatctcactcagattttggaaccttccactgtttttcctagtgccaacccacaaaatatgatcgattccagcacttctgtttatgagttccaaacaccatcttacctcaccaaaagtaatagcaccggtcagatcaatttttctcctggagataatcaagcacaatcagaaattggagagcaacaattagatttcaatagcactgttaaagacctgttgagtggagacagcttgcaaaccaaccagcagctggtaggtcagggagcatctgatctcactaatactgcatctgatttctctagcgatatcaggttgtcttctgagctctcaggcagcatcaatgatttgaacactttagacccaaatctactgtttgatccaggtcgtcagcagggacaagatgatgaagctacactggaagaattaaagaatgacccattatttcaacaaatttgcagtgaatccatgaattctatgacttcatcaggttttgaatggatagaaagcaaggaccatcctactgttgaaatgttgggttaaattgtgttttataacatgtagcacactgtatctaaagacatatgtattgtatttgtcttaatggaagtgcctcccgcagcagaaatactattaatatgtggaaccaaattttt

SEQ ID NO: 155850 - DNA, 705 bp, Homo sapiens
tttttttttttttttggaaaacaatatattaatttattcccaagaaaacaaaacatggaacctcatcgaaaacaaacatcagatacagtagtttcagggcattcccatgggctgtcagaaacccactagcccaaacactatgctcttccaacattaaagtatttaagacacaggagagatgaccaacaacagacatgtaaacatcaattccagaaagatttcttgttctacatgagaaacatccagtgtaaaacggttcctcttctcaggtgctgtcatttaaataagttgaaaagagacaatttttaaactccactgctgaccctgagtgcattcgctatcccctcacctattttgttttgggacaaagtctcgctcttgtcaccaaggctggagtgcagtggcgcaatctcagctcactgcaacctccacctccggagttcaagcgattctcctgcctcagcctcctgagtagctgggatgaacaggcatgcgccaccatgccccagctaatttttgtattttttttagtaaagacggggtttcaccgtgttagccaggatggtctcgatctcctgacctcaaatgatccacccacctcagcctcccaaagtgcaggtattacaggcgttacacttgcgcccagcctctttgttcttatacattaaattttcatggaccgtctggagattgagaacacagcag

SEQ ID NO: 155851 - DNA, 560 bp, Homo sapiens
gctcgacttttttttttttttttaaatagaatcttgctcggctgtctaggctggagtgccatggcacaatctcagctcactgcaacttccgcctcctgggttcaagtgattctcctgccttagcctcccaagtagctaggacttagaggcacgtgccaccacacctagctaatttttgtacctacagtagagacggggtttcgccatgttggccaggctggtctcgaactcctggcctcgggtgatctgcccaccttgacctcccaaagtgctgcgattacaggcatgagcgtgacgcactgtgtccagccagccaccgcgcccagcccacccagcctctttcaccaatgtttgatagtttaatatgtacagatctttgacctctttgattaaatttattccgaagtattttgtgttctattaaaaaatagaaatgggatagttttgttcattatctttttcagacagtttgctgttggtatatagaaacactgatttttgtatgttgatttaatatcctgcaactttcttagatttgtttattagttctaacagtttta

SEQ ID NO: 155852 - DNA, 781 bp, Homo sapiens
atggttcacatcacaggactctgtgcagacaacctccagtaccaggctggagccagaataatcagtgttcctgaagaagacaattctaaaagcttggaaaacatatttgggggaataattgaggaaaacttccccagccttgctagagatctagacattcaaatacaagaagcgcaaggaacacctgggaaatgtatcacaaaaagatcttcacctaggcacattgtcatcaggttattcaaagttaagacaaaggaaagaatcttaagagctgtgagacagaagcaccaggtaacctatagaggaaaacctatcagattaacagcagatttctcagaagaaaccctacgagctagaagggattggggccatatcttcagcttcctcaaacaaaacgattatcagccaagaattctgtatgcagcgaaactaagcatcatatatgaaggaaagatacagtcatattcagacaagcataatgctgagagaattcaccattaccaatggcaaactactaaaaggagctgtaagtcttgtggtggctctaaaccgttgaaacaaatcctggaaacacatcaaaacacatcaaaacagaacctctttaaagcataaatcacataggacctataaaacaaaaataccattgcatgatgaatacaatgatctgaggtctgctcttagacctgcatctcacacagcctatggaagtatgctaatgatcctgaaaagctcattgactcttttcaagcatggtgatgaggtcgtgggaagaagagcaaag

SEQ ID NO: 155853 - DNA, 505 bp, Homo sapiens
aaaaaccaaaattatccaaatggccaataaacataggaaaaggcatctagtctcagtagtaagtaaggttgatgcaaaagaaaatcataatgatacaccattatataccacaatggctaaaaacatcaaagtctgatatgattaagtgttgctcgggctatggaacaacagaaatcttcacacactacttgtgtgaatgcaaattattacatctactttggagaatggtttggcttgattctgctaaagttcaagacagatacgccccatgatccagcaatcccactcctaggtacatacccagcagaatgtatgcacatgtaccccaaaggcacacacagcagcactatccataatagtccccagctgggaacaacccaaatatcctcaatagcacaatggtaagtacactggtatattcataaagtagaatgtcatacagcacaaaaacaaagggacagccacatgtaacaacatggatgaatctcgcaaacataaggacgag

SEQ ID NO: 155854 - DNA, 535 bp, Homo sapiens
gtgtcccatgtcatcaccaatgttctgcagcctccagccaacagacctcaggaaagaggggatgaacttgcagactctgcgcttgagatcttcaaacaagcatcagcgttttccagggcttcccagaggtctgtgcgactagcccctgtctatcaaaagttattagagaggatgaagcattagcttgaagcactacaggaggaatgcaccacggcagctctccgccaatttctctcagatttccacagagactgtttgaatgttttcaaaaccaagtatcaaaacatgaatcaagcaatccagcctcatgggaagtcctggcacagtttttgtaaagcccttgcacagctggagaaatggcatcattataagctatgagttgaaatgttctgtcaaatgtgtctcacatctacacgtggcttggaggcttttatggggccctgtccaggtagaaaagaaatggtatgtagagcttagatttccctattgtgacagagccatggtgtgtttgtaataataaaaccaaagaaacata

SEQ ID NO: 155855 - DNA, 2811 bp, Homo sapiens
atggcgctcttcgtgcggctgctggctctcgccctggctctggccctgggccccgccgcgaccctggcgggtcccgccaagtcgccctaccagctggtgctgcagcacagcaggctccggggccgccagcacggccccaacgtgtgtgctgtgcagaaggttattggcactaataggaagtacttcaccaactgcaagcagtggtaccaaaggaaaatctgtggcaaatcaacggcactggggacagctgacgtgaagggggtatcaagcctggcagttagtgtcagcgacttaggaggtgaacaaatgaggaaactgagacccagagagatgatgaaattggctgaggatggcccagctgccctaccactctcaaacctttacgagaccctgggagtcgttggatccaccaccactcagctgtacacggaccgcacggagaaagctgaggcctgagatggaaggggccccggcagcttcaccatcttcgcccctaagcaacgaggccttgggctccctttgccagctgaagttgctgggactcccttggtcagcaatgtcaacattgagctgctcaatgccctccgctaccatatggtgggcaggcgagtcctgactgatgagctgaaacacggcatgaccctcacctctatgtaccagaattccaacatccagatccaccactatcctaattgggattgtaactgtgaactgtgcccggctgctgaaagccgaccaccatgcaaccaacggggtggtgcacctcatcgataaggtcatctccaccatcaccaacaacatccagcagatcattgagatcgaggacacctttgagacccttcggcttgcttgtggctgcatcagggctcaacacgatgcttgaaggtaacggccagtacacgcttttggccccgaccaatgaggccttcgagaagatccctagtgagactttgaaccgtatcctgggcgacccagaagccctgagagacctgctgaacaaccacatcttggaagtcaggctatgtgtgctgaaagcatcgttgcggggctgtctgtagagaccctggagggcacgacactggaggtgggctgcagcggggacatgctcactatcaacgggaaggcgatcatctccaataaagacatcctagccaccaacggggttgatccacttacattgatgagctactcatcccagacttcagccaagacactatttgaattggctgcagagtctgatgtgtccacagccatttgacctttttcagacaagccggcctcggaaattcatctctctggaagtgaggcggttgaccctcctgggttcccctgaattctgtatttcaaagatgggaacccttccaattgatggcccttacaagggatttgctttggaaccacataatttaaagaccagctggcctctaagtatctgtaccatggacagaccctggaaactctgggcggcaaaaaaactgagagtttttgtttatcgtaatagcctttgcattgagaacagctgcatcgcggccccacgacaagagggggaggtacgggaccctgttcactgatggaccgggtgctgatcccccccaatggggactgtcatggatgtcctgaagggagacaatcgctttagcatgctggtagctgccatccagtctgcaggactgactggagaccctcaaccgggaaggagtctacacagtcttcgctcccacaaattgaagccttccgagccctgccaccaagagaacggagcagactcttgggagatgccaaggaacttgccaacatcctgaaataccacattggtgatggaaatcctggttagcggaggcatcggggccctggtgcggctaaagtctctccaaggtgacaagctggtaagttcagcttgaaaaacaaatgtggtgagtgttcaacaaggaaccctgttgccgagcctgacatcatggccacaaatggcgttggtccatgtcattcaccaatgtttctgcagcctccagccaacagacctcaggaaaagagggattgatcttgcagactttgcggtttgagatcttcaaacaagcattcagcgtttttccaggggcttcccaaaaggtctgtgcgactagcccctgtctatcaaaagtatttaagagaggatgaagcattagcttgaagcactacagggaggaatgcaccacgggcagctctccgccaatttctctcagatttccacacgagactgtttgaatgtttttcaaaacccaagtatcaccacttttaatgtaccatgggcccgcacccataaatgagatgtgaagccttgtgcatgtgggggagaagggaaaaagaatgtacttttttaaatccatgttcccccccctaaaccatggcttgttaacccacttgcaatgcaagaaacttgggatgtcacttgcctgacattcactttccaggagaggaccctatccccaaatgtggaattgacttgcctatggccaaggtcccctgaaaaagggagcttcaagtattgtggggcttcataaaacatgaatcaagcaatccagcctcatgggaagtcctggcacagtttttgtaaagcccttgcacagctgggagaaatggcatcattataagctatgaggttgaaatgttctgtcaaaatgtgtctcacatctacacgtgggcttggaggcttttatggggccctgtccaggtagaaaagaaatggtatgtagagcttagatgtccctattgtgacagagccatggtgtgtttgtaataataaaaccaaagaaacataaaaaaaaaaaaaaaaaa

SEQ ID NO: 155856 - DNA, 565 bp, Homo sapiens
tttttttttttaaagagacgtgatctggctgtcgcccagactggagtgcagtggggcgaccatggctcactgcagcctcaaattcctgggcgcaggcaatcctctgaccttagcttcctgaatagctgagaccacagacacatactatcatgctcagctacttttacttctttctagaggtctcactctgctgcccaggctggtctcgaaattctagccacaagcaatcctccagcctgagcctcccaaggtcctgggatttataggcgtgagtcaccacacctggcaaaaagcaactttttgtatatgcttaccagctaataacatcttgtcatgcttaaatatctatagtttcttttatcataaaacaaatcacaattttatcatgaaaacaaaccacaaacaaatataagactacgttataaaagtgaatgtgactcttcaaactgcagattccacctgctctgccggaccctggagcacacacttctcacaaagggagccatgaaatctgtgcttccaaatcactggtctaagcagccttcagctcctactcactcgtgcc

SEQ ID NO: 155857 - DNA, 813 bp, Homo sapiens
ccagactattttataattttaccatagagatgaggttctcactgtttgtccagggctgtctcaaaactcccttggctgaagtgatctgctcgtcttcgcttccgcaagtgctgggattacgaggcgtgagctacccacatgccctggcttccattgtctttgtgtgtgtgtgtgtgtgatggggttctgctcttgttgcccaggctggagtgcaatagcgcaatctcagctcactgcaacctctgcctccagagttcaagcaattctccttcctcagcctcccaagtagctggatctacaggcacccaccacctccattgtctttttacttgcccaagttaaaatcctgtggactgtgtactgggatctgggcctggcggttgttcatatttattggatcttgagtccagggcagtgtttttaagtgatatgagttagtagtgaaaattgaaaaggatattttacaaccaaatacaggttttctggtgtcttttgaaaaatccaaagatttggcaactcgacctaggctccgacaaaaccacagttgttgggagctgagccggagccagaactcacaattcaccgtggcccggccacccatcccctacactcccgtggggcttcctggaccaagcaccacgtggcatttcatcatggcttgctttgaagttgaatgttgttgggtgtttatctttaaagtacagcggaaggaaagaaaggggaagtatttccttagacccatgtctctggtccaaatagggcctttccatctgggcatttccggctccaattatatgacttgctgagttccca

SEQ ID NO: 155858 - DNA, 760 bp, Homo sapiens
gaccaggagtgcagtggtgtgatcacagctcactgcagccttgacctctctggctcaagcaattgtcccagctcagcctcccaagaagctgggactacacgcatgtgccaccatgtctgtctattttttattttttgtagagatgaggtctccctatgttgcccgggctggtctccaactcctggactcaagcaatcttcctgcctcagcctcccaaagtgctgggattacaggcatgagcctcacactgggctcagatttcatctttaaaacagacacgcggcacattaatttcttctatttggtcaaggtactccaagttttatgtaaccacccaaattagggcacctttaacctaaaaatgatatatttgatgttttagtgactgcaatacaaaatcacaatggtttcaaaaacatgttgctattttttcagcagctagaatgaaatgtgtttcatctcataatgtgatccataaagaagttaatctttttccatttgctgaaaagctgagccttttggattaaccatgtacatgcaaccagttggtagacaaaacacattttaaacttttggttactaagacattgataaataatcccagattaactcaatttctctgaagtctaattttcaaagttttcacaccattatcataattgagccttataataagcctatgagggtagggattattttctccatttttggaggaagcaacagagaattaatattcaaggaagatgatttaactcgtgcc

SEQ ID NO: 155859 - DNA, 1024 bp, Homo sapiens
tgagatggagtttcactcttgttgcccaggctggagtgcaacgcgtgatcttggctcacgcacaacctccgcctcctgggttcaagcgattctcctgcctcagcctcccgagtagctggattacaggctcgcgccaccacgcttggctaatttttgtatttttagtagagacgggatttctccatgttggtcaggctggtctggaactcccaacctcaggtgatccgcctgcctcagcctcccaaagtgctaggattataggtgtgccactgtgcccaggtatttcaaggatttttgtacagcaaatggccttagaagacagagatagtatctccctaagattgtggttccttagccgtcatgcaaacctgcagtgtgtaacactttcctgggcctgccagttattgccctgtgggacttggagggcaagggagaccaaggctaacacactgcctgctgtgccctgagcagtagtctctgcccaagtaatcctgtgttttctgccagcattcatgaagctggctccctaacacaagaagttgttgaaagttctactcagcttcttagctgcctcttccagaatcagcaggtgcccttatgggaaaagtagctctaagtcccaggctcacttctcttgagtttccttcgtgtcctgaattttggttctatattgccagctgatgctttcagatagatgctgtttatattttgcacagcttttctagttgttctctatgttcagtgggtccaaatttcgtggtctaccattagtgaaagtggcagatggtgaaggcaattttcaactcaaaggtttcaaggccaccaaaaagagaaatccacatgtactgagaaagaaaagtcaagacctgtaagaagtgtcacaggtttcttaggtcacacatacaaaactgacccatatattcctgaaaatgaacagactgtttagtgccccagacccctgctatggataccctatttgaccttcaggcttagttccaaagccagctatatcttttctcgtgcc

SEQ ID NO: 155860 - DNA, 784 bp, Homo sapiens
  misc_feature (1)...(784): n = a,t,c or g
atgcgacttttggagctgataacctttttctgctagagatactcagtcctgcctcttgccacaagctgctgagggctcggggttccatctgagctccaggagattcgtgtgctgccactgactgtctgtccctcctctgtcccaccccagtatgagaatgagtcggccctgaacctttatgagacttgcaaggtgcggaccgtgaaggctggcacgctggagaagctggtagagcacctggtgccagccttccagggcagcgacctctcctacgtcaccatcttcctgtgtacctatagagccttcaccaccacccaacaggtcctggacctgctgttcaaaaggtgagcatgagccctccactgcacagggtgcacaggggccctcgnnnnnnnnnnnnacctggcatgcgggtctttggcaatggctgattcancctctctgagctctcgctttgctcatatgaaagagaaactggagtgctaagaaggacctcattgcggttgctaccatgccctcgggcggattgaaggcgttgaaaggtggctccctccacggcctggcctcttgtaggaatgggctgcagggcttgcgggcttgtttttattaatttctgttcccctatgggaagctcttgccccagctctttctgtttgggcctttgtgcgagcagtttccatttgcagaggaatctggtttattatgggtgcgtggagggccaagggcgtccaatcttgggaaggtcggtgggcttttctccacaaatataaacccctcggcgccg

SEQ ID NO: 155861 - DNA, 483 bp, Homo sapiens
ccctctgccagctcaggccaagccggggggttctggagtcagtccctgtttaaacaagagtcatcaggttttgtgaggacctcagcagagtctgtcctcaggcaggagtcattgagaggggtccttggagttctggagctgtattggaggggatctgaggtctgtggctcaagacagtccttgtatgggctctcaagcggtaggggtatcctgcagggcccccaggagcatccctgatcacccctctgcccctccccaccagagctgaagatccctgaaaacgccaacgtcttctatgccatgaactctactgccaactatgactttgtcctgaagaagcggaccttcaccaagggagtgaaggtcaagcacggagccagcttcacccttccttcgcatgaagcagaaaggactcaagattgccaagggcatcttctgagggcatcctcccagggtctggctggctggtagccaagcacttat

SEQ ID NO: 155862 - DNA, 812 bp, Homo sapiens
tgaaattctacttttaaagctgataacctttttctgctagagatactcagtcctgcctcttgccacaagctgctgagggctcggggttccatctgagctccaggagattcgtgtgctgccactgactgtctgtccctcctctgtcccaccccagtatgagaatgagtcggccctgaacctttatgagacttgcaaggtgcggaccgtgaaggctggcacgctggagaagctggtagagcacctggtgccagccttccagggcagcgacctctcctacgtcaccatcttcctgtgtacctatagagccttcagcgccagccaacaggtcctggacctgctgttcaaaaggtgagcatgagccctccactgcacagggtgcacaaggggccctcgcccccacccccacctggctgcgggtcttggcaatgctgaatcacctctctgagcctcgctttgctcatatgaaagagaaactggagtgctaagaagacctcatgggggtggcaccatgcctgggcgggatgaagcggggaaagggcttccttaacgcctggccctggaaggaatgggctgccggggctggggggcgtcgttttaagaatttcctggcccccatggggaggctctctgccccaagcctctcttgtatgtggccctgggccgagcaggtttccacttgtcaggagaatcgaatctatctggggctgttgagggaccaaagggcgctacatactgggaaggactgttggacttatcattggacatttattgaagactactggggctgcccttttagcattaaatattgagaa

SEQ ID NO: 155863 - DNA, 4132 bp, Homo sapiens
  misc_feature (1)...(4132): n = a,t,c or g
atggtgcagcgcatgtgggccgaggcggccgggcctgctggcggcgccgagccgctgtttccgggctcccggcggagccgcagcgtgtgggacgccgtgcgcctggaggtgggcgtccccgacagctgcccggtggtgctgcacagcttcacgcagctagaccccgacctgccgcgcccggaggtgggtgggggtcggggccttctgcagaaatcagccagcagggtgggcagtgggggctgccgccgcgccccgtccaacagtagggaccacggctggggttttgcgcccctcaataccgttccagggcctgctgtcaccaaggccgctgcagcccaggtggacctttttctgcggcactgtccctgtttacatcggtggcctgtgccttatttcactcagttcccacccagggcccgcagcgcgtcgttagcctttacgatgcaggctgtaggtctgtgcagccgccagtctgtgccctatctgggaaacaggttacacaggtgcatcccctgcacggtggccaggcaggcccttgacgtccccgcgcccggctgccgggcgttgtcttcacagagctccacgcaggagatcggtgaggagctgatcaacggagtcatctactccatctccctgcgcaaggtgcagctgcaccacggcaggcaacaaggggcagcgctggctcgggtatgagaatgagtcggccctgaacctttatgagacttgcaaggtgcggaccgtgaaggctggcacgctggagaagctggtggagcacctggtgccagccttccagggcagcgacctctcctacgtcaccatcttcctgtgtacctatagagccttcaccaccacccaacaggtcctggacctgctgttcaaaaggtacggtagatgtgacgccctcacggcctcctctaaatacggctgcatcctcccctattccgacgaggatggtggaccccaggaccaacttaaaaatgccatctcctccatcctgggcacctggctggaccagtactcggaggatttctgtcaacctccggactttccctgcctcaagcagctggtggcctacgtgcagctcaacatgccaggctcagacctggagcaccgtgcccactttctcctggcccatctggagcactcggaacccattgaggcagagcctgagggtgaggaggactgggctctgtcaccagtgccagctctaaaaccaactccagagctcgagctagctctaacaccagctcgagcacccagcccagtgccggctccagccccggagccaaaaaccaactccaacttcagtttcaggttcaaagctagaagaaactccggcaccagctccggagctccggcgggctccatagccagctgtgggactagaatcggctccagcgccagctctggaactagagccagctccagaacaggatccagctccctcacaaactctagagctggagccagctccagcaccagttccatcattacagccttcctggccttcacctgtggttgcaaagaacgggctgagtgaggaaaagcctcacctcttggtgttccctccagatctggtggcagagcagtttacactgatggatgccgaactggtcaaaaaagaggggccctaccactggccgggcttcatctggtcccagcgggacaagaagggcaaggagctcctggcgcccacgcatccgcgccactgtcacccagttcaacagtgtggccaacatatgtcatcaccacctgcctcgggaaccgaagcacgaaagccccagacagggccagggtggtggagcactggatcgaggtggccagggagtgccggatcctcaagaacttctcgtcactgtatgccatcctctctgccctgcagagcaactccatccaccgtctgaagaagacgtgggaagacgtttccagggacagtttccggatctttcagaagctgtcagagatcttctcagatgagaacaactactcattgagccgggagctgctcatcaaggagggcacctccaagtttgcgcaccctggagatgaaccccaagagagcccataaacggccgaaggagacgggcatcatccagggcaccgttccctacctgggcacgttcctcaccgacctggtgatgctggacactgccatgaaggactatctgtatggcagactcatcaactttgagaagaggaggaaggagttcgaggtgatcgcccagatcaagctgctgcagtcggcctgcaacaactacagcatcgcgccagatgagcaatttggggcctggttccgggccgtggagcggctcagcgagactgagagctacaacctgtcggtgcgagcttggagcccccatccgagtcagccagcaacaccctcaggaccaagaagaacacagccattgttcaagcgctggagcgaccgccaggccccccagcattgagctcagttaccagtgggcagttcccacttccaagttcctgttgaccagttcaggtgttgggcccttacttcagcagcggggacatcgctgacgcgctcagcgtgcactcggccggctcctctagctccgacgtggaggagatcaacattcagcttcgtcccggagtcttcctgatggccagggaaaaagaagttctggggaattcagccttcaaaagttattccccggagacctccggcatcagctcaggcctccagcagcacctcgttctccttaagcctccaccacgcccgtggctgccacacgcacccacaagcgctctgtctcagggctctgcaactccagctccgcgctgccgctctacaaccagcaggtggggcgactggttgtaatcatccgcgtcagctgggacgtgggacaatgggcaacatgttacaagagcatcctggggtgaccagccaagataaggctccggctgtaattccgcaaggccatggacaaacacaacctggaggaggaggagccggaaggacttatgagctgctgcagattctctcagatgaccggaagcttgaagatccctgaaaacgccaacgtcttctatgccatgaactctactgccaactatgactttgtcctgaagaagcggaccttcaccaagggagtgaaggtcaagcacggagccagctccaccctccctcgcatgaagcagaaaggactcaagattgccaagggcatcttctgagggcatcctcccagggtctggctggctggtagccaagcacttatggaccagagtggcccaggccagctgggcgccttcctcccaccttgccagcccagggtaccccagactccagtttcatccttgaacctctcccgctgcttgggatttgacgcctgccatttggtcaggctgaacttgggcctcccgtggaaccaactcgcttgccttaaggtggccttctggctctctggaaccagaggactagctgactttttggcaaaggaagcagtgccaacggggnatggcatgggtgccctgcctgcccccgggcgccacctctgtacacttccctgacaccttcccaggtgtgggtcactgccaccttgtgcccatgggcaccccagagcacccactgtgaccactcagtgttcctttnntcccttnnccaaagttagggnccccncccaccagggcactggcctgtggaacctttcgcaggggtcccgggcccttcccaccattttagccttttttcagggttgcaccaaaagatttccatcattcagggcccaactgagaagtgagggagtctcaccccaccgcttacccccagccctcccctggggagcagagaggagaaaccctcttcatgggaccagactcttgcacccggtgagtgagggacagtcccagctgagtcccatcgatgtttgaatctcatggccattgcaagtgccattcagccactgcgtcctgggctttacgagaccatcgcaagacggggggttagtgaggaaggaggatttgggggtgtggtggttggggtgattgaatattttgtataaaaagcaaaaagaaaaaaaaaatgtttgtttactgattggggaggggcaatatttatttgttgtaaatagcaaatgctagacttgaatattatattaaaatcctgtttctacta

SEQ ID NO: 155864 - DNA, 435 bp, Homo sapiens; identical to SEQ ID NO: 148087
  misc_feature (1)...(435): n = a,t,c or g

SEQ ID NO: 155865 - DNA, 397 bp, Homo sapiens; identical to SEQ ID NO: 148088

SEQ ID NO: 155866 - DNA, 2090 bp, Homo sapiens
  misc_feature (1)...(2090): n = a,t,c or g
cccttgaggagctggttgcctcgcctccctgattctcaagcggacatcatttccaccgttgagtttaattactctggagaccttcttgcaacagggacaagggcggcagagttgttatttttcagcgtgaacaagaggtactggcccagccccgccgtcctgccctgccatgaagtgtgagcagctttctcagcacttcctgcagagaagtctggcaggggtgtgaattctctcttcccttcagggagagaataaaaggcgccctcattctaggggagaatataatgtttacagcaagcttttcaaagtcatggaaccgggggttttgactatttgaaaagtctagaaattgaggaaaaaattaataaaattaggtggttaccacaacagaatgctgctcattttctactgtctacaaatgataaaactataaaattatggaaaataagtgaacgggataaaagagcagaaggttataacctgaaagacgaagatggaagacttcgagacccatttaggatcacggcgctacgggtcccaatattgaagcccatggatcttatggtagaagcgagtccacggcgaatttttgcaaatgctcacacatatcatataaattccatttcagtaaatagtgatcatggaaacatatctttctgccagatgacctggaggaattaatttatgggcacttaggaaatcacaggtaggaagcttttaacatcgtggacatccaagcctgctaacatggaggagctgaccgaagtcatcactgcagccgagttccacccgcaccagtgcaacgttgttccgtctacagcagtagcaaagggaccatccgcctgtgtgacatgcgcctcttcggccctgtgcgacagacactccaaagtttttttgaagagcctgaagatcccaagcaagtaggtccttcttctcaggaaataatttcatccatatcccgatgtaaaattccagtcatagtggggcggtacatggatgaccagaggattacctgttcggtggaaggtgtggggaccttcaacatgggaggaggcagggccggtgggaggacccaccagggtccacgagtacctggcgcacaaagcttctgctctctctaatgagaacgactgcatcttttgacaagttttgagtgttgctggaacggtttcggatagcgccatcatgaccgggtcctataacaacttcttcaggatgtttgatagagacacgcggagggatgtgaccctgggaggcctcgagagagagcagcaaaccgcgcgccagcctcaaaccccggaaggtgtgtacggggggtaagcggaggaaagacgagatcagtgtggacagtctggacttcaacagagaagatcttgcacacagcctggcaccccgttggacaatgttatttgccgtggctggccaccaataaacttgtacatattccaggacaaaatcaactagagacgcgaacgtgaggaccaagtcttgtcttgcatagttaagccggacatttttctgtcagagaaaaggcatcattgtccgctccattaagaacagtgacgcacctgctacttcccttcacagacacaggagaaagccgcctccgctggaggcccggtgtggttccgcctcggcgaggcgcgagacaggcgctgctgctcacgtggagacggctcctcggaagcagaagttgacgggacacttgctcccaaaaagggtcatttacctcatgaataaatggtatttatttcaggtccggagcctttcctttcccaaatttataggaccaaaaaattaaacatccaatgagaaaaagttattgtcagatacgcttctttctcccaactttccctctttctctggcgatcacacttggggccttcactgcagcgtgggtgtggccaccgtccggtgtcctctcggcccttccctccagagtccaggtggatctcttgtggaatgtgtggattgtggcccaagcaagngctcaggcggccccactcacccaacaggcatccgcccgccaccccttcgggtgtgagcgctcaaataaaaacacacacactataaaggtgtttttaaatcca

SEQ ID NO: 155867 - DNA, 443 bp, Homo sapiens
ttttttgtgcttgttttattggaagcaagactccagccagctgcagggctcaggggaggaggcctggagagttcagtcctgggtctccctctgggccagcagggggaaaaggggtgttaaaagagctagaaccctcagagatgctcctctgaagcaggggaaagaaaactagaaaggaaaactgtcccagggcggggagcggaatatgggcccccacatctcagactctcctaccctcaagcagttaattctcaccccctgccttcctctgtcaacggtgggggtgattccaataactcttctcagcttccagaatcccactgtccaccattctcccccaaagaaggtcccagaaaaggtgaagttccgtgtcttcacgcaacacgggcataagcagcaattatcgcacgaagtttccctagggtggtcggggatcctctcct

SEQ ID NO: 155868 - DNA, 297 bp, Homo sapiens
tcactcctcggtcctccggagcccacaacctggacacagctcctcaagacaggtagcatggaccatgctgagggcgatgaaggaaaagacggccatcactgtgaacatgacagtgggaattagcatcaccaccgccgagccaatgttcgttccgaagaaggagatggtagcaatccagccgctgcaggaagaggccagtgtggggccaactcctgagctcttatcaggaagctgccgatcaccaatttcaggtatttctatcttgggaaactgcccttccctggcaccactgaccat

SEQ ID NO: 155869 - DNA, 1007 bp, Homo sapiens
ggcacgagctgattctatcccctgggcccacgcagggtcagacgcctgacgaagcgggcgttattattagggtacttaagaacgtgcccgacctcgccattctaaattccaaggacgcgctggatccgcgacagcccggctaccagcccccgaatccccatcctggtccctcgtccccgccagccgcgccagcgtccaagaggagcctaggggaacccgcagctggagaatgcttcgcgaagcgatcgcaacccgagccaggggttgcggacgaggatcagacggcctgaaactccggactgtgggccacctagtccggcaggatcttccgccagcgcctccaccttcagatgtacctccagcctttcactcctcgggtcctccggagcccacaacctggacacagctcctcaagacaggtagcatggaccttaaggcgacaagagaggggccccaggagtggcaggagaggatcccgaccaaccctagggaaacttcgtgcgataattgctgcttatgcccgtgttgccgtgaagacacggaacttcaccttttctgggaccttctttgggggaggaatggtggaacagtcgggattctggaaaactttgtttgggcacccccaagggttaaagccaccccagcattcacgaagagcacctgaaagtatggaagctgagaagagttattggaatcaccccccaccgttgacagaggaaaggcaggggggtgagaattaactgcttgagggtagcgagagtctgagatgtgggggccctattaccgctccccgccctgggacagttttcctttcttagttttctttcccctgcttcagaggagcatctctggagggttctaagctcttttaacaccccttttccccctgctggcccagagggaggacccagggacttgaactctccagggcctcctccccttgagccctgcagctggctgggagtcttgcttccaattaaaacaagcccaaaaatgaaaaaaaaaaa

SEQ ID NO: 155870 - DNA, 513 bp, Homo sapiens
atggaggttgcagtgagccgaatcatgacactgcactccagcctgggcgacagagcgagactccatctcaaaaaaaaaaaagaagaagaagaaaaagaagaagaggaagaagaggaagaggaaaagaagaaggaggagaaggagaaggagaagaagaaggagaagatgatgaggaggaggaagaaaacaaaaaacaatacaaaacaaaacaaaacctgttccaaacagcaggcactgctgaggaaggaaaagaactttcacaaaaaaaggtggcctgcagcaccgggtgtgacagcaaggtatgccaccagtaagggggatgtctcagcagctgccagcactctgcctgtgaaaacgccagctccaattcaaagaagaggcgaggtgagtaccattcacctctcccaagtggtccagtggcagtggggcccccacgcactctacaccgttgttgtgttgctagaggaaggagagcagctgagccctggggacctggggacgggcttcatttga

SEQ ID NO: 155871 - DNA, 3944 bp, Homo sapiens
ccatgttttccaaataccagccccatattaccttcagcattggggcccagctggaaacaacgttgatcataatgaaaaggactgtgttttcaagaaccatactgaggatgaatccctagagggaattcagcccccagtgggggagcatggtttgaatacgcccttctctgtgaggagaagctgggattcattgaatgaggatgtggaaacagaagttctaagcatctgctttaatgagaagggtcctgttcatgccatgcctgtggttgactcaggaaacaggcaggaggatacccatggctccgatggagatggggatggggagattgtggacgaagatgcagcggtggcggaggcccttgcagctttagaagctgctactgcaggagaagatttggatgagactgattaggggaggggatttgcacagggaggtaagctggtgtcatgctgagcatgcaaacgcatttgctccctggatgcatagcaggttgattctgccagcatgcaccagtgcagccttaccagttgtttacatccagcatctgttctgattgtcagcatctgtcccatgctgcttgtcacatatctggagtttcactctgtgtagatgagctgtcattcaggacactaggagaaaaatctgagtgggtcattgtgcccatatccacagaaaatgcagaagttgaacagcttgcttgacaaccctcaaacatctttgaggcacctggtacagatgtttatggaggaatactctaaggatcttcaaccctttgatccccaaagggcacacaatcacagagcattccttttgactgtaaactggtttacccttgctttttgagagccaaaccattgtacccaacctgggaaaaagtaactacccccaattaaagtgccctcatgtgtccccagagcatggcttaacttcagggacaatcacccaggggaactaataactaaccagttgttcaacagcaggttaagctcagcagttttcacagtaggaggcaggaagtccccggggaaacaaagggttagttcattaggcttgaggtgttggatttttaaaacacctttgaccctttaacttttttttaccattattacttttaaatctcctttgggattggggaggctggcccaaaataagtcttaaaactgcttatgtcatatttggattttaagttcatgagcattcggaacagcaaagccatatatgcaatgtttttatgccattaaatgtctgattccaattaaaatataacaacgtatgtgtctttctagaagtcttaactcaaaggtggttctaattttctcagaatatcagtgaccctggatgttactttcaatgtaaagaactaatctagatggccgggcgtggtggctcatgcctgtaatcccagcactttgggaggccgaggcgggttgatcacgaggtcaggagttcaagaccagcctgggccaacatgggggaaaccccatctccacccaaaaattacaaaaattagctaggcatggtggcgtggcacgtgcctgtagtcccagctactcgggaagctgaggcaagagaatcacttgaaccagggaggcggaggttgcagtgagccgagatcacgccactgcactccagcatgggcgacagagtgagactccgtctcaaaaaaaaaaaaaaaaaaaaaaaaaaattagccaggcatgatggggtgtgcctgtagtcccagctgcttggggggctgaggctggaggatcacttgagcccaggaagttgaggctgcagtgagctgtgattgtgccactgcactcatcctggaagacagagtgagatcctgtctcagataaaataaacaattttttttttaagtcattgcttctggcccctgtgtgctctgtcctgtgtctgcagaatggggctgcctggttgagggacggcttttaccttctagactagctctgggatctctcatggggcatgaggtacccagctagatgtggccaggccacactccaggagctagcaaagcacccagcgttgctgacacccatctccccagcgcagcctgagcccccaggcccctctctcatatccaggcctgtgctggaggtggcggcctctgggggagtgtggttggggtctgcccacttccctccccctgccgaggctgtggcctcccgctggctgctgcttggccccatctcatggtcgctgcctgctgcttggccccatctcatgggcgtcatcctcagcactcacgtgatgggagagttttgtaggagctgtgagtcccaggtgcctgcgtgtgctgtgatgttatctcatgcagtccagtgaggggggactcccattagtctcctttttttgttttgttttgagacacagtctcacttcattacccaggctggagtgcaaggcacgatcttggctcaccacaacctccacctcccaggttcaagtgattctcctgcctcagcctcctgagtagctgggattgcaggtgcgcaccactgcgcctggctaatttttgtatttttggtagagatggggtttctccatgttggtcaggctggtcttgaactcccgaccttgtgatccacccgcctcggcctcccaaagtgctgggattacaggcgtgagccaccgcgcccggccatgattctccttctgtgggtggaggaactgggcactgggagcgtgaaaaccttgcccaggtggcagagccagctttggacgcaggtctgacttcctacctcactccccttgccttgacagacacagtaattcagagttgaacttggaacagagtttattttccatcactgtaaaacattctcagtgaggttactggcattaaaaaggtgggagaaatggaagaaaatggggttgaagaaaaaaaaagcctttgctcttgacagctaggcagccacagcggaggccgccaggctgcgagggcagcgtatgggggcagagcccggttctggcggcacaggccccggagtggagggggcaggggagggtctctgtaggtgggagagggcctgggggctgggaggcagcctggccttgtgccctacaggagggacctcctgggactttatggaagcctgtcttgcctttgacttgcaatgaaaatgcccctcatcactgggagtggggtcgggtgggggtccccagtggccagatcacgtggggtccagagagcagacatctgtagccctgatcttggcggccagtgaccacggccaagcagggcctgtcttttgcctggtacaaggcttgatgagaagagacccctgcccatcctcagtggcctggcagccaggggtgaaccccaggggaagctgggacactgtcccaaaggcccggcgccctactgtgctgcctgagcccgtggcaccgtggggcccaaggtggtgatgatttctctgctcttcccacggggcagacagcaggacacatcctggagacaaggttggggagacaaacaggtgcccaggtcagggctgatcacagcagttacaaaagcatcccgtgaagacggggctgcaagacggtgctggcaaaggaacaggacccaggaagaccaggcttgtcctgtggaggggccgggtcttggcagggggcaagcagatgtccccagtttttgctggtgatcaacaagtgaggccgctgctccattctacacaggacagcatttccaggggtttccagtattctgtctagattcataaaggtcaaaggccttgagaatctatgtgtgcctttctatcttaggtaaagaagagaaagagaaagcaaattctcgttactcctctttcaaaaagttcattaaaagccaggctggcagctcacagtgctataatcccagcactgtggaaggcctaggcaggaggattgagaggagttccagaccaacctgggcaacaccgtgagaccccatctctac

SEQ ID NO: 155872 - DNA, 702 bp, Homo sapiens
atggtcgcggcatctgccgccatcaaatttaaaaccaatatgtcgctggcgattgccatcgcgggtgaacatgtcgaatttgccctgattccggtcaccgcggtgaaatacacctacacggtgatcccggcgctggtgatgacctggtgcctgtcatatatcgaacgctgggtggacagcattacaccggcggtgaccaaaaacttcctcaaaccaatgctgattgtgttgattgccgcaccgctggcaatcctgctgattggcccgattggtatctggatcggtagcgccatttcggcgctggtttacaccattcatggttatctgggctggctttcagtcgccattatgggcgcgctgtggcctctgctggtaatgaccgggatgcaccgcgtctttacgccaaccatcattcagaccattgccgaaaccggcaaagaagggatggtcatgccgtcagagatcggcgctaacctgtcgctgggcggttcatcactggcagtggcgtggaaaacgaaaaacccggaactgcatttggacaccccccacactgagtccccaaccccccatgactcaaattcacaccgccctcaactgcaggcgtttataacagaagcaaagctaaatctaccgacaaggacaatgaccagacaagatggggaaactggagatggagccaaagaaaatattgtttacctctaa

SEQ ID NO: 155873 - DNA, 777 bp, Homo sapiens
cctttttcagcaatagcagcggtttaagatcccatgaacagtaacccatatttagtcacaggagacatttgtgcacacaatcgaacatatcttaatgatattgatgaatgattttgacacctattatgttcctttctcattgggcttggccattctgtggctgactatatgggcactgcatttcctaatcttagagagctctaacgccaagacatctgccttgtacatctcaggtggcctcctgtaacctgtgctgtctgtttcttgcagatttggacaccctcccacactgagtccccaaccccccatgactcaaattcacaccgccctcaactgcaggcgtttataacagaagcaaagctaaatctaccgacaaggacaatgaccagacaagatggggaaactggagatggagccaaagaaaatattgtttacctctaattgtgttgtcatttttccaaacaaaacaaaacactggcacttttgggagaaactttttgtctccattccttatgtatgtgtgattgtctgtgtccaaattgctttaagaataatatttaatatttcctggaagctcatttttttggcatgagtctaattaaattattgaaagccaccctgtttgtataatctttaacttatcaaatctaatttcagatttctggaggagaaactaacttgaataagcaggactattttaaaagttgttttgacgctagagtaaaattccatgtcacattttctacccaatcatctggatttcaagattccttttaa

SEQ ID NO: 155874 - DNA, 940 bp, Homo sapiens
tgtgccccagttcaagcccaagctccaccaggagaacggccctgggttggccaggtgtgaccatcaacaaggggcccagccgaccagggagacctggctgcaggaccgggaccgggagttccagtcgcagacgaagtttctcctccggagccgggtctagctggtcctccagctccaggagtcccagcacagcctggagcggctgagggagggccagcgcctggtggagagggagcaggcgaggatgcgggcccagcagagcctgctgggccactggaagcacggccggcagaggagcctgcccgcggtgctccttccgggtggccccgaggtaatggaacttaatcgatctgagagtttatgtcatgaaaactcattcttcatcaatgaagctttagtacaaatgtcatttaacactttcaccaaactgaatccatcagttatccatcaggatgccacttaccctacaactcaatctcattctgacttggtgaggactagtgaacatcaagtagacctcaaggtggacccttcttcagccttcgaatgtcagtcacaaactgtggacagccgctggttccggccatcagatacttcctttccatgaaagcagcaaggactcttgtaaaaatgatttggacacctcccacactgagtccccaaccccccatgactcaaattcacaccgccctcaactgcaggcgtttataacagaagcaaagctaaatctaccgacaaggacaatgaccagacaagatggggaaactggagatggagccaaagaaaatattgtttacctctaattgtgttgtcatttttccaaacaaaacaaaacactggcacttttgggagaaactttttgtctccattccttatgtatgtgtgattgtctgtgtccaaattgctttaagaataatatttaatatttcctggaagctca

SEQ ID NO: 155875 - DNA, 483 bp, Homo sapiens; identical to SEQ ID NO: 153575

SEQ ID NO: 155876 - DNA, 6335 bp, Homo sapiens
tttgttttattttttattttattttattttattttgagacagagtctcgctctgtcgcccaggctggagtgcagtggcgccatctcgactcactgcaagctccgcctcccgggttcacgccattcacaaattttcaatagaatgtttagtagtcacccaaagatgatttagtgtaataatgaacaactagaacataaaagaaaaaatttccatttacactagtatcaaaaaaggtcaaacacatagcaacaaatgtaacaaaatgtgtaagacctctacagtaaaaaccataaaacactgctaggataaattttaaaagacctaatggagagtgaaaatatgctcatggatctgaaacttgaaactgttaatatgaccattcttcctaaattagtttctagatttaccacaatcccaatcaagcatttttagtagcaatagataagttgattctaaaatgtctacgaaaatgcaaaggacccctaattgccaaagcaaccatcaacagaagaataaaggtggaaaacgtgatttcaggcaacatgatgtcacttactataaagcagcaataatcaaaataatgtggtattgacataagggtggacatataaatcactggaacagaattgagagtccaaaagtagatccacatacatatggccaattgcttttcatgagggcgttaagataattcaatgggggaaaagacagtcttatcatcaaaaggtactggaacaacaggatgtttgtagaaaaaaaattaaacttgacacttgcctcacaccatatacaaaaacttaaatctagaatacatagagaaccataataacacaacccaattaaaatatgggcaagaacaacaaaaaatatcaggtaagaatcacttgctagaaatagttttacttcaaagctaaagtttatggctagttataaaaaatgacatccctggccgggtgtggtggctcacgcttgtaatcccaacactttgggaggccaaggcaggaagatcacttgaggtcaagagttcaagaccagcctggccaacatggcaaaacccagtctctactacaagtacaaaaattagccaggcatggtggcacacgcctgtaaccccagctactcaggaggctggggcacaagaatctcttgaacctgaggggcgcaggcttgtagtgagccgagatcatgccactgcactccagcctgggctacagagtgagactctgtctaaaaaaagaacaaaacaaacaaaaaagaccaggcgcggtggctcacgcctgtaatcccagcactttgggaggccaaggtgggcagatcacgaggtcaagagatcaagaccatcctggctaacatggtgaaatcccgtctctactaaaaatataaaaattagctgggcgtggtggcacaaacctgtagtcccagctactcaggaggctgaggcaggagaatcgtttgaacctgggaagcggaggttgcagtgagccgagattgcaccactgcactccagcctggtgacagagcaagactccgtctcaaaaaaaaaaaataataataataatagctaaatactggaaacaaccaatattccatcaacaggagaatgaataaacaaattgtggtatagctatacaatccaatactatgcagcaataaaaattgaatcaatcactgatacacataacatgcaaggatgaagctcaaaaacattacactgaacaaaagaggccagacacaacagtatgtctgagtccatttacatgaaattctaggaaaggtagaatatcctacagtgtagagaacacaataataagaaaacaaacaacctgatttaaaaataggcaaaccaagagtagtagtgtgtgcctgtagtcccaactacttgggaggctgaggcgggaggatcccctaagcccaggagctcaagacctgcctgggcaacatagcaagactctgtctcaaaaaaaaaaaaaaataaatgggcaaaagatataaacagaaaactaaccaaagaggtatacagatggcaaataagcacatgaaaatcatttgttgcctgtggctggggtagggataggtactgaaggtaaatgggtacaaggggactttttagttgacgaaaattcactatattttgcttacagtggaagttaaacaggtttatacattagtcaaaattcatagaactggactttaagttgtgtgcatttgtttgtgtatgcattctaactcaatatacttaactataaaaaaagaatgaaaacaaaatttactcaagaaagaaagtaacaggccaagataacttccctagtgaattctaataaatatttaaggacgacataagttttaaaaaaaatcaatcttactcaaactaaagcataaaaaagaggaaatacttcacagttcattttataaagtcaacataactttgaggcctaaacctgacaaggacattacaaaaaagtaaaattacaggccgatctgtctcatgaacatagatgcaaaattcctaaacaaaatattagcaaactgaattcagcacgaaatagaatgaataaaacatcacaaccaaaccgaaattatttcaggaatgtaagattattttttcattcaaaaattaagcaacataatttagcacattaacaaaagaatggagaaaaatcaagtgatcatcaaaatcaatgcaggaaagcatttgacaaaattcaacaccaatttaggattttaaaaatttaggcaattttggccaggcgcagtggctcatacctgtaatcccagcactctgggggaggctgaggcgggcagatcacatgaggccaggagtttgagaccagcctggccaatgtggcaaaaccctgtctctactaaaaatacaaaaattagccatgcttggtggtgcacgtctataatcccagttacttgggaggctgaggcataagaatcgcttgaacctgggaggtgcaggtaggagtgagctgagatcctgccactaaatctcagaaagctattttgtaaatactgacaaggtgattccaaaatttacagtcatgtgctacataacaatgtttgggtcaagagaccactcacatatgaagatggtcccataagattataatgaagctgaaaaatcctgcaacctagggatgtcatagctgacagaaggtcaagtgcaaagcattactcacatgtttgtggaggtgctggtataaataaacctactgtgctgccagctgtataaaagtctagcatatacaattatgtacagtacatacttgataataaacaactacgttactggcttatttattttattgtactacattttatattgttattttagagtactcctacttacatataaaaaaaaagttaactgttaaatagcctcaggcaggtctttcaggaggtattccagaagaaggcatgttaggagataacagctccatgtccgttactgccccgaagaccttccagtgggacatgatgtggaggcggaagggattgatactgataatcctggctctgtgtaggcctagtaagtaatgtgtttgcttctgtctcaatttttaacaaaagtttaaaaacttaaaaatattttttaacagaaaaaagcgtataggccaggcgcggtggctcacacctgtaatcctagcacttttgaaggccgaggcgggtggatcacttgagatcaggagatcgagaccaccctggctaacacggtgaaaccccgtctctactaaaaaaatacaaaaagttagccgggcgtggtggtgggtgcctgtagtcccagctactcgggaggctgaggcaggagaatggtgcgaacccgggaggcggagcttgcagtgagcccagatggcgccactgcactccagcctgggcaatagagtgagactccgtctcaaaaaaaaaaaaaaaaaaaaaaaaagaaaagggccgggtgcagtggctcacgcctgtaatccctcgggcagatcatgaagtcgggaaatcgagatcacggtgaaaccccatctctactaaaaatacaaaaaaattagctgggtgtggtggtgggtgcctgtagtcccagctactcgggaggctgaggcaggagaatggggtgaacctgggaggcggagcttgcagtgagcagagactcgcgccactgcactccagcctgggcgacagagcgagactcagtctcaaaaaaaaaaaagaaaaaagaaaagaaaagagcttatagaataaggatacaaagtaaaaagccagatgtggcagctcacacctgcaatcctagcacttggggagattgaggcaggaggactgtttgagcccaggcgtgtgaaactggcctggccagcgcaggaagaacttgtctctacaaaaaatacaaaaattagctgggtgtggtggcgtgcacctgtggtcccagctactcaagaggctgaggtgggaggatcactggagctagagaggtcaaggctgcagtgacccatgatcgcgtcactgtactccagcctggatgacagagcaagaccctgtctcaaaaaaattaaaaaaaaaatacattgagagacagagataccaccaacatatgaaacacccatggagcactaagattcagtatgtatgtatggatggatgacacagatcagtagagaaacagataatacaaacattgtgtatgtttgtattcacacacacatattgaggccagctatgggggaggggtgagagagagagtggctcaaaaagaactagaacaagggatacacaaaaagatagaataaaaactcagtgtcataaatatgtcagtggcagaaccggagagagtaatcaagagaaaaagcatgtagcagaaaaagaaactgtacatcaaaaatgaaagcacccaagccaggagatccaggcggtagtgacttattgactacttacctccctggagaagcagcaagaccactactcctgcaatagatgggtggaaagagaaatctgttgagccaaacctggttctgctgtcccagataatggcagtgaaaatgtgggtgtgctcacatacaagatagagccacacttcatctgggctccccagccacagctgctgtggtttctttttttttttttttttttggagacggagtctcgctctgtcaccccaggctggagtgcagtggcgggatctcggctcactgcaagctccgccacccgggttcacgccattctcctgcctcagcctcccaagtagctgggactacaggcgcccgccactacgcctggctaattttttttttttttttttttttttttttttttttagtagaagacggggtttcaccgttttagccaggatgggtctcgatatcctgacctcgtgatccgcccgcctcggcctcccaaaagtgctgggatttacaggcgtgagccaccgcgcccggccctattttttgaaatccatatccatcttaaactcattgaatattcaaatatgaggcttgggaaaacccacagcacagctggggcatggaaaatgggcttgttaagacaagctgattcaactaggggggaaaaaagaggagggaagaaggcggcaattatatgtgtgaaatccccacctggatatcaggttgtagctgtttggaagtaccacagctcattgggagtatttgaattcaagaaaacttgcgtttcaatgatggggagacatgatacagaaaaaaaaatgtcctgggaaagaccctaacagtttgtaataatgtatcctactgacaatgccattgaggtggcggttctggttaagccctgggaaactgaaatctctgctgacctatttttactttgatctaaaaagaattcaatacaattctttaacagtacataaaactacaattgcaaaagaaaatggcagaaaaaaatgtcccgggaaagaccttaacagtttctaataatgtattctactgacaatgcattgaggtggcggttctggttattccctgttaaactgaaatctctgccaacctatttttactgtgatctaaaaagaattcagtacaattctttaacagtacataaaactaaaattgcaaaagaaaatgaaacttcctaaatagtcaaagttctaagccgtcaggctactagttgaccagaacttgagcaagataaaaagttatttctgatggggtaggtaggtcacatgctgtgagcggctcaacaccattgaccctgcaaaagcgttatgacctaagaagcacgttcttcacacccacctccccccgccccgcccccgggcccccaggttttgacatctcatggtaccactgtgggttacacgtattaacattaagcagaggaatgtactc

SEQ ID NO: 155877 - DNA, 106 bp, Homo sapiens
  misc_feature (1)...(106): n = a,t,c or g
gatattttgtagtagtatagtaatcgtgttatgtagtacagttttaaacgctataaatggaattttgtgtaaattcacaaaaatgtgatataaacagcgnctaaga

SEQ ID NO: 155878 - DNA, 384 bp, Homo sapiens
taagggctttatattattttctatagtttgctttatttggtttaacttaaatgtaacttgtctcttaaaaattacagatcattgaatatgagaaaaagcaaaccctgggacagaatgataccggctttatttgtgatgggacagctaacacattcagggtcatgttcaaggaacccatagagatcctgcccaatgtgtgctacacagcatgtgcaacactcaaagtaagagtcatgcactatgttccagatggtttcctcttgaatgttgcagaatgtgtgttttagaagctgagagtcactgacagctgagccatttataaagaggggggaaaagaagctgggagctaaaatattccactgccttccgaaaagaagtacttct

SEQ ID NO: 155879 - DNA, 597 bp, Homo sapiens
atggctgttcacccagtcgtcatcaccgtcatcatctcaatcttgggaatcatcagcagtgtcccccacacagagagacagcagcgccaggaaggctgcgggctccacgtccggcagctcgatctcggccgacgtggtggccatgccgccgttgaacatggcgtcaaagacggcgctgccggccgccagcacgaagcggtgggcggggatgcgctgcgggcccccagcggcggcggcgccgcgacccttgcccagtacgaagcgcacatcgctcagcagctccgagttgaagaggaaggcgaagcgctccttcagcgacgccttggtcgcctgccagttgtagagaggttcccgctgcagggggagcaggggccccagagaggacggccccttatcaccaagtccagcgcccccattgtgtatctgggacatgtcccaaggcctgtcccgaggagtgttttgcctggaagtggaggggcaggaaagtatggccaagggaacactgtgtccagagttcgttccttctggtgggttcgtggtcttgctgacttcaagaatggagctgtggaccttcctgatgagttttatagctcttaa

SEQ ID NO: 155880 - DNA, 2509 bp, Homo sapiens
  misc_feature (1)...(2509): n = a,t,c or g
agcgtcgaatttccgtgtcgactttccggagctgttgtacgctgggcagaagcagaatgtcagagacaacaattacctgtgacttttgggaataaacaaaaagttctaggaaaagcactttccttaatccggttcccactgatgacaattgaggaatttgcagcaggtcctgctcaatctggaattttgtcagatcgtgaagtggtaaacctctttcttcattttactgtcaaccctaaaccccgagttgaatacattgaccgaccaagatgctgtctcaggggaaaggaatgctgcatcaatagattccagcaagtagaaagccgctggagttacagtgggacgagtgatcgaatcagattcacagctaatagaaggacctctatagttggaacttggcttgtatggatctaattcatggcccctacagattatccaagtgaatatacagatcattgaatatgagaaaaagcaaaccctgggaccagaatgataccggctttagttgtgatgggacagctaacacattcagggtcatgttcaaggaacccatagagatcctgcccaatgtgtgctacacagcatgtgcaacacttcaaaggtccagattcccactatgggcacaaaaggatttgaaggaaagtagtgcatggaggacacctgctggcaagcaaggactgtttttttcttttttagttcccctgggcattaataatggcacttcaatagaagatggacaaattccagaaatcatattttatacataatttagcattatcatacatcttggctaaataataccatacaatcgtagtggtcagaagagngggggggggggggggggaaggaggggggggggggggggggagggggagggggggggcggggggggggaggggggaggggggggggggaaggcgaggggaaacggtgcacgagtgagaaacagattttcccattttccttacaactttaagagaaaagaactgggtttaatgggtttaaaaaaaagcacagctttttcaccgttcatcttgtataatttcatagattggctgacttagggtctttcaatagtttggggaattggaaagattcctgttatatatagcctagtttgggtttgtttttgttttaaactattttgaaggttaggtgagatgggcaaataggccttaactattttgaaggttggatgaaaagagatgggtccagtattccctaccagaattccttattaacctccaaataacctaaatttccagaaaatttaagaagctgacctttatatttgggtgggtttgaagtatcctgttggtaagccatttgtaataatgcctaaaaaaggccctaaataaaatgcccaagaaaatattcagtgcatttatagagaaggatattttgtagtagtatagtaatgtgttatgtagtacagtttttaaagctataaatggaattttgtgtaaattcacaaaaatgtgatataaacaggatctaagactggattcccatgtcactaaactgcaccactatacctgtctctctgtgtgggggacactgctgtatgattcccaagattgagatgatgacggtgatgacgactgggtgaacagccatcacttcaacattgtgataatccttcacagcaagagaccgaataaaatactaacatttctaacaactgctctgacattgtaaagagatccaacagaatcactcctgctgaaaaatacgctttctgccacctacacatttctatttagggaagtaaaatttgcttcatgggtcatgacccccattagtcagtgttacagctgtgctgggggatagggaagtatatctgggcagatttgatattttattacactttttttattaaaggcaggttttaaaatatagtaacatccatttttttcccttgaaagtgattctcttataaaaaatgaaagtggagtttaaggtatatcaaatccgttgtggaaggtgattaaaaatcaaaattccttttaaatatcaaccttaattttttcctaaggtaagataccaaaaaattttccatcctaaagtaatatttccacctttatattgtaaaggaaggtaggtatattgggtgggcccgaaggtccccctgaaattgcccaaagggaaatttttcccatggtaatgcctcctaacggatataaaccctccagttaaatggaattatcctatgggatgtgtggttcctggttaacctaaaaattaacccagtaaacacctcctgtagtaacccattaacagaaaatacttcctgtccttaaaaaaatatgatatgtccagagatgagttagtgtttcttgacggttggagaccttttaaatgcctcatctgttgtactggaacaattgaaactggcatggcagccataaaagggacaagaaacaggaactgttttactaactttggggacatcccctggagtttttaaaaataaataaatatatatatatataaaaaaaaaaaaaaaaaa

SEQ ID NO: 155881 - DNA, 506 bp, Homo sapiens
ctgaaagacgtcattactctacggaggcatgtggaaacaaaagttagagctaaaatccgtaagaggaaggtgacaacgaaaatcaaccgtcatgacaaaatcaatggaaagaggaagaccgccagaaaacagaaaatgtttcaacgtgcgcaagagttgcggcggcgggcagaggactaccacaaatgcaaaatccccccttctgcaagaaagcctctttgcaactgggtaagtttgtttgttttccttgcttttgaacatagtctgccaggtcaggacatggatacatttttctccctacagctctgtgctcaagccctgcagagggagatggcagagaggaaggctgcctacagcatcacagtcccatccctgttggtaaccgtgttgtgcaaaaacaccttcatccccacccagtgggcccctgatctaaattcaaagtgtcagaggttccatatttgtaatagcaaatgggccctgactgtaaattagtgaagagtgaatgt

SEQ ID NO: 155882 - DNA, 325 bp, Homo sapiens
tttttttttttttttttttagctgagcatcatttaaggccttcatttggaattgtccctgtgggtaataagttacattcactcttcactaatttacagtcagggcccatttgctattacaaatatggaacctctgacactttgaatattagatcaggggccccactgggtggggatgaaggtgtttttgcacaacacggttaccaacagggatgggactgtgatgcttgtaggcagccttcctctctgccatctccctctgcagggcttgagcacagagccagttgcaaagaggctttcttgcaaagggggtgattttgcatttg

SEQ ID NO: 155883 - DNA, 302 bp, Homo sapiens; identical to SEQ ID NO: 147798

SEQ ID NO: 155884 - DNA, 714 bp, Homo sapiens; identical to SEQ ID NO: 115286

SEQ ID NO: 155885 - DNA, 511 bp, Homo sapiens; identical to SEQ ID NO: 145529

SEQ ID NO: 155886 - DNA, 531 bp, Homo sapiens
atgtttcaacgtgggcaagagttgcggtggcgggcagaggactaccacaaatgcaaaatcaccccctctgcaagaaagcctctttgcaactgggtcagaatggcggcagcggagcatcgtcattcttcaggattgccctgctggccctacctcacagctgaaactttaaaaaacaggatgggccgccagccacctcctccaactcaacaacattctataactgataactccctgagcctcaagacacctcccgaatgtcttcttattccctttccaccctctcctcttccaccctccgtggatgataatctcaagactcctcccttagctactcaggaggccgaggcagaaaaatcactgaaacccaagaggcagaggttgagtaagctgagaacaggtcattgcactcaagcctgggcaataagaagaaatctgtgagtggaacaaaagaaaaaaatcaaaaaacaaaacaaaacccacactccaaaaacaaactaacaaagaataaataaataatataaaaaaaaaaaa

SEQ ID NO: 155887 - DNA, 4990 bp, Homo sapiens
atggggtctacaggtgtgtacaaagtgacccctcgctcctgccaccggtttgagcaagcgttctacacctatgacacgtcttcacctagtatcttgacattgacagccattcgccaccatgtccttggaactatcaccaccgacaaaatgatggatgtcactgtgactatcaagtcttccatcgacagtgaacccgccttggtcttaggccctctgaagtctgtgcaggagctgcggagggagcagcagctggctgagatcgaggcccgcaggcaggagagggagaaaaacggcaatgaggaaggtgaagaaagaatgaccaagcctcccgtgcaggagatggtagatgagttacaaggccccttctcgtatgatttctcttactgggcgcgtgtcctctgttttgtggggacaggacccgccaaactgaagtatattaattattttaggtctggagagaaaatcactgttacaccgtcatctaaagagctgctcttttatcccccttcaatggaagccgttgtcagtggagaaagctgcccagggaagctgatcgagatccacgggaaggcaggcctgtttttagaaggccagatccaccccgagttggaaggagtcgagattgtcatcagtgaaaagggggcaagttcaccgctgatcacagtctttactgatgacaaaggtgcctacagtgttggccccctgcacagtgacctggagtacacggtgacctcacagaaggagggctatgttctgactgcagtggaaggaaccatcggagacttcaaggcctatgccctggcaggcgtcaccctccacagccaggatgtcctcatgctccctggtgacctcgttggcttgcagcacgacgctggccctggcgccctcctgcactgctcgccggctcccggccaccctggtccccaggccccgtacctctccgccaacgcctcgtcatggctgccccacttgccagcccagctggagggcacttgggcctgccctgcctgtgccctgcggctgcttgcagccacggaacagctcaccgtgctgctgggcctgaggcccaaccctgggctgcggctgcctgggcgctatgaggtccgggcagaggtgggcaatggcgtgtccaggcacaacctgtcctgcagctttgacgtggtctccccagtggctgggctgcgggtcatctaccctgccccccgcgacggccgcctctacgtgcccaccaacggctcagcctcggtgctccaggtggactctggtgccagcgccacggccacggctcgctggcctgggggcagtgtcagcgcccgctttgagaatgcctgccctgccctggtggccaccttcgtgcccagctgcccctgggagaccaatgataccctgttctcagtggtagcactgccgtggctcggtgagggggagcacgtgatggacgttgtggtggaaaacagcgccagccgggccaacctcagcctgcgggtgacggcggaggagcccatctgtggcctccgcgccacgcccagccccgaggcccgtgtactgcagggagtcccagtggtcctgctggctggctcctcaggctacctggtgggctttaaattcctggaaagtcacggctctgacagcggctccgctaactcattccaccgtctcatttcacgaaatgaatttaaaactccgctccctgacctcacacgagtccccaggtacagccccgtggtggaggccggctcggacatggtcttccggtggaccatcaacgacaagcagtccctgaccttccagaacgtggtcttcaatgtcatttatcagagcgcggcggtcttcaagctctcactgacggcctccaaccacgtgagcaacgtcaccgtgaactacaacatcaccgtggagcggatgaacaggatgcagggcctgcgggtctctacagtgccagccgtgctgtcccccaatgccacgctggcactgacggcgggcgtgctggtggactcggccgtggaggtggccttcctgtggacctttggggatggggagcaggccctccaccagttccagcctccgtacaacgagtccttcccggttccagacccctcggtggcccaggtgctggtggagcacaatgtcacccacacctacgctgccccagctgcacttggaggcggtgccgtcctcaccaggcagccctcagtgctgctgcacctgtgctccgtcccgcacgtggcttgggagcctgggacccttaaggctgggccgcaggtgagtacagtcctgaccgtgctggcatctaatgccttcgagaaccggacgcagcaggtgcctgtgagcgtgtgcgcctccctgccctctgtgagcgtgtgcgcctccctgactggggcctgctggtaccccagagtgctgatccgcagtggccgggtgcccattgtgtccttggagtgtgtgtcctgcaaggcacaggccgtgtacgaagtgagccgcagctcctacgtgtacctggagggccgctgcctcaattgcagcagcggctccaagcgagggggatacaccttcacgctgacggtgctgggccgctctggcgaggaggagggctgcgcctccatccccctgtcccccaaccgcccgccgctggggggctcttgccgcctcttcccactgggcgctgtgcacgctctcaccaccaaggtgcacttcgaatgcatgggctggcatgacgcggaggatgctggcgccccgctggtgtacgccctgctgctgcagcgctgtcgccagggccactgcgaggagttctgtgtctacaagggcagcctctccggctacggagccgtgctgcccccgggtttcaggccacaattcgaggtgggcctggccgtggtggtgcaggaccagctgggagccgctgtggtcgccctcaacaggtctctggccatcaccctcccagagcccaacggcagcgcaatggggctcacagtctggctgcacgggctcaccgctagtgtgctcccagggctgctgcggcaggccgatccccagctcgtcatcgagtactcgctggccctggtcactgtgctgaacgagtacgagcgggccctggacgtggcggcagagcccaagcacgagcggcagcgccgagcccagatacgcaagaacatcacggagactctggtgtccctgagggtccacactgtggatgacatccagcagatcgctgctgcgctggcccagtgcatgaggaagctgcctgaacaggacatcgcacaaggatcctacattgccctgccattgacgctgctggttctgctggccggttacaaccatgacaagctcattcctttgctgctgcagttgacaagccggctacagggagtcggcgcgctcggccaggcagcctctgacaatagcggcccagaagatgcaaagagacaagccaagaaacagaagacaaggcggacacttgcaacatccatcaacaccagccgagagcccagtacagacgaccagctcccagcccacaatcagaccatgccacagagacacgcacgccgtagcgcacccccaagagcctacgaccgcaaaacaagacaagaagagaacccacaccaaacgagaagtcacgccgctgcgaagcgccgcgagagaccgccccacgacctacagaaacaagcaaccacgcggctgatccccgccggaccgagacgcagagacgggacatccccgagacggacacaaccaccaccgaacacgcgacgcccagcggcggcgggccacctagcacgatttcggcgagccgcgcccggcgcccgcggcgcccgccctcccacagcccgaagggggcgagaagaactcgaccccgcccacatctacgccgccgcccccggactaccaaccccgcccagggcgggaaggacgccccccaccccggaaaggcgagacaggaacacgcgacgccggcggacccgagaagagggagaaggcgagtttagacccgtgtctttcctgaagactatcttcccgtctcaaaatggacatgatggatccacggatgtacagcagagagccaggaggtccaactgccgtagacaggaaggaattaaaattgtcctgggaagacatctttactttatggagacaggtggaaaccaaagttcgagctaaaatccgtaagatgaaggtgacaacaaaagtcaaccgtcatgacaaaatcaatggaaagaggaagaccgccaaagaacatctgaggaaaactaggcatgaaagaacgtgagcacggagaaaaggagaggcaggtgtcagaggcagaggaaaatgggaaattggatatgaaagaaatacacacctacatggaaatgtttcaacgtgcgcaagcgttgcggcggcgggcagaggactactacagatgcaaaatcaccccttctgcaagaaagcctctttgcaaccgggtcagaatggcggcagtggagcatcgtcattcttcaggattgccctactggccctacctcacagctgaaactttaaaaaacaggatgggccaccagccacctcctccaactcaacaacattctataattgataactccctgagcctcaagacaccttccgagcgtctgctctatccctttccaccctcagctctaccctcagctccaccctcagcggatgataatctcaagacacgtgccgtgtgtctgctccatccccttccaccctcagctccaccctcagcggatgataatctcaagacacctcccaagtgtgtctgctcactccccttccaccctcagctccaccctcagcggatgataatctcaagacacctcccgagtgtgtctgctcactccccttccaccctcagctccaccctcagcggatgataatctcaagacacctcctgagtgtgtctgctcactccccttccaccctcagcggatgataatctcaagaaactaaggaagaataaataaataatataaaaataaaaaaaaaaaaaaaa

SEQ ID NO: 155888 - DNA, 2546 bp, Homo sapiens
ccgtagacaggaaggaattaaaattgtcctggaagacatctttactttatggagacaggtggaaaccaaagttcgagctaaaatccgtaagatgaaggtgacaacaaaagtcaaccgtcatgacaaaatcaatggaaagaagaagaccgccaaagaacatctgaggaaactaagcatgaaagaacgtgagcacggagaaaaggagaggcaggtgtcagaggcagaggaaaacgggaaattggatatgaattataatacacttctacatggaaatgtttcaacgtgcgcaagcgttgcggcggcgggcagaggactactacagatgcaaaatcaccccttctgcaagaaagcctctttgcaaccgggtaagtttgcttgttttccttgcttttggacatagtctgccaggtcaggacatggatacatttttctccctacggctctgtgcttcaagccctgcagagggagatggcagagaggaaggctgcctacaagcattcacagtcccatccctgttggtaaccgtgttgtgcaaaaacaccttcatccccacccagtggggcccctgatctaatattcaaagtgtcataggttccatatttgtaataagcaaaatgggccctgaactgtaaattagtgaagagtgaatgtaacttattacccacaggggacaattcccaaatgagggccttaaatgatgctcagctaagctgggttcttgtgtggcctctgtaccttcaaaagctgccgagtcctatgattacacgtgatgggacttgtacacttgaagtgaaacacagttttaaaacttgctttgtttaggaattcccacctcatttttccatgggacaaaagtattctttatgtcctagtgcacttacaatttgggtattacctggggagtgaaaaggaaatattacagccatgcctaactggactttcttgagggtaaggattgttctgtccaggaaaaccctctcccagttcccctgcagctcttcaggaatccacatcttttccagagctcttttgtttctcatggggtggcacctccagagtgaagaagatcctttgtcaagaagggaaacagaggggaaatgagagggtcctgcaggcagagctgggaatcaactttccactctgcctcttgcaagctgtttgactctgggcacaatttcttcctttcctctggaaacctctgttttcttagatttggaagcaggatggtcacactgaccttgcagagttcttgagattcagagacagaacataaaaggcctggaaaacattctccaaaaagaagctgcaacatgtgtggacaatgggcttttcatgcctctcttactgtctcttactgtctgttgacctggtgcaagaaacatgctctggtgatggcttttgagggaggaatgaggatagacatatacactcctgtgtctcaaacatagcttctttattactctgttatgactctgtcttccctggggcaggaccccagcctgcctacatttgcagacagacacagtggcatgtggagacaacagtgtgtcccaaagacttttctttaccccctagctgtcggcagtactcagtggatatggtgatattatgacactgatactgctattttgaaacctggaggatggaaaggtgcaaaaatctatcaccagcaacagaaggtgcagactgtgttgggtggcggtaattttgtccatcaaatgaatatgtgtgaaaacattccctcctttgggccctacaggtcagaatggcggcacgggagcattcattcattctttcagggattgccctgctggcccttacctcacagctgaaaactttaaaaaaacaggatggggccaccagcccacctcctccaactcaacaacattctataactgaataactccctgagcctcaagacacctcccgaaatgtctccttcaatcccccttccaccctcagtggatgataatatccaaggagtgtccctcttgctcctcttcccaccctctcctcttccaccctcagtggatgataatctgaaaggagtgtctccctggtcccctccttcccaccctcttccttctttccaccccttcaagtgggatgataatctgaaaggacttgtctctttgtcccctccttcccacccctctccctccttccacccttcagtgggatgataatcttcaagactccctccccttagcctactcagggagggccgaggcggaaaaacccaccccaaaccccaagaggtgggaggggtgggatgaggtggaacaatcacccgaaacccaagaggcggagggcggactgaggtggaacaattcgcccaagcccaagaggcagagggaggccgaggcacaacaattacccaaacccaagaggcggaggttgagtaagctgagaacacgccattgcacttcaagcctgggcaataagaataaatccgtgggtcggaaaaaaagaaaaaaatcaaaaaacaaaacaaaacccacgctccaaaaacaaactaacgaagaataaataaataatataaaaat

SEQ ID NO: 155889 - DNA, 418 bp, Homo sapiens
  misc_feature (1)...(418): n = a,t,c or g
nnnnnnnnnnnnnnnnnnnnnnnnnnnnnnnnnnnnnnnnnnnnnnnnnnnnnnnnnnnnnnnnnnntttaaaaagtaaactttccgattataaaatcaacttacaaaatcagtaacatttgtatacaccaacagcaattaatctgaaaaaaattcaagaaagaaattcaatttacaaatagctgcaaagataactaaaaaaactacctaggaataaatgtaataaaagaagtgaaaatctatacaataaaactattaaatactgataaaaaatgaaaagaacccaaaaaaaggagagctatcccatgttcatggtttggaagaattaatattgttaataagtttcatactacccaaagtgggctacagatcgaatgcaatacctatgaaaatgccagtgacaagccggacgcgtggg

SEQ ID NO: 155890 - DNA, 795 bp, Homo sapiens
ttacttgtttatttatttattgcccaggctgaagtgcagtggtgtgatcacagctcactgcagcctctacctcccaggttcaaaatatcctccccactcagcctcctgagtagctggaaccacaggtcctgccaccatgtccagctaatatttttaattttttgtagagacaaggttcttcctgtgttccccaggctggtcttgagggagctccagtgatccttctgcatcagcctcccaaagtattgtgaagataggcgtgagccactgcacctggccctaggaactttagaaaccgtcttgcccagtcccttcattttacaggtgaagaaactgtgcctcggaagaagggtgacttgccttgggtttacagacaaacacagggttagattccaggtcctcacaggtgtcaagtcttggccttttaacccaaagacttccttctttctccacatatttatgtgtccacctccattctatggccaccacctgcctgagctgtccttgctcttacatggatgacagtgatcaatgcaaaactgtgacactttgctcatggcatcccaggaatgccttctccttcccatccctcatctcctgctcattcttcaagtgactcaaatgccacctcttccaagaagcacatactggcccgatgtgacctctgcccttccagcttcattcagcacttggaatccacacagctcatgccatggtgttaccacagataggctgcgtccttatgttattaacttttcagtactgagattagaaattccgaagagcagggcttgc

SEQ ID NO: 155891 - DNA, 403 bp, Homo sapiens
  misc_feature (1)...(403): n = a,t,c or g
cagtcttcttctgccattagttcaactgcctttacgcttgtgnnnnnnnnnnnnnnngaaaagggggtttaattttggtgccccagataaaagggaatggggggaatttgggttaattgaaaccttggcttccggggtaaaacaatttttcgggccaaaccctcaggagaagtggggattaaaggaaaaccccccatggcggggtaaatttggttttttaagaaaaaacggggttttccaatttgggaagggggggattaaaacccccaccctcaggaaataccccggcctggccccccaaaggggtgggaataacaggggggannnnnnnnnnnnnaccggttttttgttttttgggtttttgtgaaaatacaaacctaagggccaaaaaaaaatttattgt

SEQ ID NO: 155892 - DNA, 353 bp, Homo sapiens
tcgacttttttttttttttgtgagacggagtcttcctctgtcacccaggctggagtgcagtggcacaattttagctcactgcaacctccacctcccaggttcaagcaattctcctgcctcagcctcccaagtagctgggattacaggtgtgcgccaccatgcccgtctaatttttgtgttttcagtagagacggggattcaccacgttggccaggctggtctccaactcctgacctcaagtgatccgcccacctcggcctcccaaagtgctaggattacaggtgtgagccaccatgctcagccaacataatttcaatgcatgggaaaacagaggaaatttatttagttagtgc

SEQ ID NO: 155893 - DNA, 1350 bp, Homo sapiens
  misc_feature (1)...(1350): n = a,t,c or g
tttgagacgganncgcttctgtcacccaggctggagtgcagtggcataatcttggctcactgcagcctccacctccaaggttcaagcaattctcctgcctcagcctcccaagtagctgggactacaggcgcccgccaccatgcccgactaattttttgttcacttgtgttagccagaatggtctcaatctcctgacctcatgatccacccgcctcggcctcccgaagtgctgagattacaggcgtgaaccaccacgcccggcctggcctttttctttaaggagtgatgggaaactgttataaaatcagatgtgggaggtgctctactaccattaatttacatgcaccagtctcactttactttcagctttcaaagaggtaaacaaaggaggcattttctctatctgagtgaaacatggagacgcagagttcctgtgattgcacgaggtcagctgttcaagcggagaaccagaaccaggctctggctctacaccccatgttccttcagcaggcctgtggccagctgtgacaagtatagcctggccacctggctgaggctcacagagcccacagccagcatggtatgggaaatcctggattggggctggttgtggtccagctgtgatccagctttctccacttctagacagggctagtgccaggcaatgaagccaatgactacagatgtcactcacagctggaaaatgggcctcctttggcaaaggaatctggaagcactctctagctgctctgctcaggctggggccctgctagcctccttttagataaagtggggggaatagattcaccccccaacagtgaaaataagggaattcaggttccagacgatcatcacttggttaagtttgcacagaaagtgtaaccagttccagtgagaacaaacctaaagctgtccgtcttttaaagccaccctgagtggtaaagataaggtacatatcttaacctatataaaggtgaagtattatttttcaactgtacaagacacattactagggttacagttcagtggcatgcaccttatgttggactgcatttaaactacaactgtgtagtgtgacatctccattacatggcaccaaacatttgtcaattgcacaactattacttggtgagatctggttttaactacaatactttaaaagccaatttctatttaaatgtggtatgaaaaaaatccattagcttacctttatacacattttacatttatggccccctcagtccggtaatttctgcacccgaatgggtagtgttgcctttgaagtagtcaccttgggaagatgtatgtttatcccagtgaagctgaccttacacagaacattcctagaac

SEQ ID NO: 155894 - DNA, 1248 bp, Homo sapiens
ggagcagaagtttaataagcaaaaaggaagaagagctctccgttgcagagggggcctgagcgggttgctaagttgtagtaaagatgtcaaggtttcttttttttctgtcgccaggctgcagtgcagtgggctgatcttggcccactgcaacctccacctcccgggcaagtgattctcctgcctcagcctcttgagtagttgggactccagggcacacgccaccacgctcagctaggttttgtatttttagtagagatggggtttcaccatgttgggccagggatggtcttcgatctcctgacctcagggtgaagcgccctgcctcaaccctcccaaagtgcctgggattaacaggtgtgaacccaaccgtgcccggcctgtcaaaggtttttacaaatgggctagtgacgaggggttagaggagggatgtcttgtcctcccagggcccagggttttagctgggacaaggtgtgctatttgtatagagagtttctgtcagactcagtctgtgctgctctgtgacacttttctgcgagggtctctgggtctgctcccagacatcttcttggggttacaggcacccctcagtctgcttttagcttcccttagtgcacctaaggggacgggaatgtgcttattagggtccactgttttactggggcccattgtggaagtgtgaagtttggtgatcacccaggagacaccccccgcactcctgtgctcgagctgtctcatctgtgattcacagtctgctctttctggctgcttgtcgtgagaagtgattttgaaccccgagggtagaaagggagctatttttgagctgctttttgttaaaaggcaaattttctgctggggactggctttaccccgtctacctaaatcatttctttctgcctcctgtaacagtcgccttttgtgttctgctggcatttgtttgaacacagttcacaggttcagtggttgcatctctaatcagctgccagtccccatcccagacattctttgcatctaagctgaggtctgaactgagtggggtgggctggtgtttccatcctcacaactccagtgagccgggtgtggccgtggcctgcgtctccctggcggttagtgatgttggcatcatccacctttttcaaacaaagcactggactgagagaattcacacactgtatccacccagtccatggtttttagtaaaaggtttatagaggtgagcagccatcaccacacacaacctaagaacattta

SEQ ID NO: 155895 - DNA, 2557 bp, Homo sapiens
ggtggaattccggcgctggacaagaacgtggccgagctgaccgtcatggacgtgtacgacattttgtcgcttgtgggccacgaggtcgagcgggtgattgaccagcacggctgcgaggccatcgcgcgcctcatgcccaaggtcgtgcgcgtcctggagatcctggaggtgctggtcagccgccaccacgtcgcgcccgagctggacgagctgcgcctggagctggacccccctgcgcctgtgttaggatggaccttatcgagaaggagcgcaagcaccagaaggagctggagctggtggaggatgtgtggcgaggggaggcgcaggacctcctctcccagatcgcccagctgcaggaggagaacaagcagctcatgaccaacctctcccacaaggatgtcaacttctcagaggaggagttccagaagcatgaaggcatgtcagagcgggagcgacaggtgatgaagaagctgaaggaggtggtggacaaacaacgcgacgagatccgcgccaaggacagggagctgggcctgaaaaatgaggacgttgaggctttacagcagcagcagacacggctgatgaagatcaaccatgaccttcggcaccgggtcacggtggtggaggcccaggggaaagccctgatcgaacagaaggtggagctggaggcagacctgcagaccaaggagcaggagatgggcagcctgcgagcagagctggggaagttgcgagagaggctgcagggggagcacagccagaatggggaggaggagcctgagacggagccggtgggagaggagagcatctccgacgcagagaaggtggccatggatctcaaggaccccaaccgcccccggttcaccctgcaggagctgcgggacgtgctgcacgagaggaacgagctcaagtccaaggtgttcttgctgcaggaggagcttggcttactataagagtgaagaaatggaagaggaaaaccgaataccccaacccccacccatcgcccacccgaggacggtccccccagccgggagtcgggcatcaaggcgacttgtttagcttctttcttcccggaggttaagaagcgccttggccaaacacacaggggaaacgtgcacatccagggagtccctttggacaagttgggcaaacaccccaccgcgatgaccggttacacagagcaaaggacaggaagcccctgcagcatctgttgaccttgggcccatctccacccgtccaaccctggacttgcccgccaccagcgcctgcaaccgaacttgcagcccaggggtcattgcttgcctcaagcctctcggtgcagatgcaccctgaaaactgacccctcaaacagaactgtcttgatttgaggatggacattgaaaaactgacgccaaactctaaagaaatgtttatttatacccagggctatcactgtttctaatagatgactctgatcccgtaggatatatattttaataatcccacaaacggaggccagacttctgcgttaacttcagtaacacaagcttctttaagccaaatacatcacttgcccactatcattgctgtttgacttgcctttgtataaaatgcctatgtgtagaggttttattatccacaggtgacatagttcagcaggaggcatggaagggctagatcttcattagttacattcatgaaattgtgatggtaacgtattatacagaatgtatccatcaggcagacaaggggtctgaagtcacaggctcagtagcccaactcagacacaaagccacagacaatatggatgatggtcctcttacccagaaactggagacaactttgcaggcacccctggctgcgttcctgataatgcctagagcatgtagcaatgttcaaggcaggtgccttggaatctgctgtgagttatgcagtactaaccaaacaaagttgctaaggatgagatgttgcaacatttccttgtgtgcacttttttttcctggacatcttttttttcttttaagattcattaagtcatatacttagtcccctgcaaagaagaagacagatgtcccagagcagactgaaagcggggcgtgggatcctaggcaatgcaagagggcaggtgggggagctgtagcagaacaagggtgctaggtgggaagctggcttggggaccacacgtctggctgactcacagggctatagcagcagacagagagccagatgctctactgcaactggtgagttggaggcttgcccacataacactgtctttctctccacccgccaagcatccagggcacagggctggttgctcacagattgagcgaggtagcacctcctaccagcactcaagtttatcagggccgcgttctaaacattctactgaagtttgctaagaaaccattaggtgaggctgagccaccgtgcctggccaaatgtcacttttttgataagtcagcagatccagctcttgagcacatcagaggctagataatcgggacagaaaggaaaaatcaatccatcagaaagtttatacatgcaattatgtaaaataaaatcaagaacaaaaagcataaaa
